United States Patent Application Publication US 2015/0354009 A1 - sequence listing, part 4

SEQ ID NO: 78 - DNA, 210941 bp, Homo sapiens
gcccggagagccgcatctattggcagctttgttattgatcagaaactgctcgccgccgacttggcttccagtctggctgcgggcaacccttgagttttcgcctctgtcctgtcccccgaactgacaggtgctcccagcaacttgctggggacttctcgccgctcccccgcgtccccaccccctcattcctccctcgccttcacccccacccccaccacttcgccacagctcaggatttgtttaaaccttgggaaactggttcaggtccaggttttgctttgatccttttcaaaaactggagacacagaagagggctctaggaaaaagttttggatgggattatgtggaaactaccctgcgattctctgctgccagagcaggctcggcgcttccaccccagtgcagccttcccctggcggtggtgaaagagactcgggagtcgctgcttccaaagtgcccgccgtgagtgagctctcaccccagtcagccaaatgagcctcttcgggcttctcctgctgacatctgccctggccggccagagacaggggactcaggcggaatccaacctgagtagtaaattccagttttccagcaacaaggaacagaacggtgagtctttcccccattctccccctgcttgtttctcgctgtgtgtgttaacgttggcattgtgcgttggtatgtgatatataccagactgtgaaggtatctttggtctctcattacatgcaaatgtgcgctgcgttcattggcatggactgttaaaggttaagtgtagtttgcaacttcgggagctgccacaaagctccaagagggcaacgtgagtgccactgctgagtgaggacattctgggagcgattgtgaacgtcatttcaaatgcacattgcaggttcgctcattgctaaagttagaagttcaagaactgcctctaaaaacgaatccaaaatgaatgagccttggcatgtttgactttactcagatttggggagggcgaggggggtcggtcaggaaatatatcagccgcattaattgaagcactctaggtcgaagtcatcaattaatcaatgagtagataggaaatatagaggtcaagaggctgtgtggtcgtttttagaggaattaaaaagtgtatttctcttgctccctagtttttgttttttaaacttgcctttgtactctgaagtccttacctttctggtggtgtgtttttgtatgtgttggtgaatgactgctattttgtgtgtgctggaaacgacttaatcctgcataggaaatgagaattactttcagctttcaagtgtacctgaaatgtttagaaaactctcagatgcaagttcccttgggctgggattgcacagagctggagaaaggctcctttcataaagccagggcagcttcagggtgtgtaatttgcttagcctctgaacccatatgatttacatcattcaatttctaaactctttttctcttcatctaccattatgaagtcatttttgagaatactttgtaaatagaaattttatactgcacatgaaaccacaatgttcatgttaggctgtctaaaattggaatatttaacgccctgtttacaaatggtggctcttactgtaatttgaaaaggaatatacatgtttttactgctttgtatatcatctattcagaatgcaaggattctgtcacttgattaaccatgcaaaatgaacacaagtggcatacctacaaaattaagataggatgtgctatagttttaagtcagagtgattttttttccttttcatattggggtgtttcaagacttcaactttgaatttaaactctatgaagtgttcatgtttaagaaagcacagaaagttttagggtataaaagtagataaaataaggattctgccgacttttgcaaacgttatttgtatttgctgttgcgcagcaagacatagtatcacatttatcagctaatattagtgtggtgcttcttacaacttgctaatgtgatgccacatggcacctgcaggctccttgagctgctgatcaaagggcagcctagggatgtatctctaatcacagtagctgcagaggtctgggggaaagtgatcaaaggagccacagcaccagctgtacccgtgcaggaaacacatcagaccaacctttgttctttctcatgtaaaataaatgtccagttcaaaatattgcttcttactagccaagctcctccataatgacaacaatgcacaatattcctggcttcctggcttctgttttttattgttcctgtcccatatcatttctcctattgccttgtcttatcaagcctctcttggcatctgcccgaatctctttgctgacctgtgcttctctttgtcctttccttttagttctctcttgtgatccccatgctatcatcactttgtaagggtcccagagctgtcatgcagcatgtggtcataggccactttacccaagtagattcacacctccaggagagatgagttcattaagccaggccacacacattctgttgccatctgaggctgggccatttccattcctaagatgcatgatgctaaaaattgctgcttgtttcctaatctgtgggtagaggattaggctatgtttgggggttggtctatgttaaggatggcagcaggaagtaactagaagtagaggaactacttgtagtttttagcccaaggagaagtggcactggccagcactagggggcaatatagagctattttcttgcacatgctcaggttgatttttatacgtaaatgtttcaagatttgagggtaacaggtgggtgctgaagaagattcccctggaatgtaaccagatttgttagagctactaccattaccgttactactactacttctacttcttcttctttttgtctttcaaattttccattatgtgggtaatcttttgcccacatactgaattatgattgaattttgattgccctgttgctgtctcaattttgacagttgtacagtcctgtaaatacgaaccctccttgaggataccacgtagaagatcccattggcccagtttgtgcattgcatcgttttgtgacaggtcttctctaactctgaaatgtccaaattgatatattatgactgtagcagctcattcttgtctccaaggacccctcctcatgatactctcttttcttgagtattctaaagtccctaatggtgattactcaatcaggtacctcgggctgctcagttttaatattaacttggtatttcaagaggaggtagaattggaaattgattgctgtagccaatgctgcatacatggatttagactggatcatgtggacatggttcagaattagctttgaagggttagtgtcatttacactattgttaggtatctggtttttgacctaccattggattgcaattcttgccacttttactgtacaaagttttatcctctaatattataagttgacttcatatactatacttaatttttaaccttacttctgaccctgtctcacttatgaaaacaagagtcttcagatttaacttgaggaaagagattaaaagataacattgacttgcttggagggtgtctggcctgtatacttgttgtatgaccatggtgaaaaatactcatattttgtgcacactggttttagatgagaatgcctattgtggaatgattaagttctgggacggtgcttctgagttgtagcagaaagaatcatacacccaggaacaaaacaaaacctactttgtctgttgcatacagcacaaagagatgtcaatgacaaagttgttggtggaggaatgcctcttctacctgtgttgttggtgagtgatttttagtttactcatagattaagagcatgcgtatcatttttttctcattttctttagccattctgaattttgatttggaatatgccgctcttcgctacggttggtcttattaacatcagttattgtatgtgttctttttctcaagggcttttgtggcatgtggggcaatttactttggtctgctggtcgtgcccttttgccggtatcttgtgtttatggattttccatctctttttatcagtgccagctttctcttcctactgtcaatgctcctgtatctaacaaaatttaaattaaaaatggaaaattaaaaaaggtgcccagtcccctcgccatcatttttaggtggcagcttcaaatctctgttttatcaaaaacagataaccacaatatttagaacagtgtccaagagtaaataggctctaactgcagactaaagggactttcctgtaagtttccctgtaagttttattgcgtgacctttttgacatttatttttgttgtttaaaggcttttttacaaaaaaaaaaaaaaagaaaaaacttcctcctggttctctgctgtttgaaatagttgaggaagttgaacaagtacagtgccattatgtaatgatgaattttgtcttttcacagtaggtgattaaaaagctctattatgtggtaatttttcttccatatcaattttaatcatagatattggatggatgatatactttgcttttaccactgaaaggtgtttagaaagtacagaggtttgtaggaagcctcagggactaatatatcgtttgttaaatagttgtaaatagaggatgggattggacattaaacttccctcagtgctgccatctcttctacgacctctagttctgtctcaggcacggaagccttagctttgtctacttgtatttcacccttcctgaaacttatttcttaaatatcttctgtatattagcttccacttcatgtttttttcaagctttagactgataaggttctaagttttatctataaacttttgcaccctttgtggaaacaaaattctaatgataaagtgatatgttgaataagtaataacaaattaagacattcataaatttcatagtaaaaaaaaaaagtttccaagactgatgatattttccccgtaggtttctgtttgtatcaaccaaaatggtagaagtcataaagtcccttcatttacttactctgattttcatgtttctaatttggaagcattatacgtaatcagaatatataactctgtgtaactctatgtaatctctatataactcatttattaagcaatctctgttgcttcttgatcttttgggtaagatcagttgtaaacaatctgtatgttgtattatttttcaccaccactgcctccaactatgattttatttttcaaatctcccattttttaaatctcctaaggagacatctaatatttgataatcatttagtatgcaccagtgttagttccatactgattaccaaaatgttgaaatgttgaaatatttccaatgagttgggaagagactagtgcaactcctctaagacaaatggaccaacacgtgatgaagcagaaattccaatgcctggtactgcttaaggcctctgagatacttctgcaaccctgctggcctctgtcctgatcgatcagtgttcctgccgtactgattgttaagcattttgacacttttagctgtggacaattttagttcatattggggttaaaatttctatcttttttcctctctgcttggcagctcaggcctgacccatgacttgaaggacctggagtaagaaggggtatggcttctttcaagctcccttcctgcagctcttttggctttagctcctcaagggttatggctgggggagtgatgagatggtggacatggcacactcagcatacaattgcaacttccagtcatttgcccctgcctctctggctaacactaaccagctgctcttgcatggataacaccttcccttcatctagattaaatgattcacttcctcagagaggtcttttttctgaccactaagtctaaattaaccacccctcactgtcttgtcaaggttaattaattaattatgtagtacttaatactccttgatattcttgtttattaattaattaatttattatctaccaacatccctcacccccaccataaaatctaagttgttgagagcgtggaccttgtttgaatcgcttcctgtaggaactccagcacctgagacaggtatggcagagtgtgcccgatgagtatctgttgaaaggttctggaggtagttagtatcttattaaagaaagactatgctgttaactctaacaacaggccatcttttaagatatctttttggtcttggagcttgcacactacttgacttcttaaataggaagatagcttgttcatgtattggtagtgatggttgtgccaatcagagtaccacgttttactcttgataaagattatgttaccaagtgagcaggtaccaggcaaatggataggtttcctagaactggttactcttttaagtgtcattgctgtgcatagccttacattttctgaagatggggactgtcatgtgatgcagaccaaggactcttgaaaatgttgcatagatgacaagcctccaaaatctgtgtactttctatattttacctgtggctcaaggataacttgcacaggctagaactcagcaacatgtgtggtatgaggaatgttagagttggaaagaccccaggaacttatcctcactgatgtgcagattgaggcctagagagcagaagttgacttgactttgtcaaggccactagacagccactattaaactgctaatgtggtgatacatttttccttatgtgagaaccaattaggaaaatggaatcctggtttcaaaattcacatactttttataaaagcatttctttattatgttagtggattgcatggttttcagattgggagatgaggtaagaatctgttgcttcggaaatatttacgggaacagtaagggaaacaatctcataataatcacattagtcaaatggaatggtatatatatatcactatatatatactgtatatatatgtactatatatacagtatatatagtatcactatatatatactgttatatatatatcactatatatatatatagtgataacttctgtttctgtaggcatctgacaaattggcaaataactggaaatactacctttataatggttaccattatgttagaactgtactttaagcaagtatatagatgaaggatgtttattttaatattttggcttattcagtgatggtgatgaataatatggctgacattggcatgcttggttccacaaggaaactttctggtaataattttaacatttcatttaacagtacatctcaatgataaaagtaccataaaaatgaataaataagcatgtttagtgaacgctagaaagtataacctattatttttgaaatatattcagtgagtgaccttaacttttatttacactatattctatgggatattctattcagaagttcaagtttttttttttttttttggtcaagaccgtcagaaaataaattcatagctataaacttgaatggcttgcctaaaatattattaatttacctttttaaactttggtttgcaaagttcccaaatctgaaaacaaagggagctaaaaattataaaggggaactataataactacgtttataattaaagccaagttgttataagtgatacttttggtagcattcgctaattttgccttttacctcatgggaatgcattttaaatttagttttgttaattttatttgtcatcagatttctcgttagaattcatgtgccaccttcaagccactttttatcatcccctagtgactgagtaggctcctccctggacggttatttgccctgtttccacaccagactatctttgccaggctggcttcactaaatttgctctcttgctattccacttaattcctcttttattttcagactgtgattttttttttgtacttagctttttcccttttgtatttgttttgttttgttttatttttgagacatggtttcactgtcacccaggctggagtgcagtggtatgatcacagctcactgcagccttaacttccccaggctcaggtgatgttcccttttcagccttccaagtagctgggattacaggtgtgtgccaccactccctgctaatatttgtatttatttttagagatgggggtcttactatgttgcccaggctggtcttgaactcctaggctcaagtgatccttccacctcggcctcccaatgtgctgggattacagaggtgagccactgtgcccagccggctttttttctttagactagtagttgggttgtttcttagtccactgaggtatgtattgggttgttgctggggtttgtggggcagaggcaaagtagaggtctgattccttaaaggaaatcaacattctcaaacagaacaaggcattttaatggtaagtgcaaggatgtggatttacatttctactatatacactatgtgctgataaaccagcatgatctgccaggaaggacctgggagcagcaggatttagatgcattttagagggtagttggatgggtctaaagggctctgagtaagcttctagttttgcattgcttaataatgactctccaggagtgactcttaggtgccacatgtgtcctcaatgtttgcagatagtatgcagtgtataaactctccgtgaggtattaggaaaaacaccagggcttcactggctaagtagcttagctaaggtcccacagctggtagatgtttggaccttggtctgactccaagccaggactcagagccacgtgcctcttccttcataagttaaatggtctaatgttttattagaacattgttttcattcagcaaatatgtatgagcatctgctctttgctaagctttgccctaggtgccgcatatgcagagaagaagatgcagacctgcctttgagaaactcggtcagaggatggcagatccttccttttacttcatggtctattagttttgtgctcaaagtgctatgggaacacagtgctttatttcacttcaaaaatcctctattgatttactaagtggttggttttgtctggaagggaagttgaaggagaaaagttcccacagaggaggtgatgtgttttgaagcgggtctgagagggagaaaaagagggaaggatcctaggctgagggaacagcctgaagaaaagaatagaggcatgaagaggcatatatcatgggcgagagacaagaagcatcgagaatgttgagagtgaggagaggctagaaaaagtggaaagatgtcctagacctatgcattcaaaggccctgatgctgtgtgtacttcctgcagggttgacagttaacaaacagaacaaaaagaaaagtcttcatgtctaagattccatcaaaaccctttctattcagttcctttctcagcaggcaggcagtgacagatttctgctttggtgtgtgcagataactacttgttgctggaatgtttttcagtcatcaggcatgtttggaagttgtgaacaggttagaagggcaggctgcgcagcctcagttccactctcctgagctgagcctgtgtccacactactctatattgccttctttatgtaaacaaagagctattttcacacttcattcacaaaacggatggcgtgcagaatgaggctgggtgaaggatccgcaattgggataaaagggaggcagcttccaggacactgaattaaagtaatgaagctgttacatcacaggcaaagaaaacagttataacacttttaagatctcaagtttgtggaaaattaattgctatgaggttacacttcattgagtatctgcatcatttttccactgacattcattcgggtcccgtgtatataaatgctggaaagattttgtggtatttaaggatttgaaatgactgaattcttttggtggatgtactatcttgatgccatgccattttttgaagctctgctatttgcattctaggaaatccttgttcatgagtggatactattttaagcatttcaatgtttgcatgatagaaatatacttctgtgcttaaatatgcccagttggccgttgcacctgccctttgagtcactacagagatcagaaaccattaacaacagaagttgaatttacgtggtacttatctcctgttgtttctggcagttattttgctgcgtatttataaggacatctgtcttttaagtagtcataattatttatctttttttctgctggggaataaatcacagcttgtttcccataatgccatatatattcatagtctagggtgattagaaatgcaaattgagagtcattaaagctttataatttattttgctttggtagcagatgatatttaaaatcagtgtgctaagaagaaacatttgcttaaaatataagatgtgaacaaattagaagacagaagtattcatttctcctactggaaatttcttgctgggtctgggaaaagggggaaacctgcagtgttcgtttctaatttactgtactttaaacctgagatcttatgtcaggcagggtgcaaattgtaaagaacataggaaaaacacagtaatgattagtgttttcagattgctctatggaagcatgctaaagactctctcttactagagtgtgatttgcctttggattacccattaaaaggatggataaaatttagatgaatttcttatagtagttggtggttttgtgaatacactaaaaacaagggaaaaagttggataatgctggtatgaaaaatatagatctgtacatccatagcctgagatggggtgtcctagagacagatctctgctggaaatgcgttaattttgtagataataaaaggcatcaggggattctttgttttcaataggcagtgacatctctacaactatgcattttattattgactttacttttatttctaaacaaaagttcactatttctggagctataaatgaaaaagaacacacacatatatagatatacacacacacacgtgtgtgtgtatatatgtctgcatctaaagttataagaacactagtatgccatgaggtctagtctcttgtattgtagaggcaatacattttcatgtagagctccagaaataatgtacttttgtttagaaataaaagtaaagtcagtaacaaaatgcatagttgtagagatattccaaatttatagttttatatatatatatatatatataacagttatatatatatcaaatggcttcaactgtatctttgcattgtgttagtcactatggtcaaaactgtctatttcaaaagcagcaatctgaaaatagcaggcaatttcccaggtcacaatctggctaggctactgagagatgctgagtcgagatacctaattgataaatactaaccctttaaaaagtggtttttaatctgtgttttcttgagaatattagcagtcttgaggttttaagccatgataacgaagaaaaaattagtgattaagtcatctctattcttattttaaagaagtttttgcttcacggtgaaaaatttatctttaatctgtactgataactttgaataggcatcggttgggcaccccattaaactaacagctttaaaatggtttccttttagaactaacatttacatcctaggaaatcaattagggtgtctggattttacatttcccttgcaatctttgtttgcagtcatttctaagtggccaacctaccgtagcaaaaactcagaggtgcaaatcttctggaagaagtgtaaatgccacaagtttacttggaaaaatggaaaaataggacttatttaatgtatctgccgaacatttaaaactgcataaagcactggaaatacttttggtatgtaggaatgtgtggtgtttcaaaactacaaacattgttctgaaaatttccccggtagtggtgaattatatgagaccacgtccatctaaggaaggcttgtttaactagcctgtggttctggggctcattcaaacactcttaaacaaaataaagggaatggatgtaataacttctttatggaaaggccataaaaagctacagggccatgtaaacaaattgggtcatttactagatgtttaagtgatagatttgcagtccaaatttaggggtgtgtattatgttttataggatggtgaccatgttctaccttgagaatgaggttgcaagcttattttttgtttatttgtttgttttcgtttagtgcgtggaaatccattattgctattttgtattgcacttggaaagcatacctaaaattctgggcaattgcatttataaagcttttcaactttgaaaaatggctagaaactcaggtatgaagattgaattgatctgatttctggtatcattaggttcttttcaaggaaaataagatgattgaaatagaaattttccttctgggctcagacatgtctaaactaattgtaaaataattgttctggcttacaagagtagactcataactacaactatgtaaagtaaaaaatctaacaacagttaggatttatagttactgtcactctgccagtcttgtaataaaactgctattataaccaccctagtgtgagattcatttgtcttacttgagaagtgggcaataagtcctatccaagttatcttgcttttagcagagccactttattgcattaggatattaatttaccttctctgaaattgggtatgatgattgtgccaaaatggttcagtaaaggggagttgggtgggtggatgtataaaaatatgttgtgctgcgcattaatggtgatgactagtggcaatgggagctagaaataaacttggaaattgaagtaagcacaggaaacgaaataatttttatgttgataccataacatttattcattctgtaacttctgtcaaacatggttggctcatttggccttaaaggaagtgattgtgtaagaaatccttagtaaaaatcaatgagcctttctaagttttgaaaactgatggcatcataccacactggcaacttttaagtgttactgctggaagtttggcagcagaaataactgcttcagcttcacagtcttaaaaaacaacagacaatggtggatattatagtttctgtgtaatgtgtgacttgctagttcctttttttttttttaaatgagtaacttgatggccttaagtctgtgaataaacctaagacctgcatttaaactggattttctgtgatcttgaaaacaactcacacttctatgccttaggtacctgtctgaagctgaggcattgtggaaaatgcaaagagaaattaggcttagtctctgccttcaagtagtttatagccaaagggagagagaagacatgcagttaggtatattagagaataaaaagcgatagtatcatgtttggtgggaattcagagaaaggcaagattatttagttgagccattagaaaaggctgagaaaagttgttaggggagatatatattttttgaacaaaggggccaggaaagatgagcatcatttgcacgtgcagaatcaaaggtgggataggattttggcagctggaaacctggtgagtagatatgcgcagtaaggaagtgtgggaaattcatgcagtctaaaatgcagtttgttttgaggcagacctcagaagcaggttcagtgggaaggtcattggaaatgggaggcacaaagggaggaacattgatgtatgacttgggcttgagtaaatagaagagtgattcttcatgctttattgtgagctcctttatccacccgcccatcccagctatgcaggcagccaaattatgaattaaatctgattcctgatggcacatacaagacagaaacagaatgaaggttgctgaacagtgaagaataaagtcagaaggaaaaggaaatctcacaggaagaaatcccctgaagaggaagccatgaaggaaaaaaagtcagtgctatcacaaggtggggagtgaaggatgccaaggaaggagagagagaaaaatcacagaaattggcccagatgataaaatacagcagagactgaaaaaaatgaagaccaatgagtagcctatgatttttccaggttgacacaaagaaaaaatcttcagtgtaataagtggtgtagaagaatggacatggagtaaagtgaggaagtgagacatcacgtttttaagagagaaggagatagtggttccaggatggaaggaaacatgttttgtttctttgcttgttttggaggtttgggggagagccagaggagaggaaaagattaaatgtgtagcaagagataagccttctatttttagaaagttctcctaccgttgatattggaacacaggtgaaataactgtagagcattaagccgcataccaaataatcacaataagaactgagcttatttggtagggaagtaggtactaagttttggaggaagtgatccttgagataatttttgaccaagcgagggattcagcattcacagaacagcttctcgccatttttcttgaaaatctgtcttattgccactttgatgtcctggtacctatcttgtggaaacctcagttccattggaacatccaattaacgtgtatatttagaggacttactatgtctcataatctgggctgctcttagcactccaagtctgagaaagcaacttaaaactaatagattttgtcctgcttaaatattattccttcacaatatttcaaaatatataatatagtatgttaagtaagcatggaattattgtcaagctaataagtacatattaacattgctatttttaggtaaaataattatctttacatttttaaatttcctcattctcactgtcatcccaaaccaggtgctggttacctatgacctaaactgtggcaaagtgttcttattcttccttctatgactcaggcttttccaatgccgtgtcacccacaatcgatcatttgcaggaggttaatgtcagataatcttcttataatagagttctggttgtgtctactctagtcaagcttggattggtgcttcataaactgtaatatacatacaaatcaccttattaaaattcagattctattttagtaggtcttgagtgggacctaaaagtttgcattttaaccacctcacaggtgatgctaatgccatcggactgaggaccaaactttgagtaaggaaagtctacattgttgttctccatggctactgtgctgtcaccccagtcttctaatacaaaaattacacaaaactgacctctgctcaccccagagatctgtactttcctaactccatgtattgctctgccaactctttcaaacaataaattaatttaatccaatacacaaaagtgcgtgttgtggtgattactgtgtcacatcctgaaaacaggtaaacaaaatgtcctttgtgtgcttgatgttcataatcagtgttgtttgtattacactagacatatgcttagaatgcccaaggactcagggatgttctacttttgggtcaggaagggcttctcatggggttatcactgagtagggtcttgaaggacaaataattcaccggaaaaggaagagagagttctaagcagatggtgcggacttgtgagagagtacaaagcctattcaaaaatgaactacttttggtgagaagtaagattgaaaaattattcattaattttgagggctgtgtcagacatactaagagcatgtttagatgcaaactcatgagatgcttgggcaccactgaaggaccttggctgatgggtaatgattatagccttctgcgccaattcctaataataagggtgtgtctttttgtttatgcttgtattcttacacctataacagatcattaaatattcataaattaatcaggtttgatttttgttttttaaatgcattttacatttttcgtattattattttatcagcaaatagggtttttcccagctttgagtatagctgacaattaaaaactgaatgtttaccaaataaaatggaatgttttgatatatgtatacattgcaaaaggattaccacaatccagctaattaatttatccatcacctcacgtagttatctttttttttcgtggtgaaaacatttaagacctactctctaaacaagtttcaaatatataattgttttctttccaaaataaaggtacttcaggatgattgtaaaggacagagaagctagaggctgggacagcattttgaaggcatttgcagccgttcagatgccagacagtggaaaaatagccaagtgagttagtgcctggggtgtggaatggaagggaaccatcatctctccttcatgctgcgtgttcaaagccaacgtggatttaaggccctgtctgactggtcccctctccgccccataaagccttccctcttgccttcagtctaatatgtctctcttctctaaactctcagaatagtgcagaattgaccactttctaccttggattctaattatatatgtgttttaatctcccataattttcaagtgtcagagaataaaatgttgaataatctctagcctaatgccccactggatggcagatcttttaagtgaagtgaaaacagcccacttagacccaacacagcttgttctgctgcagtcttggcatctggtgtcataaatcatcattgatgggttctaaacgagtcatatgccttatttcacagctgggggatgcgcctaacgtctggcttcattttaaggaactacaaggggctaactggagagcctcaatctttttgcttagactgagtaaaatgaatgcacaaagaacatgattggcaaaattataatgatgactgcttagaatgttatttcctcaataagaaaaaaaaatgtatcatttccaggaaacttatttttaaacagggaactttaggataaagttttattgcaatcaatttattatagagaagagcatgaccatcgcaagttcattttcagtaactttgacgtattttttgttttgaattatttccccttttgctctttctagttaacataagatataactcatgtgctttcttatttttagtttgtttttctcttttgctttgaggttttgagattgacaactgtgatttatcccagagaaggcaaaaatcttgaaaaagtcagtcttttaaaaagtcactcaaagaatatagttttttttcccttggaaataaagttgattttctcagctctgatcctatgagattatgggcagaactaaatagtccttagttctggcatgtggacaaaacagaagcagaccctggagagagagttcaaaattcatgacagtaagcacatgttcggtatgccaatatttatggtgtcacaaccaaattgaaaccataaccctctgctatttacgtaagtatggtgcccagactgcacaaggttatgcctatgtttcccagtaaatttaaggcaatagaaatgttcagtacccctagagaccagactatttattttcatgttcattttgtttctctatatgaggcagagtgaattgtcttaatttatattcatatttgaagtcagccagaatgagaaggaatggcatttagtgaggatagagaatggttttgtgctttcatatgtaatgtatccaggccattgtgtcctggtattcttagtttctgagctggggtgagttgggggtattgattattgatagtgaacatagactgcttcttagatgggtaaagctcaatgttcgtatcttacgtcttatgctcttagagaacctgggtttcaccactttggtcaaaaacagacacacatactgttggtaagaagtcatgttttatgtctttttatagaaactttgaaagtattatcattctaaagtatttatcgtccggtaaaattttaagaacaatgaagtttcagaaccactattgagagtacatctttttttctctactttttcaagacaaagatatctagtaacttaaattatagtaacatcgtcatgcacttgtacagcaatataaatgagaaagataatagaaaaaccaaatagcatatcacatttgctgaatgtgaatacgttcttaatgaacctttttagaatctcagactccttctgatccctttaccattagttgactttagtctagaaaacaacttggacagtaaccagattgctaggtgtctttagtaagttggctgtttgatttggctctttgagaggtggtcctatatctctgtcaagggaaagtttttcaaaacaattggtgactggaaaatgaggaatgttttgtgcaagaagggaggctttctcgtttacaggataaaagacattttggaagagtaactcccaagtaagcaaatgaagcttgactatgtaaatccttttacttaagggatagaatccaagatatttaagaagtcattttatttcttgagttcagttatttaaacattgtgcttaggctttttgttggtactccaaacattttattaagatttcccttggtgttttcataaaaagacaaaattcattatgttttatttgtaaataattgtcttaaacctagatgaaagagaaaacaaacttttctgtatcatattctttcagactagttattcagtgttttttatgccccaaatttgaaaatgatcacaaatttttcactgatctgtttatgtctaattttggtgctggaaaaataaaaacagattacttagggtgtttaaatcctgtacagattagtaaacaataccaaggaaatttacttggtgttactagaaggttgaggaaggttactggcttttgcagtccattagtagatcaatttgttaaatgtttagtgctaggaatctcatttatcaggaaatatcttaggcattggggagaattggcctgtggtatttacattttagtctagttgccaaaattgattttcacgttttgtgtgtgacttagctctttgtactgcagtagataccaggttaaagcatagttcatatcttaaaacattaatagattttgtttcagtgctgccaataatttcagtgagtaacaaaaaaactccacactttcattaaaatgttcttaatgatttctgtttgattttctacgtagtgataaatgttgccatttaccccagcggtttaataacaacaaataagtattacattttgaagaaacttggcagtatcattgaatgccagtgtgtaatagctaatctataatttaggttaattccatcattagtttgtgacttgaaattctttgtttctgactgtttcatgacttctttaagcacaaagaggatattggtagaatcaggtatgtagcaaaaggtctagaaatacagttttgattatttgaaacactagtattttaaaatccagcagatgcattcctttgcctaaatatattgtgtcttatgctataaagaggacacattttgttttgttttagtgtacatattaaaacagtttatatcccaaataagctaatatgactaatggttgtcactgccctaattttggggaagaaagtttgaatcagaaaagtgttcttggaagaagaatactcttttttcctatctatttaggcattcactggaactttctttacttctaaaatttatgcttgaaatggctcagagtttgtgtatgtggagcatattggaggctgattgtatctgtgagtttaggaaagacttaacttgatcccttgtgcaatgaagtctttcaaagaaaacgagggttttttgtttttttttttttttctataaggtagagtggatattcaggctcagattttagctaaattaagaaggacctttctctgtccagaatagtatcacaaaattaagactggctctggaagagagacagaggatgccctcttttcattgtcatacaccatttgaattgtgtttgataaatttatattgtgaccttgaaaatgaaaccactcagaaatcctggttaatttctgccccatgcgtcagtctcaaaggggagacctgcctttgccaacagaccattcagtaagaaacaaaaatattaaaactccacaatcacaacttatatggtcaataatggtttcaaaaattaaaaaaattgatcctggcatatttacaagcaattatatataaatacaggaacatgtatattatgaattttctttaaactatttgcctgcattgattatagagagaatgaagcctcacaatgaaatctgattgaataaatttaaacactgttgtgatcacgagcgttgttttattaagtcactggaatgtaagatacatgaagcctgaaattttagttgttgttattggaggtttatttattttctcctactgctttatcttcaggatctagaaccttgcctggcaggcagtaggtactcttaacattatttgtttagtgaatgaagagaagggtgtaagaagcatctacctctggagataaaaatacagtgaggtgaaagagaagtatatattttcctttctccttgtttaggttataaactgtcatatccatagcgcctagatcagggcttggtagttactctgaaattgaaagattcaataagtgaatttttacatgaagaaaaatgtgaactgctgattttgtctgttatatcaattgtcattttacttttgctctttttgccaatttctagaatttttttcttatttatttcataaatttgtagtcatttagcaattcaacaattataaacatttggaagttctgtgtatttgtgggtataaatagattttttttctgatttaacactgctttcaaattgcttattgaactatagtggagaggaaaaaaaaagaacttttcttctacctcttaggtttagaagttaaactacaaattaaactgacaaaagacagagtaacaggagaaaaggcatattaattttattaatattttaaattttgtgtgcataagggcttcaaagtaaggatgtgaaaatcttaaaaagcagttagacttgggattttctataccgttttaatgaatggtgataaattgtggaggagtgactagacaatggaaaggggatttgagcttctagcgccaatgaagtttgggaaagtgaccaaaaaacatggggaaactaatattattatctaatcataacagataatgttattttagtaaggttattttagttaagtctgcatatacagtctcattccagcgccagctgtttgtctgtgctaagggtcactttcctcatcctggaatggagggaaagggggcatttatgtcatcttcaaaaaggaaaatttatgtactacttttcggcagataactggagaacggagaacttttcccaaatctgtttattcttacttgtcttcagctcaaaataatccttatgccagaaaggcatattttagggtgtcatactcgagaccccttcataatcattgattaaaacatatgactgtttctgatagcatatatagcctaggaaaaatgtcataggtagtgctggtggttgttggacatgctgttgcttatgtacctttgagtgaagctatttttatttcctgttatgcttactgcttgttttcctgaaggtaaagctgtaagttacaaatatatgtgacccaattcttaacagcttctgccaggactgaccctatatcatctcaggtatgtcctcaaggggacgtaggggaaggggaaacagttctgttttctcatttgtgcagtctttgatttccatagaaagtcaaaagtcattctagtaatacacacttaggaaatgtgaagtgctatgactcattttattttggctttgcacagtgtagaaaatttcttggctaggaagaaattccttttcaaactaccagtcctccccaaacaattctcctcccttctgaataggtagttctctctttgcacagacattcttctgggcttagctgctgtgtaacctcttaacccttcattaataatttcctgaggccagtttgttataaagaaatattgcagcacagacagtgtgtgagcaagagagagagagagaaagagcgagagagaaagagagagagacacacacacatactactttttaatgaccaactagaatggggttaatgctctgaaagaaataaaaaaaaaagtacacattagactttttccccattactttgcacgttaatcaaggagatcacccccttaggcagaaggtaataaatacttttcaacttctctctgttattcagaataaatggctcatttctatattatacacatatttaaatgctttgagtatttaaaagaataatcatgaatctttcaaagaattcttaatagtaggagaccgttggtgagtaaatttatctctttttggttcttaacaaaagagatagtctctcttttcttgaagaaatcaccaaggaactggatgttttcagagatggacatttgggcttccactctcctgcgctataatcctttctcacctttctcatatttcagcagcacaggacctcggtgaatttcacactggtcccttggctagccagtagagcaataaacctcccatgagaaatgctgtgaattacacagagctgtcattactcaggggatacggggcaatgatcaaaatgctgcctccacagagaaatgctcacactctaatgttaagtgaaaaagcagggtgagaataagattttaaatatttttatgtatgcccccataaatatttctatgtatgtagaggaactagaatgaaatacactaaaatgttgtaagtatttcatctataaaggctgtagggcagcggtgggggtgttggtactttcctttctaaaatacatagtattttccaaatttcctatagtaagcttatattactactatattagaaacaatgctgtgctaattccttaaacctaatttaaacagagggttcagggaaggcaaatacaaatagcattttctcctattgtaacggaaagcaccttaatatgccaagactttttttagaagcctaggaggtggcattcttaaaggtggcccttcaggcttaagatttaaaattggctcttaattttatcccagagctcgatgtggatatagtcaaagcggccgcagcagtcggtgcaggagagccatcacaacaattatctatgttgtttttggcagtttataagaaatgttgttttcacaagacctaagagttttgtctgggaagaaagaagatagctgccaacatttggcaccatatggggttttcgtcttttccttttttttttttttttagctgtacatcccctcttgagccttgaagatcaagacaatattctgggaggttttttttttttttagtacacttgttggaaacatctggaaaatgccattaggttgcacaccatggacttcatttatagacaagtgtgtgagataaaaaacatggaaagaaaatccctgctttgcagctgcattctatggcacaccatccacagtgtgtgtgtagaccgtagagacttgctattcacacttattgagactagcagatcgagaaactgtaaattaatttccctttctaggcatagaatgtccgtcaaccataccagaacctgtctcttattgaagtcaggcagtttctgattttattgctactttgcttttaccctaaggctgcacattcacactctccacagtatatggacatcatagtcaatgtagaatattttgtcctaggaaatattatttagtttttggaagaaacactgcagattgtgcttatgacactaaactgaatcaaggattcagtttaaaggattgaggggaaaaggctgatagtgacaatctcgtttcttagacctctttttgctgttatacctcaactaaggcagttgttttgtgataccacctctcattaatttatctacacataaataaggaactaagcaacaaataaataaacaaggaaacaaaaccacacagttttatttcctgaatttcagtttttcttgttgtcctgtctttcattgtcatccttcattttgatgtttacttagtttaattccatgtttcaaatgaaaactactgtctgcagagtctagaacccctgaaagtgcattagctaggccatgtcaggggagaactttaaattaaaagagagttttgagtagaaaagtaaatgtggagtcttttgagtagggaaataagtgccaaagtaaccctctgtgtaacctgcagctagtccatccatagcagagggttacagaaccacagctgttcatacacacagatcctgaataagagatggctgggcagagggcttgtgtgcgttcctgcttttaccccttttagtcttttatcttgtttacttcttaggagctagaatcccagcagatgagagggcgatctctttggtccattctgctgacctcccttctttatgtcatttgaggtttgtaatgttgactcattaacactgctttactaggctagctgagcagagagattcccatttctgcttccagccttcttaacactgcaactgagatttctctgctcctgcttctttttccctgaagtaacattaaaaattatttcaagcattcctaagtaaactgggtgatgtcttcttactgcttttggtctggaaattttcaagggcaagaaagtcttaacacatatgaaaacatgaactgggagtgattgagatactgtgttgcctagccctctccttctggtctaagtgaggtcattttctaggaggtgaagtcattatcttagtcatgtatgttgttggcagcaagactagaacacaagtccaactctcagtcccgggctctgtctgtctcatcatgacgtgtctttctgttcctgtggtcttgatgataaatagataaactctggagaaaagacagtagctcttccttcggggacctaggcaaatttgagctcactattacctcagaaaaggggttgttgtttaaaatcctgtataatttctaatgccatgctcattaaataaaataataccaaggccatttttcatcacaaaggtggaaacctcactatagcatgcttgtttataatttttattgataaatgaaatcatcttggatgaaataatatatagtatacgttaaagtgggttggttgcttttcctaagttatactttttatatttctgtttaccatatgctgtgaaaccaaagctattatttttgcctcattctgataacatagtccatattctaggtggtagataaagaaatatttcagcatttaccttaaaattcttgtttttttaaagttgtttcctctctatcttctctgccagatgtgagtaatactaacaactagtactttctgtaggattcacagttctgtctgcatattccataggctgtttttaataggcaggacataacctactttcattcagtttttcataaatataacaaatgttacatagtttacaagaagaaatatcaaggctaaagcctcttgttggcatgataactattgccaaatcaaatatgggaagaggatagaatatgaattctaatttcttagttccagtagttgatttggatcagacgcgatcagctcctggcagcaaagggctgaaatccttctgataatgagcctggtgatttaggagtcagattgggcccatgagtgaatattataatagagggagagagtggtacaatgttggatgtttttcagagagaattgaaactaaactgctgagtctctttggtcattaaaattcccaaggtgctttttgcaagattatgagtttttagccagcatcctgaccaaatgagtaattgctctgccaatcgctcctgcaatttcatttgtacaaggtcattgcatccacttcctgagctaaactgtcacattaagggagagtagcctctttgagagagagtgatctctttaattcacaaattcatttgcccccctgctttgggaaaagagacagtagttgcttagcatctataaataggagctatattttttctgtttttccttttttcttataaatctttggtttttggtttagacttctgtctagaagaaagcatattactgttgtgaattttccctactgattatatatatatatatatatatatatatatatatatatatatatatatatgtatgtatatgtatatatacacatatatataatttaaaatattaagagatgtctataaaatctgtttattattcatttaacaactatttagttagcatttatgacatatgcagcaagatactagtcacagattaaaaagcaatgagcagaatgtacaaaacttgtggtctcctggagtttacatttctattgaggggagaaaaaaggacaaataacatataaataagtaaactattggtatgatagaaaatggtcagtgctgtgttttgggggttagagagtgtggggatagggcacattgttgcagttcgaaataagtcaccgagggctgactgagaaggtgactttgagcacagatcttgcagagatggcagagaaggccttcacagacagggccaaggggagaggcaaatgccctgggtcagaatgtgcctagcaagattgaggatcagcaagggggattgtgttctggagggggtcatgtagatgagtgatgaattttatatagagatgattatttctgccgagtgagaatacactgtaggggagcaagggagcaaatgccgtgatagtgacttaggccagagcaaagtaggtaagtggtcaggttttggatttattctgaaatgagagctgttggtatttgctggcggactggaaattgggagttgagatggattgtcaggcgccagcctgaaggtgccacctgtgggacttggcaggcatttttgtcttcacatgcagtttttgtcttgaaaatcttcaagctacttgttaattgccctagcgtgctaacagtggacacatgaattgattgtgatggtgaaagtatgtaagagacacacattggtgatggattttatttttcatttttaatcatgataagaagtcagtgcatgtgagtagatcaatagaagagaaagaagcaaacattgcattgatttggaagcatataaataatgcctagtggaagacaggccctttttttatttacagaggaagatgtgccagaataaagaattccatttagtgataaatatagctaagacatactcagtgtttaccatctactagacatgcatgtaagctcttaacacatattgatacctttaatgatcacagaagacatttgagtgaaattactagcattaatcccaatctaagaagaatttaagccacaagccaaggtcatgtggttttcagcaagggcagtctggctccatggcacatgcctttaatcgttacagtgcctctaatagccactttaatttgttagaactaaagctctaatttggctaggtgctaagcagacttgctcaatttacagtttcatttcttaaatgtagacaagtcaacgagagttcttaaataccttggagtttattcttactaacacaacatatttgttttaagggaaagcctggacgtttgggatgaggaaaatccacagtggaagaaaaggcagagtgtgaaaatatggcttagtgaaattaggtttaaattctggtttattcactttttagttacatgatcttgacttcaccacttaacccttctgagcacttaattctctaatttgtaaaatgttaacattaagaactagttcacagggacttctggcaacatgcttggtctgcttaatagattttagtttctctgcccatcttcttggctagatagactgaaaatgaatgtaggggtttctgaaaacaaattgggtcgagtgaaaaaaaaaggtttgatgcagggaggccaataaaacactccaatgtagctccacaggagaacatttaaagcaagaggttttgtgcacttatagtggtgcttgtcagagttgaaagtgcatttgaatcctcccggatcttgttaaaatgcagattctacatcagtaggcttgcgggtggggcctgagattctgcatttctaataatttgatgtgatgctgatcctgctggcctgtgcaccacacttttactagcaaggacatatgaaaatagatttatgaagaagtaccatgggaatttagagcgaataatatcaaggttgataccagtaaaacagtttaacagagcttctcagagatgaaatgagctacatcataggtattaattccctgcctaaggctgtatttgcgtcatttctgatctgtgctgttgatatattgatacaccggggggttgagccagacttgaattttctgttactcattggtaggggttacccttaaatagaagtgagtagagcatttaagcattattagttacataggttcctgggctatagggcaccaagcacagattttttcgagggaattcactcactgaaaagataatcagattaaatgactactaatgctcattttaaccttgggataggacgttaagtcacacatactctagccgagagggataatctgagatctgtatggtatctgtctaacacatattactaagcagaaatctcagaattccttaaaggttttaagaggaaattattcattgtattcataatcattcatatccatttgattgctctctaatcacaatattgcaattatacataattatatattgtaattatacatgttgttacaatataattataattatacatatataattacaatataataatattataattatataatatacatgtatattatatacatctattcctttagtgtattggtagcagtattttttttgtctgttttaggtcttggtgatttgtgctcttactgtttctcagaatttttcaaaatttagcctgtaagttactaagaaatgtaaatggatagggcatggttattgacacaaatacattcttcttttcccctcaattttcatacagctgtagtgttactagaaaaaagtatctatttatgggaagtgtttttctcttctcctgtggaatcttaaaggcttattttcaagtatttctagagctgccacctgttaaattatagtgattctatgctttgtagatattttttaatcatgaaagaagataagctagaaaaataaagtacattcgatgttggaaaaatgttacaggctttttgaatcctgtttgcgttgagctcttggaccctcctcccctggccagccttctggagcgcctgtgagcacaaaggaatggcatgtatttatacttgtgtaaatacgatcctgtatgctctccactgagaacatgcaggcggcccttttatggtcaacaaggggttttccctctcgtctttaggcagaccacagggctacgtgctcaagagtgtatttttgatgccatccatcagaatgctttcataatctgcctcccttttataaaatcttggaaatgactttgttatacttgcctttattcactaatagatcatccaggaacttatgaagactttcatgtaaaacgtcaaagttcttttattttattttttttctaagccacctctgttcctgttcaatttttactttattaacaggctcttcttgcaaaatagaccatatcaccttattattttgatcacatatctcaggactctcagaattgttggtattccttcaacgaatatatggtatcttattttatcatgtaagtaacttcaaattttgtctttgatgaagtctcacgtattcatataccaaaaagaaatcgttaaccggcccaaaagttgaaagaaggatcatgagtgggtagtgtttggaaacagcattgagcaaacacattatttggtattttcttttgccttggcatttaaaaaatagcaaataataataacattgattacaataacattattttaaaactgatgcattctagaaaatgataaagctaatgataaaccaccttgtttctctcagcacagtattcctgtgaaagctgtttggatgtccagctctaaaacaaatgttctgtctaaaattacagaataaagtttgtggagaggcaataacctttcatggttgttgaccgtcatcccgtgcagtttctcatttgtaagaggatatttcattttcaatcattttctataaattgcttaattgcatgggaaaaaatgttaaatagcattacttttaaactgtatacgttattgaagaaccccttcattatgtttcacttacctcacagatctctatctatcccttcagatttcagctcagtgatcactgcgtcagtatggtcttcattattaattcacaatttagtttacaaatacttattgaacactaactatgtgctaagccattggtcttttgggtcttaagagtctcttacacctgtgaagactgttgaagatgccaaagagcttttgtttgcatacattatatctattgatagttaccacattgacgttagagccaagaaagttcaaacatatttatttgttattcatttagaaatggcaaggataaacacattaacatatttatgaaaaaatattttccaaagtaaaaacaattagtgaggagtgtggtattattttatagttttgaaatttgcttatgtctggcttacttgaagacaactgaattgtcatatctgtctctgcattcagtgatatcacacagtaggtagccccagacaaacttgactgtacacttataagaaaatgggagtgaaaaaggcaaaaaaacacctcttattattattctgaaaatactttagatgttacagacccacaaaaggatattctggacagacacccagaaattcccagaccacactttgagaaccttagacattgggtatcgatcagtgcacaaaaaggcacagatctcttcctttgagggcctctgtttattctaagagtaccaggcaatttccctttttaatagtttaattttcccatggcaaggtagtctccagaaatgtcagggacttgtttttgaatttcacgcattgttttacttttctgatctccattattaaacatttattgagtaaatagataaaatcaattgtccagagtgttgaatatatatttcataacctatatttagggcatttactttactatttaataatatagacaagattccaaaattttagaaaagactggcttaactctctggattaagtactgtaatttttgaactttttcaggatacttggaaatatttaagtacccaggaaggaaaggctgatcttgaaattggaaaacaattgatttgatgtaataactaggtagatttcaatatggttctttgacttcaaaccagtagtttgattctttaaatatgtatttttagtaattcacattgttgagcaattaaacgctttcatatgtgactaatctacttgaattattgttgattgcttcagatattctgaggaaatgagaaaatcagctttttcctttgcatgtcattctatgtagggaacagtgcttctagaaactagtgttgcagagcaactgcaattgtttaccaatttcagtaacttcctttacagtaagcttctgttaactttatatactgtaatcccaagtagttatatttccatttttatgttgcattctgtcaacgtgaggctggtagcagttttagaagttttgtattatctgggtaatatttaaggcataaggcttgtagaggaatgatcagagttagaaatcaattaacacttcttagaagggggtgttcatttaatttctgctgaggacacattgatgtcaacttgattttgaaaggcattttatgtaacaagccacaatttaaatataaaacgataaaacattttgtgcatatatttcatttggctaataatacaagtctgatgtgaattccacattgtcatttaagtgaaaaatgtgttttcttacatataagatttgtatagactcatctcttcaagcccacttttatgagcctaattttgttttttaggtttatgtgagaaaatccagtaactgagaataaggccttgctgactataggattttatttcatgtaaggttgaaattgcctgttatttcttgtttctatatctgactcatcgagttatttttctagtgaattcacattgttcatgatgtcagtattgcaagtttatgcacatattattgtataatacaatgtaagataatcagaaaaagatataactttaaagcggtgatctagtaactacagtagagctttagggtagagcttggcataccattaagcctaaaaaacgatatgtaaattaaatagccaaagttctttagttaattaataatagaggcccagcctttattcatcttaaggctgagagagaagccattatattgtttggatgcattcatggacaatactgaatcacaaattgcagacccaaggagggctgtattctgtactggttttgacctcttgttaataggaattatgatatttgatgggattgtggtttttactccaagtgaatttggttttaaaatttaaaattactatacctattttaatacttagattatttttctaaggattgaacaatataaaataaattgtatttatattaataatagtttacttatattatttataatgttgttgtgctattatattagtatgttcattaaagtattaaatatacagatcatagataacttttagatttttccttttgaataaagtgcctaaaattcacttgcaaataaccacttttaatattttcttacacagctttttataactttttacatatgaatacttactcatatctttattttttacaaacatgaaattttatatgtatgttattaaacatgctttttaaaatctgagttttgtcagttttttaaatataaatattgacttgttattgccatggttcttacactgttttagatcatttgatattataaagaaatctatggaatatttccttccctcaaaaaatgtatctgcaagaaaatgtataaagttttatgggtcccaggaccatgaatctctgatcaagagccattggtcatgtcatcagttcttaactgcttcatggattctaacttaagtttacacagcttaagttttatttaatcagcacgttatgattggattctaggatttttttatttagcgcttaggatctgctctacagtgaataccttggtatctacataccttttacatatctctatatttctttcattagagtgacttcctagaacttgaatgattggatcaaaattttaccttttttcctagtatgttatgtatgtgtgtgtgtgtgtattttcatataacaaactaacttaaaattgtaaaaatttgtcctttcgtaagaaatctgtatgtaaaagtactgtttcacctcatttggcataattctcccaatctttgccaacctgatactacacaaatttaatatattaatttagtaggttgtaaatgtatcaatattaagcacattattaaaattgagaagaatttttagtccctggttttgtttctctgtaatttcttcattattctctaaagaactttatcttaaggtaatttttttttccaccatgaatcaagttgctactgaaatacatttgcctttcaaccaatattagggttgtattgtattgtgtaaacacaggaaatagtttagagatttcaggcactttagaaaatatgtttccaccatgttcagataggtgaatatgcctttcttatttatttatttagaaaagttttgttttgttgcccaggttaggttgcagtagcacgatcacagctcactgcagcgccaacctcctggggctcatgtgatcctcccacctcaagcctcctgagtagctgggactaaaaactgccaccatgcccagatgaattttttgtattctttgtagagatggggtttcactattttgcccaggctggtcttgaactcctgggctcaagccatttgccttcctcagcctcccaaattgctggggttaccagtgagccaccgtgcctgaccacctttcttatttttaattattcaagtaatttctttgaatcttcacttagggtttcattgtggtggtctccagaagaaatacctcatattgggtttgcggtggaaagataacaagattttttccagctttagacataattttatgcgttcaaattattgagaaacaagaatcaatgctttaaatgatgatgtttccaagattgcatccttgatccattctcttagtatatccttttcttcagaaatgccttctatcactatggcttcaataaccatgtatttattgataatttcaaatctcttttttcagcacacaccttgcttttttcactcagactcatctgtccatatgcgtgcagtgctgtctacgtggatgttcccttagtgcttcaagtttgacatgttcaaaactgatcttatttctcagctcttaaatttggttctggtcatgaattccattgcatagagcataatatttttcatcaaattgttcacatcagaaacctgagtccctcttcttcgttcctattttcaaatgttttccaagatctgtttttgctgcttcgttgacataccttaggcattcctttcagtcccctctgctgcttagttcaaggcaatacgatagtattcctgattactgcagtaatctctaatttgtcattcttcttccattcgtctactccatcccatccatcaacaatggtgtccgacatgtcagtcttttaaaatttcttcacagctctgctttgcgtttggataaattcaagttcctttgcaagacttttcaaatatttcctctttttccaattgccttttcctgattcttctctagtgtttcttctatcctacactcttcatctacctcatgatctaaatacatggagaagaacagaaagctgagtgctgggattggtaggttccagagaaagggtaaaaaactgttgttgttgtattttttaagacaaagtaatcatttattaaaccaactaattgtattagttcttccctctcctttggttaggaatgagttgagaggtggaggccaagggggagagagacctgaaatgtggtagaaattctcctctgagagtttccatttctcccaattttgatccattcttgagatgcagtcaaggtttgaagtttgaatactctctaggggaacaaggtcctcctcatagtacctgaagaaagatactttttgaaactcattctattacgacgttgggtggatactgatttcactaaaagacagatccaactgtgatgggaagtcacagagctagcaagtagcaaggtgtttttagtattttctgacaccaaccaaagagagtgcttatttatattttaatattaatctccaatgaccataacaggaagaggaaagatactgatttgtaattacaacttcacatgtattttcgttctagcaattgtcaggttttttcctcccctgtctatgacccctaaatagtcagtatatagattttataaaatgtgtacttgacattttaatttccttgagggcagggaccttgtataattttgtattcatgttgtttaacacaagatctagcatatacagtgtagtctcatttttcatggtattgatggtctgtaaagccattgcaaacactaaattaatgaataatgaactgttgctgctatggctcttacaagattaggttcctgcgagttcctggtcacaacatattcgtcagctgatcaatacaaaccttattttatgtgtgtttctgtataaagacatcttatttaatatatagtcatgtgctgcataaccatgttttggtcaatgatggaccacatatatgacagtggtctcatcagattttaatggagctgaaaaattcctatcccttagtgaggttgtagctgttgtaatgttgtagtgcagtgtattactcacatgtttgtggtgatgctggtggaaacaaacctcctgcactgccagccctgtaaaagtgtaggacataacattatgtatagtgcataatacttgataaagataatgaatgactgtgttactgatttttgtatttgctatactatttattattttagagtatattcctattactcatatttaaaaagttaactgtaagtcagacatggtggctcacgcctgtaatggcagcacttagggaggccaaggcgggcaggtcatgaggtcaagagatcgagaccatcctggccaacatggtgaaaccccgtctgtatgaaaaatacaaaaattagttgggcgtggtggtgcacgcctgtagtcccagccactcgggaggctgaggaaggagagaatcgcttgaacccaggaagcagaggttgcagtgagccgagatcatgccactgcactccatcctggggacagagcgagactccatctgaaaaacaaacaaacaaaacaaaacaaaaaaacgttaactgtaagaaagcctcaggtatgtttttaggacagattccagaagaaggcattattatcataggagatgacatgtccatgcctattattgcccctgaaaaccttccagtgggataaaatatagaggtggaagacagtgatattgatggtcctgatcctgtgaaggccttggctaatgggtgtgtttgtctcttctgtttttcattaacaaagtttaaaggtaaaacaaaataaaaaaaatttaaaattagaaacaagcacatagaatatggatataaagaaagaaaatacttttgtgtagttgtgcaatgtgtattttaaactaaatgttattgcaaaagagtcaagttaaaaaatttaaaaagtttataaagtaaaaagttacagtaagctaaggctagtatattatgtaagaaagtaaaatatttaacaaatatatttagtgtagcataagcatttagcctttataaattctacaaaagtgtacagtaatgtgctaggcctgaaaatcactcaccactcactcactgactcactgagagcaactaccggtcctgtaaactctgttcatggtaggaactctatacaggtgtaccattttaaatcttttatattgtatttttgctgtaccttttctatgtttagatatataatacttaccgttgtattacaattgtctacagttttcagtacaataacatgcttgacaggtttgtagtctgggagcagtaggctgtactacgtagcctacgtgtgcaataggccataccatttaggtttgtttaagcatgctctatgatgttagcacaatgacaaaatcgcctaaagacacatttctcagaatatatcccagttgttaagtgactcatgactgtatattggtgattcattaacattaagcacaaggcactataattcatgcctgaaggaagcttatctaacacacatattttctctgtaaagtcatgtgttagttcattttcacactgctgttaatataaagaactacctgagactgggtaatttataaaggagggagatttaattgactcacagttccacatggctggggaggccttgggaaacttacaattgtggcagaaaacaaaaggtgaaaggtgaagaggaagcaaggcacgtcttacatggtggtaggagagagagaggcggggaaagtgctacacttttaaaccatcaggtcttgggagaactcattctctatcacaagaacaacatgagggaaaatgctcttatgatccagtcacctcccactaggtccctcccttgatatgtggggattacaatttgagataagatttgggtggggacacagagccaaaccatatcaaggcacatcatagccttgtgtcaaggaacactagacagcacttcagcactatgctttgggaaattttaaacagcaaaattaccaaataatagcaaaaaattgagaacaacctagcactaaatatgctgcagaaaggatgcttgtttacagtttgggagttggaacaagaaggcagagcatatctttgctccacctcagctgtgaacagcatcatcttgggtgacttaaagttttgtgttgctctgtgtctgtgcatgtctgccaacgaccacaaaagatgccgtgtattgattttggggttgcaaattaattgtagccagtaggtgaattcaccaatatggaatctacaaatagtaaggatctactgtagttaagtttggatatcttattaaatatataagcagcatttcatttcactttatgacaagaacatacagctaatagctagtgatatctactgtgggactgcatttcattagatttccttcatttaggtctttaaagaaccctatgaattagctgactttcttgtacaggtgaggcaaccccgattcagagaaggcatgggatttgcccaaggtctggcaggtagggagcggcagagactaggttctcaacagacaagcctgcctctaccatgtgatgatgattaactttcatcccatacttttgtttacttcactctttgtgtgtgtgtgtttgtgtgtgtgtgttagaaacttctttttttttttaattataccttaagttttagggtacatgtgcacaacgtgcaggttagttacatatgtatacatgtgccatgttggtgtgctgcacccattaactcgtcatttatcattagatatatctcctaatgctatccctcccccctccccccaccccacaacaggccccggtgtgtgatgttccccttcctgtgtccgtgtgttctcattgttcaattcccacctgtgagtgagaacatgctgtgtttggttttttgtccttgagatagtttgctgagaatgatggtttccagcttcatccatgtccctacaaaggacatgaactcatcattttttatggctgcatagtattccatggtatatatgtgccacattttcttaatccagtctatcattgttgtacatttgggttggttccaagtctttgctattgtgaatagtgccacaataaacacatgtgtgcatgtgtctttatagcagcatgatttataatcctttgggtatatacccagtaatgggatggctgggtcaaatggtatttctagttctccatgctcacgggtaggaagaatcaatatcgtgaaaatggccttacttcactctttgaacacaaacagagtgtgttgttcctgagtttatacttcctttaactacataaagtgaatattatgcttgctttgattgctgaaaggtaaactcaagtgtattcacttagaaaattaaaaaaaaatcccttaaaagtgtaaattgtaggaaatgtgaaggtgaattagactcctgatcaaaacagagcacattaaatgttcttaataatagattaaattagcattacattagtaagtaaatatccatctcttacctcttttgtttatatattttctaaaactttgagctatttttacctcaaatcatatactataaatgtcagggttagtattgcagatgctctttaaatgttgctgtaatatatttcttatgagtaatgtatagaacaattttcaaaagaaagaagtctttaaaataaaaaagataaaagtacattccactacctaagttttctgttcaacacatgtagtttaacaaaaaaaaaactcctataaatgtagtgtttaaaatccatgcaaagatatgttccactgtaagtataaaccataattctgaataaatatctccacttcagtttaagaggatagttaacatagcaaatgtctgggtggtccaaagtttcatgaagcttgaacattctagggagtaggggccagtaaacttagtttctaatattaacagccttgcatttgtctattgtcttggccttagttgtcccagctctaataaacagttaaggtgtgatgctcttgaagattactgtgggttgtttttcttggatagttatgaaagagaatcactgttgactcacctcccccacaggccagctctgtgattgtcaagtgttccaaagcacatgcaataaccgaagacgtgaatgcaatcctgggtgacttaagccttcatggatctttgactataatttaagtttccttcccagtagaaatataatactctttgtcctgtagcttggaggcactcttaacaatctttttattgtcactgttatcttttcagaaactctacattagccttcggaaggtaagccaaaaaagttttaataacaggaaatacctgccattttacccctaatacaaaagaattcatgtttatcagtttcaagttctggaaggtcaggattctgaggctgtcacgccttttgctttcacaattttttgtcagttttgtctattcagaatgattttactgcattccacacttggctggctaccctccatcccctcagcccctacctccaacaataggtagcaggaaaaagaagttaaaatacagttatgggattactgggcagggaaattaaaaccaataataagatgataagggaaagcaggtgaggctgaattttatgtataaacctagatttatacattttaaacctaaattcttttatttttatttttatttatttttttgagacagagtttcactcacccaggctggagtgcaatggcatgatcttggctcactgcaacctccggccttcctggttcaagcgaccctcctgcctcagcctcccgagtagctgggattacaggcgtgcaccaccactcccagctaatttttgtttttttagtagagacagggtttcaccatattggccaggctggtcttgaactcctgacttcaggttatctgcccacctcggcctcccaaagtgccgggattacaggcgtgagacgctgcgcccggcctaaacctagattcttaataattgtcttgagtataaggagtcttaactttataatgggatttcatttctgttttcaattacatagttgttgtggagatgccttatttaataaaatgtcttttaaggtagtgtaaacaattcattctccacattggtccccgccaaaaaatgtgatattaggatttgctagcctacagatcctacagattgattaagctcaaaaatcttattgcagtctttggatatcctttcagttcctcagatttgatgatgtttgcctgattttgcacatgctcttcccactgcctgaaattatttttacacaggtctgcctggaaaaatcatatagcaataacgacaaactatataggattttgtgaattaaatctacttttgaacaaaaatctcttaaatgcagatttcttaaaatctgcttacaatgtaggcgagttacccagtattcacacaatggcatataagggagatgaaaattaaagtatgcttttaagaagttagaaacatgtaagtctaatgacaaatcaatccagttagtcaaccagttcatttagcttaaatccagaattgaatggcaacccatttggtgttgtaacatctggcatatcaccatgtgtgacccaaagatttttttttttaacatttctacttgtgtgggcctttgagcagggctgcacacttctcaggacactacaagttctggcctgtcaacacaggcatcttgaaaggaccatttgaaagtaggagaggtaacttgtgaaatcaaatatttaagaatgttatcaactatttctaatatccataagtcactaaaggataaatagccagagaatattttccattctactctgcataaagattgagtgctagctccctcttttcttattagctgacctgagttaacccttactgaacagtaaatcattcactgaaggaagaagaggggaagaggaaagattttgtctctttggataactcttttgtgttttggtatattccggaaggctgtaagaagagagatttcatgtgcagattccatggagcaaaatgagttttgtttttttaaacggagagtagttctgttttttttattggcctttttttttttttgctacgaatgctgattttatgaactatgaaaatggtcattataagatatgccacttttctcccttttatttcctttctcttttcttcccaactaatatctcacatagataggttgggatatagaatgcatttttgttctgtaatttctaaggtttgaacagatactgataaaatttctttacaaatatgtagatacttgagtatttgattaagacttttattattgttgagtcatttcccaaaaagttgactgatttgtatattgtatctttttgctggttgccattttgcacaatttttcttttaaaactatttccaaattgaggtctcagtctatttcagagtatttaaatagcaagggtgttactgcttctttgactattgctcgcagctgaccctcctacattgccccttatagattcatgtatagagattgtttctaagtattccttctatttggaagagttcatgcatactctttatcatttctttgaccgttgtgttttattattttgcttagctcccatgtaagtacaatcgtgtattgttaacagacagttctcttaagaaccaacatcatagagataaacagtccttcagtaactataaactttattcttaggataaccaatatgagaaaaagtggaatctcttgtaagcaatgttttccaaaagtctattatggctaaattctgttcttcaggagttgtatactaaacagtctttaacaccataaaaggatatttctcatagtctcttaaaaatggtaaaaagaaactgaagcaatggatttaaattcagggatttctggagacaagtatagagcgtggattggggtgcaatatctctttgcaatctatgcatcttccagtctcctccatttgccattcaggcctcagccattcttcctagcagcaagtacccgggtattttactgttcagccagctgttctgagcctgtgtttcacctgtgccttacccagccaggtctttttcatttcttttatcctgatgcagtagctagtaatcccacggttacagatctaagtgcaatgcgtgaattttcaatctttaaagttaaaatcaggtagagctgcagttccagctacttgcaaggctggggtgggaggatctcttgagcccaggagttcaagaccatcctgggcaacatagcaagacccatctcttaaaaaaatcacatagacggatagataaatgggtgctattaaatgacctactgacatggtttagctctgtgtccccacccaaatctcatcttgaattgtgctcccataattcctacgtgttgtgggagggacctggtgggaaataatttaaatcatgggggcggtttcccccatactgttctcatggtagtgaataagtctcatgaaatctgatggttttatcggggtttccgcttttgtatcttcctaatttttctcttgccaccaccatgtaaggattgcctttcacttcccaccatgattctgaggcctcctcagccatgtggaactgtaagtctgattaaacctctttttcttcccagtcttgagtatgtctttatcagcagcatgaaaatggactaatatagtaaattggtaccagtagagtggggcactgctgaaaagatacccaaaaatgtggaagcgactttggaactgggtaacaggcagagattggaacagtttggagggctcagaagaaggtaggaaaatatggcaaagtttgggactccctagagactcattgaatggtttggccaaaatgctgatagtgatatggacaatgaaatccaggctgaggtggtctcagatggagatgaggaacttgttgggaactggagcaaaggtgactcttgttatgttttggcagagactgaagcattttgcccctgccttagagattcgtgcaactttgaacttgagagagatgattcagggtatcttgtggaagaaatttctaagcagcaaagcattcaagaggtgacctggctgctgttaaaagcattcaattttaaaaggaaaacagagcattaaagttgtgaaaatttgcagccagacaatgcaatagaaaagaaaaacccatttttgaggaggaattcaagctgactacagaaatttgcataagtaacaagcagcccgatgttaaccttaagacaatgggaaaaatgtctccagggcatgtcataggtcttcatggcagcccctcccatcacagacctggaaacctaggaggaaaaaatggtttcctgggccaggcccagcgtctctctgctgtgtgcagcctagggacttggtgccctgctctccagccactcgggccactgctaaaaggggccaaggttcagcttgtcccatggtttcagaaggtgcagtccctaaaccttgcagcttccacatggttttgtgcctgcatgtgtgcagaagccaaaaattgaggtttgggaacctccacctagatttcagaagatgtatggaaacacctggatatccaggcagaagtttgctgcaggggtggggctgtcatggagaacctctgctagggcagtgtggaagagaaatgtggggtcagagcccccacacagagtccctactgggacaccacctagtggagctgtgagaagagggccactgtcctccagaccctggaatgctagatcctctgacagcttgtaccgggtgcctggaaaaccacagacactcaacgccagcccacaaagtcagccaggagggaggctgtaccctgtaaaacacagaggcggagctgcgcaagaccagggaaacctacctcttgaatcagtgtgacctggatgtgagacatggagtcaaaggagatcattttggagctttaaaatttgactgcccagtgaattttggacatgcatggggctggtcgcccctttgttttggccaattacccccatttgggattttgttccaaatgttgctggaatgcaacatttgggcatgaaaataggagtgcctgtcctcacataagtctgagggaagaagtccgagggaagaggctagagagtggagcccttgccagggaccctgcctttatctacccagtacttccctcctcccctcctgtatcatttttatggttttgtcacatgaaaataatctcttttttcctgagttttcttggttctatcatggtcagtctttaacctttaagggtcattaagatcctaagcacttaggaatgataattcatttatcccacagtttccagtgtaatgcagtaaattgatttgatattaaataagcattcattgaatgaacaaaagaatgaattagctgtagtagtgattactgtcagacaagaaaagattattgacattagtcaatagtgtagtgtagtggatccctgtctttctgtcttttttttttttttttttttttttgagacagatcttactttcacccaggctggagtgcagtggtgtgatcatggctctctgctgccttgaccttcccaggctcaggtgatcctctcacctcaacctactgagtagctgggattacaggcatgtgctaccacatctggctaatttttatatttttttgtagagacggggtttcaccctgttgcccaggctggtctcaaactactgggctcaggcagtctacccgcctcgacctcccaaagcgttggagttacaggcatgagccctcatgcccatcccccgtctctctcttttttttttttttagaataatactgcctctaggacactacagccaatctcttgccttcaaatactgtatgtatgtagatgatctccatgtatctatatctagagttctgatgtttctctctaattccaaacctgtataattatctatctgcagagatctcataggcatcttaatttcaacatgaccaaaacaaactcttcattttctttcctcaaatgtgcttttcccctattcttctgccttcttaaaggtacccgccagtaccatgtgcagagttgctaatgaagaaagtctcagtggttctgtatctgccctgattgcatcccagttcatcaacaagccagtgaacttccttcatattgactaccaccaccactactacaccacagtagcatcttgagcatcctgaattgtttgcttccactcatgattgccattattcactttgaccagagagtctttaaaaaaatgcacataagagcctgtccagcctttcttaccctggtttctgaagcctttggtgatctggcctttacctgctttactgacaagattatatactagtttttgcctttgcccatacagttttggccaactgacatttccttcctgaaaacacatggagctccagcttgtctggcaagtttttcagtccatcctgttctcatgatttcctcagtctggaatcttttatctctgattattctttcaatttagattccagcataaagttctcctccttcctgaagcctcctgcaaggcccagccctatgtgctgccctgactctttcactgtgtgaggacagctgccagcacctgtatttctttgcctgcatcctgtctcttcctggcttgagcctcttttttgctgcccagcaaaaagagggcagcaaaaagattgcccagacttaactggggaatccttctccccttttagttctgaactagtgaccaatagtatttggtgtataactatcccaaagcttccccaccccttaggtgcatagctcagaaatgtgtcccagaatcttcccagtgggatttactgaagttgctcacaatggtggttgttcatgataagggacccttcactggttacttcatttcattgcccaatttttcctgaccgacatttcttccccctccctaataaactttttgcattttaatcttgttgcaagatctacttctgggggaataaaaattaagacaccttctgtgacccctaaaggagctaccttgtctttttcacatcacaccattttaattctctgcatggctcttaccaccaccattttccttgttactttaggtacaatttatttaaaaacatttttttccccactgaattttgagaactaggaaagcagggtatttttcttactttagtatgtccaataactaaaagagtgccttctatattacaggtgttcaagaaatgattgatgaataagtgggtaaatgattttacacagaataaaaggacctgatttcaagaatacaaattgtaggttgaaactattcggctgcccacgaataaacacttgactgtgtgctattgaaattttaacttttatatggagcgctttgcagagagcaaaaattgttagctattcgtttggccaacatattgagtggcttctctgtggattttaggctaggctgcttggctggtgtggcatattaagcagggctttaaatgaataaagaataatattttaactgatgtagcttgttagaagaggggccatttcttctcaggaatagacatcagcaattcccagtggcagtcttttttactatttccttccccaccacacacagctgtcttcccactggtggctctgttcccccaaaccccaatatccctgtttactgcttttctgtcttctttttcagcactatgagctgcataagtgcaagaatggattttttttttccatctctttgtccccagttcgttacatgtattagtaaatgatgaatagatattttctcactgatatgatcttttgtctcttggtgtgtgagtttacctgttgcatcatcatccagttttgggaattttataggttatttttatgagcaactagtagcaaatgttggtcactctaatgatactgaatagaatttagaaaaagaatatttgctttcatatttcattttaaaagatggcttgatgaaaatggcttagagttttctttgaaactgcttctttctttacaaattaatcgccttctacaacatttcctttagttttagtaattagaattgttttgaagtaattagtaaccacatccagtcctagttttctatatctattcattgaatacaattgaatagtggggctattttctctttattgtttttgagctagttctcttaagctatttctcttaaggctcaaaggctggagatgtgaacgatgagaaagaagcagccatgccaggaccggaggcaggtgcgtctaggcagaggggataggaagcggaaaggccctgagtgaggaccaggtcagcctggtgaaggagcagcaagaaggcctgggtggctgtaaggggatctagtggggcagagtggatcaactggagaggctagcaaggggactgattccgcagcacagctttgcagatcatgaaaagcagtttggagtatatgctgagaagactctggaagattttgcatggaaataaagcaatctgatttatttaaaaaatataatctggcttttgtgtagagactatataacgtgggcaagcataaaaatctggagtaaagggtcaatttggaagttattaagtaatttaggaagagaaggtgataacttgtatcagggcagtagtggtcagggtgaatggaattgcttggcacttttcttactgtcagagtaactacgatgtatcctttttcactgtctcatccattctttgtttttcttcttttttgacccaacttcccagcactcctctgcttcctcgatctcttcactggctcatgtggaacaccccccgacccccaacccaacagcatctcatgaagatttaagctgtgttcaccataatcttctgtaaatattgcctctaccttcttgtattaattggctcacttctattgcagttcattctctcacctctctgtaggtaaacttacagtcagagtcataaatgcccaaagatacttcctatcttcctgaaaaccatgagtcttttgaggtctgtgccattttgtcatactagagggcactctgcccttgctcttgatgtcattgtaacacttatcacaccatatgttaattgtatgctactttctaatatttatagtatattaaaacttgtaagctggagctgggtacattttgtccaggattatattctcaatgcctgctatagtacttagcatatgttagccattgaatgaatgaatgtttccatgtttgggtggaggaggttataaaacaaaagattctgtccttcccaattcagtacacatgaacaatgtttagctgaatgcatactttgtgcaggaactgaattaggaaccagatatacacacacacacagatgcacacacacacacacacacacacacacacacacacactatgaatccttgtgagataggcacaacactacaggtccctgtcttctttgctccttacaatatatttataaatatccctcattgtaatgattttcattttctgatttctcactaggctaaagatcccttagtggtgggattggaccatgttcatcacaattttctccttacctaatatttgcacaattaagcagtttattgcatcgatcactgcactgggactgtaaggaaatactagtgtgtgtttgtgtgtgtgtgtgttgtcagtgtgaatgagaagtgtgggaatagctgctgaggagggaagaatattgacaaggcagctaatatgtgggggaaatatcaaccaaggaaatgcacatcagtagaaacagttatctgtgtttgtttggacatcacttttcttcgtttatacaatggaggggatttacctagatgaactcaaaagactcttccagttctaatagaccatgatttttgctcagagtgataatattactcagctaaaagcttcgttgtaaaggtgtcatactgaaaacatatttctgtgtcttggcttgatcacccaggggaaaaaaacccacccagcatctgtctttcttatcaaccctctctcttctctttctaattttcttttttttcttttgtttcctttcctttctccttctcctcctccttttagtaaacttacagtcaccaagttctctggatgtctggaatcgcattctcttaataaccaaatacatcccatctcatttgttatgggaagttcagcaccattctcagtatttttgaggctggggtgtgggtagtttttctctgattatctgttgttctgaatacatgatgataccttgattagattctgatcaccaccccttatctccctgccacccttaattttgtagcgttatttcacgcatgcggcagttcctttcttttctactggcacaaagcatttatagattgtagaccttcattgtagtcttagggataaataaggagaaggcttagcacagcatgggaagaaaacaacttaaaattgcttaggaatcttaaaattttttgactgctcctttatagagactgtcttattggttgtcttattcttttggtccagcttctagtcacattcatagcattcaagaggttcattctcagttaacaatccatttttcatctccacttctacctgtctcctcagagttacaaatttttgttacttgattatgtagtgaaatttaactttcggtctgtaacaactacactccagcctaccttggcatattcaaaattgttgattatatttcccaaacaaaagaaccatctaccaaaccatgcacttttagaacaacagaaaagtagaaaaaggttggcaattatagtttttatttaggcttggccagagaaaattcttaggcataactattcccaacccacaggacaaactgcagtgtgtgtatatgtgtgtgtgtgtgtgtgtgtgtgtgtgtgtgtgtgtgtgtgtgtgttttcttttcctgttaagcttttctaaaccagaatttgtatattctcaaagtatactttcttagatcatttttttcttttaattagggacatctgctatttcagttatttaaaaaattatcttgaaactaaagacattttattgaggcattgcagaggttgggagagaggatcgactttggaggcagactcatctttgttcacatccccatttaccatttatagtatttggtctgtagtgtcaatggctttcatctgtagaaatggtgttattaacggctacctcacagagttgttaaatggagaaaataagacaatgtttaggcaggggccatttttctatgtaatgcatttcttagatgtaataacaattcaaaacaaccggttgatgttaggctttgtgttggtatgttttgtgttgctataaaggaatacttgagactgagtaattcagaaagcaaaggggtttatttggctcacagttgtacaagctgcacaagcatggtgctggtatctgctcagcttctggtgaggccttcaggaagcttaaaatcatgaattacagagaaaggagaagggggagcaggcatgtcacatggggagaggggagcaagatggaggggaggaggcgccaggctctttttgatctggcatgaactcatagagtgaggattcactcattactggagggaggacaccaatccattcatgagggactgacactcatgatccaaacccctcccactagaccacacttccaaaattagggatcacatttcaacatgagatttagaggggacaaatatacaaagtgtatcaggcttgtatgttaataaggacagctctgttcctagagagctaaaatattttgaaattccaattatgtttcatacaggtaactgtccaaattattactgtcttgtcactatccaaatgactacaggaagtcatagtggatgtgagttacttcaggggcaggcagcttcttggtgtccatatccccagagatgctaaggacatctaggtgagccatctctctggtcctcagcttcttgtatcctctgtgctggacaaaaaccagttaggcaattgcttgaagggtatagaaaatctgataagcaggtctgataaagaggatgatgaaataaataggaaaaaatgcgtgtgagaaaattgaaccagactgccacttgggctgtctgctttctttctctggagtaactctccctcttcagttgggagtatcagaagactttcagataagttatttgtactgccccatttctgtatcaccaaattctctactcagattaagattatgaatttgagggtcatttaggaaagttggggatcacctgtatgtaaagcgcatgcattttcctgtattccgttgtcagtttttctttttaaatttatagtaagattagtgagaaaacatgatttttaaggccagcctactttaaagataatgctttgcttcactttattcagatatccttctataaataactatcaagtgcaatacgttaccaacttgtattgcttatatcagatggaatatgtattcggaaagaagtaaacaaaacattgttaacatttttatcgatctgaaaagaggacatttaatattgttggaagcatgttcatgcttggtaagtcgtgttgtaaaatcactgactttttggcgttagctttattatagtacaatataattaaatataataccaaaaaccgtcatgaactgtacattcaaagcaagttctttttgggaaattgggtgataccatttttgagagcttattttacctttcaaggatgtacagtctaataaattagtgtaaaatattgataaacatttaaggaagccgtccctgacctttttggcaccagggatcagtttcacggaagagagttgtccttcagaccaggggtggggagaatggttttaggatgaaactgttccacctcagatcatcaggcattagagtctcataaggagcacacaacctatgtccctcgcatatgcagtttacaatagggtccgtgttcctgtgagaatctaatgctgccactgatctgacgggaggcggagctcaggcagtaatgctcactggcctgctgctcacctcctgctgtgtggcccagttcctaacaggccaaggactggtaccagtctgcagccagtggttggacccctgatttaagggacatcgtctatggctataacctttctaattccccgtttcacctttatttcttctaaagagattgtgtaagctttttcacatcctatttgttgcatatctttagtgctaaaataattgacttcttacagtaaatctccctagagtagttacttgtttgttatgggagtatgggggaaaatgatactgagtgagaatttaatttaaaacttttttgaaatttgtgagaaaaggaatagttatttttaaagagatatataagaacaaccaaatttaaagagtgttcctgagacaaaaatataatgacatgtatttaattatgatttgaaaattatgtggtagaagtatttgatttaagcaatgtaagctttgtaaagtattaggttagtgcaaaagtaattgcaccaagtaattacttcttgtactaacctaaagagatcaagatccaaaacaaaatgcactgaagtatgcatctaaaattcaaaaaagcatttttcctcattaattaatttgatctgaaaaaattaaaatgtctcctgaatgttgaaacagataagtggtttagagtatgaacctacttgaacatctaatgaaaataaaagattattatttatagtttatacgaagtggtcctttagcatcctggaagtttgaaagcttaaaaacttcgcatattagcgaattattcggttgagtgtaactcatgtacattaggtaggttaaaattggattaagttaatttgttaaagattttgcaaaataaatatttcaccaacccagaggacaatggatggtaggcacagtggaaatctataataggccaaatctaacatattgattctataatctgtccaataaaatgagtgcctcagtcactgttcagttccaaggataagttccacgtggggattatttttctttaacaagattttacttactggtaaggctgttgcttgtgacagggaaaggcttccacacagtgggaaatcatacaaatcataaccaagacaaatttgtttccttgagatggtggtagctggataaagcccatctgccttatctcagaagttcataaaggcaaaggataaatttcccatagaactatgaatagtttttctagggctgtgtttgggatagacttgccatgtgtgataaaatgtgaagtgtgacctttgggacggtttctagtaatatttttccccaaagaatcattcaatcagttccccaatgggttgagtgatgaatagtatttaaaaatcgatcttgaaggccatctgtcaagagtggtctcttattgggcccataccataggttggttttatggtcatgaaaacttcctggagttttcctttttttcttttaatttgggaggctatctgttgcacattgaggatgcaatttttcattttatcaaattgatcattagagggcttaaggggatattgagctaagggcagctggttcacagaacctgtggcttttgcagttacatcagccaagtaatttaccttctttagtatcagtttttgagtgtcctgggattttcattattgcaaaagacttaagagttttggatagtttttagtaatttaggacatagtagctgttttttatcttttggccagtagcagttagaaaaccactttgtttccagagtgaaccaaaataatgtgccaccccaaaggctcagcagctgtaagtgtagctaagtgcagtcctattaattgacagtataggtgttcagagagagtagcaagttctgcctgttgggcagaagtggccttgggtagggaaccactttcgttggtttcagacagcgagacaacagcatagagagcttgatatttccttgagttattttgaaggtaggatccatcagtgaaacagacaagctcagcatttggagtgggggttttctatagatcctatctagggcctagtaaggtatgtgacatcttgtcagaaggaagacataaggtctggatttatagagttgtggaaagcaatagtaccttagaaggtcttgttagaagtgagtctgctagcagagagatgctcagtatgaagagagtagagtaagaccttaataggatgagggacataaacaactaatggatagctcataattaactcttcagttgcctttaagaaatttgcagtggctgtgatggcttgcatacagggtgagaggcccttttgcaacagggtctaactgttagactgtaaatatcgtaaaggcctctgattgtctctgtgccttggggtaagaacccctaagatcttagaattttgttcatgaatgaaataggagaaaggaggtttataattaggatatcctaattatatgagcagtgggctcaagaaggttcttcttaatattcccaaaagaggagtaggcttcttttggccattgtagaagtttggggtgatcagttttttagaaaggaatatagagttagagctatcacagagaaacttggaattcattttctacatatcctgctaatcccaggaacccacagaattttcttttggtcatgggggcaggaaaagccgttgcttctattctttggggatcaagcaaaagactgtcttaaatacttgtgagagagttggtagcttttcttatgaaactttgtgattttcttttctttttttaattaaagcagagtctcactctgttgcccaggctggagtgcagtggcatgatctccactcactgcaacctctgccgggattcttctgcctcaacttcctgagtagctgagattacaaacacgcaccaccactcccagctaatttttgtatttttagtagaaatgagttttcacaatgttggccaggctggtctcaagctactgatctcaggtgatcagcctgttttggcctcccaaagtgctgggatcactgcaccctgcccccccgcaccttgttttcaagaactgaaaataaagggacagagttcagtgggttccttgaggattccctctttagtagttttttccaatgctagttgcatttcccccttttgagagaaagacacatgagctttgtgggcttccagaaaatttcagccaattaggtggatgggagcctaagaagctaatagaaactgatgaccaccttagagttccctgagttaaaaggctatgaggagagattgtaaactgtcattggctgatttgaaaccctaacgctttgtattttgttgttactctaaggaaaaggaatagaaagcatggttggaagaaggtttagatttataaagttttggggattcatttaatgctagttgctgcatttggtagttgataacttttgcagtttggatctgaaaatctaggactttagcagcatttttttggccatttttttgtgtgtgtgtggttttggagagttgtcccaccatattcagtaggttggaggtttccatagtcacccaatttaattgcttgttttttattaagatgctaatttactactctaaaccattaacaaagctagaaataaacagaagggaagtttgttagtcaattttatccaatcctgggtattgtaaagccagtctgtcatagtatttatagactggttcctaaatactatcaggttcttagtgctttgttgaatctctttccagtctgtagttttggaaatacttcagcaatctgagcatataattctctggctgattttgagacttttagaaatcaccaggttttgttttcatttcttcccctgggtcatgtaaaggatgatgccagcttgctttacttaaccacgtttgaacatggctttcggctaccaacacatggatcaactggtaaagattagagtaacctagtggataggctttagtaaggaggttgaattatttggtgaatctgacaggatcagttaagggatcagtgataactttggcaatagccgtgagttcttgttatagtccagggagtataagtaacagaatatccagaacctttttcagtttacatttaataagggttggatgactggaggagattcactaaggggttcatcaaacaatggaagttcagatccagaaggctatataggcagtaagcaagagggtgcccagtatggcagtgggatggaaggggtagggataggagaaggaggcaacacagaacaaggacaagcagatagaagcacacttggttctggttttgtttttagaagcttctgagatctccccgcccacaactgagagagtttttgagctaatttggcattgttatcccttagattcctggagtattcacttaggctatttaatctttctttttagtccttctgattgtgtgcagaggaaaacatgtttggaagatcaaaaatccccaattaattgatcattgtaattccagatcaattctagtgatgtttttccatcaagaaagaaatttacaggataacctaccataatttttgtgcataaaaccagcagggattctagaaggggatgactcagtacctaatacccttagaagtccccatgagttttcactgaaaagggaaaaatccctttgtcagcagacagcagcaaagggcacctgataaaagcctgaacctcaaccaaggtgagaggtttgggagagaggactcaccaacggggcctggggccattagagaggtggaacatgaggggtccttgcaggtaccattcctaaatctgctgtagctgtgtaatgcagaggagaggcacttcatatcccacttctgacaccacttaatgtcacctaagaagaagcaaaagaccagactgaaaagtagtaagataaggtgtttattggggtcttaggaattctaattcaggagacagatttggcgcgaagcctcaagagagggagggaaataggggcttttaaaaggaagctaaaggtgaatgcacaagttgttttgaaagacttatttctggtagaagcaactggcttagtacatgattccgtagttcattggttgtcactgttccagttgcatcacttgcaaaattcagctgtttttcaggatattgtagtcattgcagtttggcctggtacaaaggttcaggtcctattttttttttctttttaaaatatttcttgcaagcctgtaggtcatgtaggcagtccttgttagaagggcttcccaactccgttgtagggctctgtaccaccatgacaccattttatatatcacatttcacaagatatagaaaattttgttagaaatagcttgctatactgaaggatggaggtaaggactggtactggagagtttttttatgtattagtgatagttgatgcgaagggtatgtatatctttcaggatgtcattcactccttgaagaagaagggggtaacaagagaccaacttttaagagccaaacattttgaatctaaacattacatctgggttttcctgttagtggatcatgagagacagcctctcaactggaagcttatgtccaaaatataagaatgggtgtgggttatgtcttaaaagactataatcataaaaatgaagggaaagatacctcttaaaagatttttttaatccctccagctattttagcagcattccttttattttatagtctataattaaagatattctgggtagtctgtgttgcatcccaccgtgaaggacatccagaatctgactacttgccatgtagagaaaaatgtacatatttatataatatttaaagtatacttacatatttcttgtgttcccattttctcccttaagattatgatgattcattttatttaaattgtatttaaatctcaagtagacataggaaacccgcttaattcatagtggacttctagaatactgtcagtttcagaacttaggaatacttttgtggctttgccctccacatacatttctccatgttattttgttgtctactagaaagaaaggaaggaagataggaaaggaaggaaggaggaagtgggagacagggaagcaagcagtcagggaagttttctaaggacatgtgcctcgagaaccctgaccacttccacataatgaaaggttaagaattaataagcatttgtgcatttgagcatgtaatataccaggaactgagttcttagatatagtagatgcagtgtttgttgaaaaagacaagatttctgtccatgagtttaccagcttatttctagttggtcctctcagccaaatgaaatatatgaggtgtctagctgctctcaattttgaatatattttttaaggtttcccttgttcaatcttgatttcctatacagtgctctaagaagtgaataccctgtttttgtactagaatattttttcctgacctccagaaaaaaatcatcgtgtaagttctaaactaaatttgctctcggtttctgttattctttgtctaagtcctaagaaaactttccttagtctctcagattcatactctagtttctcttttttaaatattgaaaccttgaccaaagccacttaacttctgccaaaaaatttagacattcattgtttaacaataattggccagctctccagtcatcatactatcatatgtaaatcataaacatgtctccacataggacatataacttttgcttaccaacgcatgtgcattaattacgtagacttatttttaatatttcatctgccttatcactccactatttagatgtcttttcagattaattagctttgttgtgcttcaggaattaattctggaatcaaacaaatgggtttatgtcttatctctaccacttactagctctgtcagttgaccaagttatttaacttctctattcctcagaattttcatgtatgaaatgagaataataatataacacttagaggttttttctccacttaagatttaataaatgaaagcaaataatatatatagcataaagtctagtatatataataagccctgcacaacctttaactattattactgttaatactagtatcattatttacaacactcatcataatacctcaaaatacagtattaattttatgactctatttcttctcgaaagagaagggaaatagttcagtgtagtcaaggaatagggggaatttgtttccgtttcacaataaaagaaaaaaactaagcatatgatatcctctatatgagacttttatgtgtgtgatacatatgtatgtttaaatggatgtaagagattttcaaataaagcatagtatttaagtgagatgtaatacatttagggttctttaaaaatgcaattcttcattgaatgtcactcattaacatgcaagttcaattttcctcatgaaaccttctcataaaaatttagaaaatatctagggttaggcaaacagtacttagatatgatcccaaaagcacaccccacaaaaggaatgactggtaaatttggcttcatgaaaataaaacttttgctctgtaaaacaccgcgttaagaggatgaaaggacgagctatggatttagaaaaaaatatttacaaactacatatctgacaaaggatttgtgtatatgatatataaaggactctcaaaactcaactgtaaaaacatgaacatcctaattcgaaaatggataaaagacatgaacagacattacacagaaaagggatctacagatgtcgaatgagcctatgaaaatatggtgagcatctgccgttaggtaaatgcaaattaaaaaccacaatgagatagcaccacacacctattagaatggctagaacaaagaaaaatgctggtgatgccaaatactggtgaggatgtggagaaaatggatctcccatatgtcactggtggatgtaaatgctacagccgtctcaagaagtaagttggcaatttttttttaataaaagtcaatatgcatttatcatatgattcagaaattacactcttggacatttatttcagataagtgaaagctatgttctcacaaaatctacgtatgaattttcatagcagctttatttgtaaaagctacaagctagaaaacagcctaaatggctttcaagaagtggactgttaaataaactggtacctttgtgcagtggaatactgctcagcgattaaaaagagcagttattgataaatgcagcatggtatttactacagtaatgtaatgacattgtactacagtcatgaaacatgtcaacattagcagaagagagtgaagggtttaagggacattgtgcactatttttgcaactttgtgagtctacaatcattacagaattttaaaaagttaaaaaccacaaaatataattgttttctagggctgtggtaacaaactgccccaagcagggaggctaaaaccaacaaaaaacaattcacagttcagaatgccagaaatctgaaatccaggtgtctgcagggtgggttctgtctgcacagtttgaggaaaaatttgttcatgactgtctctaagcttttggaggttgtgatagtatttgacattgcttggcttgtagattgatcattctagtttttacctttattttctcatgattttccccctgtggctctgttgtcaaatttccctctcctttctcttacaagggcaccagatactggatttagggtacaatgtaaatccaagatgctcttatctcaagatttaacttaagaatctgaaaagacattatttccaaataagttcattttcacaggttcaaggggttaggacttggacgtatatctttgagggaatactgttcagcccactacagtagtcaaggacacagtaaaagaaaatcagtgataattctattgttcagagaaaacccactgttaacattggaatgtatttgtatgtggatatttgtggaaatacatgtgtgtatacatgagatcatattatatctaatgttttatatctttcctatttacctttgtttcataaacagttttccaggaaaatatagtagtagttcactgagtgacatgtacttataattatacagatgtaaattacactctcccaaatgtgtttgtatttctggctcacttgtttggttactttctcctctgaagtttattttctggccataatatttgcaatgctaagagagaattctgtttgtcccaactttagagaagtttaggtagatgaacttgtggaatggctttttataaaaagcaaatttcactttattttaggaatttcttgtctgaataatagctttattgagatataattcacataccataaaattacccatttaaagtatccaattacattgtttttagaatactcacagttgtgcaactttagaatatttttctcttctcaaactcagaatattttcattatctcaaaaagtaatactcgttagctgtcacctccttattctctcaaatgctggtatttattcccccatatgccttattctctaagcaaatactgatttactttgtagaaattacctattctgtacgttttacaaacatgaaattgtatatgtgtggtcttttgtgacttctcctttcccttaccataatgttttccaagttcatcatttgtggcatatgtctgtgttttcttcctttttatggctgaataatagtttcttgtatacatatgccacattgtgttcaaccattcattagttggacattggattatttccaactttttgggtattatgaataatactcttgcacttgtctgattgttacataagtctattgaactataatttcaagcacaagtcatattaagagataactggcttggatgggaataattaaatgtatggtaggtttaggtagccagaagtcaacacagaattactggatgggaaagaggtcattgaaaggattgggtgtttgcagaagcagaggtaagatatcatcacagttctactaacattttgccacataggttattttgtccaatgttgtgatgacaatttcctagtgccaagtttgttctttgtattacttagaataagaaaaaatgccatacttctgttttactaattggcagctattatcatttatataaatattctaattctaatttggcatttctagattgaaataaatatttatttatttatttacacaaatgagcataaataaaggaggtaaattatctagtaaattgcctttcacaaagtattatatattgacaccaactactctaggtaattagaataatgtgataatgcatcataaatctcttaatattttattattgatctattaatattttattattgccttaaagctaagctttgttttgttaaatgagatataaaggaaagctgctgcttttttcttttttggaatggagtctcactctgtcgcccaggctggagtgcagtggcacgatctcggctcactgcaacctccgcttcctgggttcaagtgattctcctacctcagcctcccaagtaactgtgactaaggtgcatgccgccatgcccagctaatttttgtatttttagtagagacggggtttcaccatattggccaggctggtctttaactcctgatcttgtgatcctcctgccttggcctcccaaagtgctgggattatagatgtgagccactgtacccagccaagctgctgcttttatataacactggaggagacagtaggaaggactggacatgtttggtgacctggagtgtgggggcatctgcttcaggacacaagccctagccagcatggaggctcaatccaagaggttagggccacttcatcccaggtgaaggacccccagtcacagccaggaatgcctagcacatgcctgcttataggtaaccaccacatccatcttgagatgcccacacccagaggcctggcaagagctccacccaccgactgagatttgacacacaagtctgaaggtcccaactccctcgaagattcttttcaaccatgaggactagtgagtggggggccctcaatgtctctagacattgaggtgaattgaaagatgcaaattcaggtgaaacaatctttatctcattcatcttaagagatgaaacccttaaacctttatgttccctttctccaggtgtagattgctaaagtaaactctttgtatccttggattttcttttgtttgcatttttggcatgcattttatattatgtaatctcactcatttgttagcaaatgtgtgttttatgattagaattaggtgctaatgtaagaaaatctggctaaaaatcaacatgtataaaaacagtggttttattttttacattacaaagatgtgaaagacaggtgtcacttaacaaggcatgcattttaaacatctctttaaaagtctatcagtaatctctttttggtccatttttatttttaagtcatggtggtggtatattctcctaatctaagatactgggctccaagtatttacatgttctgagtaaaataaacagatttcataaacagtagattgttatttgtttattagacaaaagtacattttcttcctgcaagacttaatttctgttataaaacatgttttggctgcatccatgttagttcatcagtgtatccatgcaaggtgaaatggaaggggcagagctgagatcccagcataagccagccttctattaccagtgaggctttctttggaagtgagtgtaaaattaaagaatatcagatattattctagaaattaagggaaacgtatgattaacttttattaatttttgttgtgactccctcagaacaatgactagagtagccagaaacctaagtctgcaaagaggaaatgctcttgtaagagcaatatgaaccagaagtctatttatgctgtaattatatcccaaaacttcaaagataaacctttgtccgtgctcaagatttttaaaagtacatcataaatcttttttaaaactgtccccctaagctaccttccaggaattcttaattacaatgtagtgaaaaaccaggaagtcaactcctattactcatctgtctactcttaaaattatagttttacatcccattgtatcacgttttacaagtgattataaaaatatagtaaatcaaagggtgaaagtgattattcctactttacactacataaaagaataagccaaaccactcctcaccatgagccataaacattcaagaattttaaacaatggaatagaaattgaatttactatatttaacaatggatataattgaaatggaaaaaagggcagagaaagcttaaatttgtcgtattcaaaatttatgacattaagaaacctgagcaagcagtatttttaagtgatttgtatttaattgtttgggtacaccgaacttctgaaatattcttgtttttaaaatattcttacttgttttgaaaatttctgataacttcagaagtgctagtatgtaaaatgtgtgttatatgtcatctataacatatatacataaacatgcatatgtatagattataaatgtatatctctgtgtatacttacacaagtatctgatgaagcatcttttaatactgggtttcatctgttgcttttggtcactgacactttacataacaggcttgtaagcagagctaggatgtatttttgaggtgatgtatctacagtatattaaatgtgatatagtacatggcaattatgttgctttattgtttcagatctagaatgtaggtcttgcgtgtagatgtaagcccttgggtaacacagcataatctttctaatgtaattaaaataaagctgagcccttcaaactctagatagacttactttggtatctgggcaaatagtgtttctttgagaatgaagcagtgattagatgcagatattctgaatggttgacaggagagagaactagagacatattttctactccaggttgaactgcttgatagtttggaaaatgttgatcagaaatgtattttagacagaatgtgaagctttgaaatcacaggcttgggtatgcatcctggctctaacacttcaaactctgtgttatttgggttaactttattaatctccttgagtcatgatttcagtttacgcattgcacattatgggcaactatctcatctttgagaaaaaaataaacataaatgattataaattggcacatataatacaaaagtgatattatggtcactatgaggctttttttgagaattgagtaaagtcatgaatataaaacatcaaaaacagtgtctgtcatataagggacattcaaaatatggtgtcattattcagtaggtgctctcagattgccaaacttttatttgctaaggaattatgattaattcattcaatagagcttgaaggttatatttgaaattagtatttatttctcaatctaagcctatctcaagatgatcccagctccagcttcttgatcatttttgtatttcccttatgtgcaagaggcacagaatctggttttaccaatcccatagtgtccagtgtaatgctaagatacaggaatttaagcaagtgttccatcagctcaaaagataattttctttttaagagatgatctccaggtaattttatttttaacatgtgcttgtattgagcaaatatttattgggcaaatattatatgccagcaattcagcagcaaacaacatatcaattctctgctgtcactgagccttactttgcagtggggataggcaatcagtaaacatttaagtgtagatatgtcagttggtaatgagtgccaaaaacaaaaataaagcaagaataaagggttagtgaacctaaatgcacctgttggcaggtactattttaccagcctgggaaggatttgctgaggaggtacatttgagcttcaggtgagagtagctagttggaacaactaatacacaagcacaaatatacacttgatggtgaaattctcttatatgtctttgtatctactaagatatgtcacataaaaatcttaagagattattcattcttatttggatcttgtaaatgagggaactagtgtttcgagcaatagagaaatgaaggctatttttattatgtgaaagataaatttctatggacaagagaaataagtgcaggacacttcccaggtgttattttatttaatgttcaagatggttttagagtgtatttaggtataattagccctgttttaacagtgttagaagcacagtaaaattaagtaatttgcctgaagtcagtattaatgactgaccataaaaggcttttaattatgatctctttcctttttccagcttttatccatgacttttcacgttaaattagggcaccaggggatgaaaatccaagtcagttgataaggaactccgttttctgtccaatgaaagattcactgatattgccttatttccctcatcccatttcaatcccaacttaatccaatttttctgtaaattgtatgctgtaatatcattgcaagaatatggcacttaggcccactttcatttacaaaatcaattattgtattttttgtggtggttttaaatttacagggaacctggttttggatactaacaagcattcaaaggcaggcatcactatgaacattaaatcacactagtgagattaaaattggcctaaaggccagtacagctctatcatgatctttgggtctagagtcttgcttcctttcctcttcctgccaaactataggtaatggtttgtcttcctacactttgctatattttaaaattaagcttgaaattaatcaagagattctacagaattactcgttttacagaaatggattgttggctggtatttgggaagacacactaattgcacacttggatttatttttgtttctgattatttcactggcaggtatgctgtcttgaattgctatgtttatcttattttagtttcattagtcagaattcattctttaattattggatctcttttattcttagtatctattctgagcttgctatgtgttattttgtagttttaaattttaaatcattctttctaattttcataggggaaaccatctgctgtgttatttgttactgtgtaatatttgtaatatgtctagatggggagaagcacttaattttacagtcttggaacattataaatccttgtggtcagctctttgtgccatcacctttgcttaatttggtcttctacttgttgttttcattaagtgcatgttttcccactaggacttaaatgtatacatgtatattttattaatttgttcattttattagaaaatgttattgtttaatttgttctataaattattttcataatcatattctctgtatttgtatgtaagtttaatatttcatgtcactacaaaattaaggtttctttgaaataactgcccttttcactgtaatacatatgtgatctagtttatacacacacacacacacacacacacacactctctctctctctctctctttgtccttattggttttgatgttctttttcttcattattagtgtcatgagggtggaatttatttgacatgacttttatgttactctaaaaactgaaacttagtagcggctctatcaatcgattttcagaagctagatattttatttatccaataaataattatcaagtgcctgtttttttgctccgcatagttgaagatcaagaattttacagggacgtaaaaaagaaagaaatattgagtgctaatgtgctaatgctaggaaaaatatttcaggcagagcaatcaaatgaaccaaagctaaacatctgtgccacatgaatatttaagttccacatgtggttggtttggctggggtatagaatgcaatgggttgttaaccaccggttcatcaataggaaattgtatgagtaaactgtggtaaatttgtacaaaatactattcagtaatgataaaaatattttaattactttttacacaaagtaaacataatattaaagttattaaaaagttaattgcatgtgattcttatagtttcatagaatttatgtaacatgtggaaacatggaaagcaataaggtatattgtttatgaatgtacacatgttagagttaacataaaaacatgcaatacatgattaaaacgagattcaagacaaaagttacctctgaggaggtaaggagggatacaggattgtgaaaggaaacagggtcttcaactgtgactttatgttagtttcattttaaaattctgaagcaaatttgacagaatattaagactcattaaatctgggtagtagataccagtgtttattagaatcttttctgaacttttctatttgtttgaaatatttgatgacaaaaatcacaaatatattttataacaagatatgtagaagacagcggttaaaaataagctcaataagtagtcaggagtcagattgcaaagtatcttctgtgtagcctgctaggtttttggatttcctgtataagcatatttactattttggtcttcattactcatctttatgtggaggactccaaaatcattcagctcaacccaacccatcctgctcctctgaatgtcagatttctctgtcctacttcccttatcctggcatcgctgtcaatgtagcatgctcaaagctagacatgttataccttaatctacatacctggccaggctccgtggctcatgcctataattccagaactttgggaggccgaggcgggcagatcacttgaggcaaggagtttgagaccagcctgccaacatgacaaaaccctgtctctactgaaaatgggataattagcccagggtggtggtacaccgagctcctcaggaggccgaggcacgagaatcacctgaccccaggaggcggaggttgcagtgagctgagatcgtgccactggcactccagcctggacaacagagcaggactctgtcttagaaaaataaaaagtaaaataataataataataataataataatgaaatagatacccggccattgccctgctctctctctctcgctaccaatatataagaaataggtaggcgttgttctccaacttcttatttcatttcccattgctgtatgtcatgtactctgtgaccatccttgcctgcattacttgagtcagtcattctttcctggtctccctctgtgtccctgatggtatccctgacttggacttaccctcttcatattaatccttcacatgctttctagggagcttcgttaaaagccaatctgacgtttacatgtgcttgctccttgctgagaaacttctcatgactcctcagtatctctaggagcatttgtagaattcgtgggtgtctcaatatcaaagccacccatggtcaatttaaaagatgtggattccctcatatggatactgatctgatgaaatggaatctctatgggtgggtctcagatcagtatttttaagaaacataccaaaggatttatgtgcatgatacaatttgagaaccatcaatctagcagagaaaatacaagctcttttgctgagtatggtaagcttactcttcacttttcagtttcatcttttgcattctctcttttgtacactcacttctctgccctcttctctttttttcttcctccctccctcacttcctccctccctccctccctcacttcctctctccctccctcccttcctccctccttccctcctttcctccctccttccttcatccttgcttcgttccttcctttcattcctttttgagacagggtctctctctgtcactcaggctggagtgcagtggcaggatctctgctcactgcaacctcaacctcccaggctgaagccatcctcccacctcagccttctgagtatctggcatgtgctaccatgcccagctaatttttaaaatattttttgtagagatgatgttttgccatgttgcccttgctggttttgaactcctgggctcaagcaatccacccatctcagcctcccgaagtgctgggattacaggtgtgagccaccccacccgcttcctatcctcttctttaactagttcgttcttgttcatcatttaagactgaatacagcagcatttaatctcacaggcttacctattacttctctgactccacccattatgtctgttactctacgtgtcctagttttgctgcccattccttcgtttaaatgatcatgattcccaggttaggagattcttgtttacacaacatgtatcaaggtaactggcatgtggtggaccttttaaaaagttcattaaatgcatggcattgctctttagaggacagggaaccaactaaggattttgagcctggattttaggtgtgacattcaggaatttcgggaaaaagagagaattaaaactggagatggtgaattctagtaagaattcataaaattagatatttagttgatcaagattggagattgggattagttgaaagtagagatgactgggtagatgaggaggatgagactttaagtttcacatatctttgattcaagttttctgtttattactttaatatagatgaataatatttatttagagatgcaggtcatgatcttagtttataaatgaattatgataagtcagattaccagaagagtagaaggtttcagagggagagagtgctcagctatgcctggttctgcagaaaggtctactaaaataaggactgaaaattatcttttggattttgcaattaggatgtcagtagatgccataagaaaaataattttaatgaattaattttttgagatggagtctcactctgtcacccaggctggagtgcaatggcacaatctcagctcactgtaacctccacctgctgggctcaagcaatcctcctgcctcagcctccctagtagctgggattacaggtgtgtgccaccaacctccgctaacttttgtgtttttagtagagacgaggtttcaccatgttggccaggctggtctcaaactcctgacctcaagtgacccatctgccttggccttccaaagtgctgggattacaggtgtgagccaccacacccaagctaattttaatttattaaataaaagttaagaatagaagtcatcggagttagtaagtgaatggtccatgaagacatattcacaatgagaagaaactctgtgtttaagaagcttgaaacaagaacagcaggacagtaaggcaatatcgtcatcccttaggatctgtgactcccatggataccaaaatccaaggttgctcaagtccctgctataaaatggtctaatattttaatataacctacacatattatcctgtacacttcacatgattacttgtaatacctgatacaatcctacacaccattttgtggattcagtatagtactgggtacgagacaatttcaagttttgcattttggaacttttaatttttctgaatattttcaatctgtggttggttgaatccacaaatgtggaacccatggatatggagggccaattatactatattttactggttttgttttgttttaattatatgtgtaacctgaacatgtgtaaatgccaaagagatggaaaacctggaaaaagaaaagttccttaagaaccttgctacatttttggtattaagaagaatggggctgggctcagtgactcatgcctgtaatcccagcacactgggagaccaaggcaggtggatcacttgagctcaggtgatcaagaccagcctagaaaacatgtgaaaccccatctctacaaaatatagaaaaattagccaggtgtagtagcgcacacctgtagtcctagctactctgggggaggcaggaggatttctttggcccaagagaagttgaggctgcagtggcctgtgtttgtgccagtgcacgccaggctgggtgacagagctagaccctgtctgaaaaaaagagcaaaagaaaagaaaaaagaaaaaaaaatggaagcttctattatcctgagcataagaagaggaaatttaagttgcgtaagaggacaaatgcctcttcctctggaacaaaaatgacagagcaaacacaagttgcagttgcagattgtacttgtgaagaagtgaaagtgagagggctgggaggatagatctggaaggcttgtccataccaaactcatttattttattctcacttataggcatttgtcaatacctatcacttcagtagttattagttatcacttccaatagtgtgtttaacttgtttttttccttagtctgttcgaggtgctataacaaactaccatagaaagggtggcttatacacaacagatttctatttctcatggttcttgaggctgggaagtccaagattgaggtgctggcagattcggtgtctggtgagggcccacttctcagttcattgatgaccatcttcttcctcacatagtggaagaggcaagtgagctctctgggtttcttttattcagacattaattgccttcatgaggcctccaccttcatgacctaattgttcccaaaggcctcacctccaaatgccatcacattggggattaggtctcaagatatacgtgttgggaggacacaacattcagtctatagaattctgcctctactactccagttcatcttcttacatgcaaaatacatggtttttgagattacacagagcttcatatcatccatctcatgcagacggacagctttatggtgtgaagctcatgattttgttttgttgtaaagctactaccatcattagttacttatgttcttagttataatgaagagttaaaggggctctcttcagagtgtaactttttatgtgttttattcattagcgagtatcttccgtttgtcgattgagttgctcataggaatctctaaaagttgaaataatttcagttatcagtaacatgtagacataaaaatgctaatgtctgttaatgtagatattgattacaaactttctcaaagtctatgtaggtttaacatttagttgactcattttctcctacttcaattcatttttaatgtagaaaaaaatatatataattttgcatcagcctctgtcctgataggaaaggtgggctcacccagtcagtttaatgtgagcaaagaatcacatgatttcagggccagaaagtgtatgtgtagagagagggagggcagaatgaaaatttaaaaatggttaacctaaagtgtgttgagttcgaaataatgcttttgacacacacacacacacacacacacacacacacatacactctcacacactctctcatattctctctctctgtctgcctgtgtgtgtgtgtgtgtatttatttatatagttaattcaagcaaattcttttgttgaattattaaagaaaacccaactttaaaattactaaaaaagtgagacttacttattttttagtcaaatgtctctctgtttaccttaataaaacctgaagaattaaccttactgcctcttcatccccaaataagttttctctcctacttcctattttacatagaagtatgtacattttaagatttctttattactgcaaagaggtatcgactgggctcctttaatgtgcgtattaaattattcttctcataaagtgagtgagatcatttctgccaaaagtgatgccatcattttaacagatggtcaatagacacattgttagtctctttttggatcaatttcaaatcttgagagaatacttgcttctaaaacaaaaagggtctatttccagatgtggtacttagtgatatttagcttccatggttttctcatgaagtgtcttttagtggccgcctatattttcatgggttcctgtgcctgaatggctgaataacttcctaccctctatcccctttagttgccatagtaacttgctgttcaaataacacagtggtatctgcacagtttcctctctattttcacctcttaatgcacttttaatgtgttatgtatgacttttctaaatatgtaactgaaattttgattgtccatcttaaatattgtgtcaactctttaagtaaaatttgcccagtttaaattgggattaaaggtgttctgggtatgttgaaagtcatagctatgatacagggctggaggaatccttgtcaggtggcatttctcttttcagtctaacctttaaagctgtgtcttgaccaggagcatgtaaaactcctatattcctaggtttttcagctgtaaagtcaagataccacacacctgtcagggttgttttgaagaataaatgggaatggacttatgaaagcatctagcactcttccagtcataggccagttactcataaacattggtggagagttgttaatcctcaaaaacttcctcaaaacaacagtgatttttatatctaaccttaggcattataattattaatttattttgaattaacctaataaggattaaattatactctatatgtttctgaattatgtatttggtaaagaggtacattatgtttgatgtgttgatcactttaattaatatttaattaaccagaattctttaatcctgatatcatttttattattcattttctttgtagtctgtaattaaaatgatataatcatttccagtcttacttaatttttttggagatttaactaaattaccttcttttgattcagtcaaatgaaagtggcttaagtattttttagcaccattaatgttaaatatgttaatcatgtttgcttttccagtaaatcaacactcagctactctcactgtaactttcctgttttggcatttcattcttaactgttcacttactctctctttttcctgtgtgacccgtgtctcatatttttgtttaaaaccacttatgtattttatatatatgttatatacaggtatactcacatatacatagattttttcatctctttgaggactaaaggtagaatttattactttcagaaactctgatggcacccacttttttttttttttctgagacagagtcttgctctgtcgcccaggctggagtgcagtggcacgatctcagcttactgcaacctctgcctcccgggttcaagcaattctcctgcctcagcctcctgagtagctgggattacaggcacccaccacaacacccggctaatttttgtattttcagtagagatggggtttaccatgttggccaggctgatcttgaactcctgacctagtgatttgcccacctcagcctcccaaagtgctgggattacaggtatgagccactgctcccagctgacacccactcattttctattgatttgctatcccaacttttatataaaagtatttaaatttttgtatatcatatagaatttgtgtgttaacattatgattttatttagaaatagaagaccttgagaactaagtgaacagtccatgctgatttggtctgtcattgccccttattaatagtatagctcccatttactgtcaaaaggatgtctgaacagtaacttacatagtcatcctgtgggccctcccctttaggatgcatatagtagtagcttctgtgagaggaacaggagaagtgtgatatgttatctgaactcaaataatttctactgtcttacaaacctgagagtaacaaatataaaatggacacttcatagttggatttaattatatactcatttgcatgcagaattagtaaaatacatttccaggggctgtgaaaatcctgagggtcataataactagagattcttcaaagaatgtgggaatggatccaaatctacaaaaaattgatggaacctaaatctgaatcaaatggactaaaatgagtgctgagccttttttttggtttttgttcattttgttgttacctttttagagaaattctgtcttctgactttttaactatagagttctttcaatttcctatgcagtggaatcccaattattctgcagcctcatgctgtcaattttatcttctatttaacatatttcctgttgtgctgtctgcctctgaactagaggattaatcagtattgaatacataatttttgagtttgaaatattgctatatattttgctcggattaattgcattattgctgaatttttaaaattgtattataaactcctattgtatgcattatagtagtgatggtattaaccttgctgtaatggattattcataatgaacaatactatgatgcaatgctgaaatggtatatgacatatttatggagagagacttaaatgctagtctatagcatgaatctgggggagaactggataataaaattgcccagttaggaagttagaatgataatctagatgataaaatcctacattatgtatttagactataattaggctatttgtttctgaaaaggttttgaactgtccagtaaaaagtcaagattactaagataaaatatagttaatcaaaactctaaagggggatggttaatacacttaaattgttgctaatatacttacagtgatgaagtaataaatttaggcatggatatatttttagccatggaataatgaatgtgaatagctgatcaattagtataaccattattttgaggcacctgatacttatcagtcaccttggaagatgtcagggatgaaaggtgaatgatacatggttgtgaactacaggaaacacacagtctaaggagaggcttcaaattctagttgtgtgagagaagaaaactaataaagagaaaaaaattatgtaacctttggcatgctttttgtggatgactttaacatataatgtgtgtttatgtataatatgtctataaaattcgtattttctaagataaagttttgaatttctaaattataattattttgattgccccttcagtttcttagtgtgtgtcattgctggtcaatgaagcatactaacagaccaatctgagcagtaattgtccttgcataagcaagattttttttttttttgatggtaatgagtgatttcaaaaatacgtttaggctgggtatggtggttcttgcctgtaatcccagcaactttgggaggccaaggtaggaggatcactcgaggccaggagttcatgaccgtcctggtcaacagagtaagacctcgtctctgcaaaacaaaataaaataaaataaaataaaaaacttaaaaaatcatgcacctatagtcccaactgctcaagaagctgaggtgagattgcttgaggccaggagttagaggctgcagtgtgtgattgcccactgcattccagcctaggtgacagaccaagaccctgtcttaaaaaaaaaaaaaatctagttagagcattttttacttgttgcgtctatatggtctgtcttaccatagatcacctgaacgaagttaaaatatgtattgctactacttaatgtaataaagagaatagctcttcttacattaatgaaactaggctttcttcataccttaaccttcctttttttcattaaaattctcttggtgactcacagaaaatttaaaaagaattatgacaaatactgttagtctgtttccaaatagaggatattgcaatgtcaaatataaggggtagatcattgagaagggattttataaggtcctggttaagacttgtctggtggtatgtaataaatctgtgtggtaggggtggatagtgaggaccttgtcagacatctgccagctatctacatagtttcactccagtgcacttaataggaaggtcaagtcctctaaaataccagcaagtacccagatgttaaagcctagaatcttgccttggacgtttgacgtaagaagtataacagctttagtgataactattgagtgcttcaactgcagcaaatgatactgtggttcaacatgcttatgcagttcaatttatgtcatcagctgtagagaaattataaatccaaccaaaatcctttgcctgaatggttcttttatggaattcctctagtaaggcatgtttaagtttctatttattttaaatttattatatgtttatagttttgttttctctaacttttcccaccataataatcctttgggatttttatatcctttttttggatttccatttcaccattcatcaaagattaggacagcattctgttatgatttatgtttcatttctatttgagagttgtggtaaaagaaatggtggtaccatcaggaaatgaaaaaaataataattaaaagtggcaacaacaaaaataaataataaatcttaactaagaatgtttctggggaagaaaccattaattttgcttttgatgtattgagttttagttgctatcaggatttccaagctgagtagagaagcatgtatcagttttgttaattatgctttaattaatgtataacctactgaagaaaactcactgtgattattgcaacaatatctgccactattggttcccagcatttactggtgctttatttatactttttatttgttttatgaggtaggtgttattttccctcattttataaaaattaggtattttaattgattcggattatatagctggtagagctagcatttgaacccagtcaggactatgtttagagcttacacaaggcttctccttgacctgaagcctgtggctcagtaaatgctggtttgatacacaaccagcacgtacttcatgtctagaatactgtattcattgttatcatggcattttgaataagagtactagtttgggtttatgttccagttattcagttataaaactctttaatgtacattgacacccatggcaagtttctttttagggggaatgatcacttgtaatcaaagctttacctttggcattatgaatggtgaattattctactataaagccagctacctgtagtcaccactatgtcttaggacacatattaaagcgaggagaaaggtttatattgttcagctgaatctgtacttaatgttatttatctgaacactgtaaaagtttgctgaaaggttaatctgaggttatttcaatttgtcttttcttactggcaaggtggaaaacactgtttctcaaagcacttcctaagactttcaggataatgtcctcagcgatgccaaacctcactgaaaaggatttgaatgtaaactccaatagagaatcatgctagtcttaaaaattttaccctgttcttataatctcctgaaacactttgtaaattaaatttagttcacatttttaccaaaaatcttgtgcgtgtagaggcacatgctgcaaaacaacattttggtcaacaacaaactgcatatacatatgaagatggtcccataggataataacactgtatttttccttttttttttttttttttttttttttttttttttttttttttttttgagacggagtctcgctctgtcgcccaggctggagtgcagtggcgggatctcggctcactgcaagctccgcctcccgggttcacgcatttttccttttttttatgtttagatgtgtttaattacataaatacttacctttgtattacagttgcctacagtatttagtttagtaacatgctgtacaggtttgtagccaaaaagcaataggctataccataatagtgcaggtgtgtagaaggcttttacataaaggttttatgacctgtatgatgttcacacaacaacaaaattgcctagtggtgcatttactataacatatcccatccttaagggacacgtgaatgtatatacacacacacacatatacacatattaccaaatggatacatacatggttacctacagaaaaatttaaactttgaaataatactcttagggaatgttacctttttaaaagatattctttaaatttatatttgctattatgttgccttaccaatattcacatgtaacattgcacatttcactaagggattttttatattagcattttagtcagcacatttgttgtctgtttaccctgtgttatgagttaggtaaaaagagatcttgttcctgctttaaagagatctcagtttagtgacagataagtaaaccaaccaaagagggtgcatgaaccccggtagcctgggtaggaagaagctttcactctcagtagttaaggtgatgatgggatggaggactgttcaggaaagactggtcagaaaagctcagacttgtctaagtatggaagggtgggaggaatgagttaggtgggaaagggcattcgaaacagagacggcagcgcgtgccaagtgctgaagcagcatagcctggcatgaggaggtacacagtaatttgactcagctggaatgatgggtgcagggggcggatcctcattttcagactcacaagacctcaaagctaaagaaggaacatgctgtttttttgcagtggacaaatccctgccattctgcttgccactttctggatgaatgctcaggcatctcttcctttctgattacatccctggctgcttttctatgccactccatggattactgcttcaagtttatacccccttcccatatgatacagtcacctcacttgacacatgtaggttccagaccagtgccctccctttctgtaacctcatgaactaacaaggtgtagatatttaatacatattaacctggatgatagcatgtattaactcagaggagctgcttacttataaataagtaaaagagttaaaaaataatcgtcaatgagtcaatcaaataagttaccacatagctttccccccaataaaccaacacttggaccattcaacatttttttattcactatgcatgcagctttagctatgactaaacttttacaaataagacttgcagggttaccatttagacgtaacatgcactagattccattcatggaggaaaccagttggctgctgttggagattgggcaaccgacaagattagaaaaaaaaccaaaaccaaaacaatgcctgttagcttcagatctccttttagttttggagtttgctgtattaaactgttccattacactttgtagaattgtgtggagtggagttctgttgatctaagagcttaatacccatgacaaaaaggttcaagttttgtatgtgaactcctacttacagtattgtcatcatagacatgaagaatgttaagaaacgcagtatggcaattaagagcactaaccttgaaggtgacccaaattggaatcccagttttaattcttggccaaatattttaactgtactaattcaaagttttcctgcatgtgtcatggcaataatttctgttctttttcattaaccttgggaaattattaatatgaagattacgtgacatcttatttttgtatgtatcctagaaagtataaaatgtgatatgaattaagttggtattaatagaaaggtataatgttcagggaaaatatcagacctgtatgtgagattttgtaatcaccactgggtatttgagtagaagaaaacatgagaaaaaaataataatgtgcatagtgttaagaaatcatggctgagaagaaggtaggcctctgtctgggcaagaaaactaggtttttgaagataatagctttgagtgaaaaatgagagatttgtaatcatccagaataatggtgtctgaattcttcagcacgtggtagtagacacacgacgtgtttgttgtctcagaattctgagggcaattcacaaagaaattgttacaaaccatgaatcattacacaacattagaatacctcaaaagagtgagtaactcaaagctcttaacagatcttgagaaacttgaaataataggcatgtttttcttgggtgagcaatctctctaattatgtgagagttgtgtgtgccctttcctgctccaccatattatgaatgtttagtgtagagaattactgaaggtttgcacaccaattggtaaaaaatgcaaaaattaccagtagtaaatatacaagattgtttgggtaggggcagggacattggagaaaaaatgaaagactaagaaaaaagtgatgtgaattttagaaaaacacaaagattaagcaaggttgagtgttttgagaggaaatcaaagcaacaggtaaaagaaaccagtaacacagttagttgacttttttaaactgagagatttctcaagaaagatttcttgataatagagtaagaaagaaacatcctgtgatggggatgttctttacagaatattttgatctccaatttaattttatgtctgaatttataatcagaaaaggtcttgtttccttatggtttcatcaaactaaattaaattgtaattgctcagatggtataaatatgtgcacaaagttgattattgaacattgtatagtggccagttggctaattgtaactctaaatgacaccataatatgaagttttgtttttatttatattgttctctaaataccagggtgagtatgatgtttctgataagtgcataaagaaaacatgaacttataactggagcaatagggcaaggctgcatctttattacttaactctccagttgtaaaaacaagtactacggttgacaagacacctctccatgggtacctccgtaattgtcataaatttaaatttattgtaatgttttagacctgtttgaactgtagtacacagcccattataaccatgtttgaattatatttatcaatcttttttttttttttttttaagacggggtttcactctgttgcccaggctggagtgcagtggcaggatctcagctcactgcagcctcaacctcctgggctcaagcgattctcccacctcagcctcccaagtacctgggactgcaggcacatgccaccactcctggctagtattttttgcagattttcacagagacagattttcgccatgttgcactcttgagctcaagtgttcggcccacctcagcctcccaaagtgaggggttataggcctgtggcactacacccagaagacaataaaatattttttaaaagtggattatttgtaagggagatatctattagaaagctttttgaactattcacggaataagtttcaattttctattttttcctactagtttaatattgaataaaaatgtatacattattcttctcctggtatcaatcaacctggactcctacattttctttgctaatgattgatttcttttttggaatgatacgattacttttgtgacattgtcacttaaacaattactaagaaaaagttaaaatatatgacctcaggtagactcttaattttcatatttaatgaaaacatgcataaccagttcttactccccaaaaatatgtaaaattacaaatgaaaatggcatgatgacattaaaatgagcagctttgtatattttctgccttgttactaaacagcagagataaaggaagtctccttatcaagttaacagaatttaaataatctatgtagataattattataaattatttgttaatgtaaatcaggtttttagacctatagtaagctgtgatgctatgatataacatcctgaatgatgttgattcatttttacatcttaatgaagtatcatcttcattagaatatttgaatatagaaatgtttctttttcatttttagaaataactttgttaatagtggctcatatggctttgttttaggatgtgtattatgtgtgaatacatacaaaaattctaataaaatatcctaacatcagttaagatacttctagccacaggtaagaaaagacacaaatcatagcttaaatattgtttattgtctcatataataagatgtctatagttagcacagtttcagggttaattcaagggctcagtggcatcatcaccaggttagttaaatcttttattttttcctgtcatcctcagcctgtgaacttcagacagtaggcctgttccagcatcacctcctcacatagttgtgtccagatatagaaatgggaagcttctccacaaccatttctttgcaagtgcaagttctccattattggtcacagtcagatcttatgattctgtttagaacagtcactagcctaggggaaatgaggcaaccattaattatattcaactgtgattcagagctgggggcatgttcgaccttcatgaaggtcatggtcagtttgaggtgagagaataaaatcaagattctgcttaaagagtatgctgagtgtaggacgatagtttggttggtgataaaagtatgtctgccaaatagcaattcagaatattttctagaatctactaaacaaaactttattttgttttaagcacacagttaaaaaatattaatctaaactagaagtacaagtctcatgggtaaaatcttttgggatgaagtagcagttaaccttttggtcttttaggaatactgcacttattgcaagagagttatagcacattggcattttactaacagaaaactgaagtctctaaaaaattgcccttcccacaatgttattacaccaataatttagatattatgtataagaatttgccacaactttcacattttatcttctaatacctccttttcttattattccccactgtgttccatttctgccctctctcaagtgttatttcctgctaagccttttatattttgactttttaaatgcaagattttaataatttaacaagcattttagctgataattttcactgcaggagctgtgaactgtaatgcaagactaaatatcagtctaagagctaggatacctaagaagtgccaaaattattttgttatattggaagttgtaaatagggaggatagaggcctgaattttatttatttatttatttatttatttggacaagatcttgcccagtctgcagactagagtgcagtggcatttatatctccctgccacctccaaatcctgggcatagacagttctcccacctcagcctcctaagtaatacaggcacataacaccatgcctggctaattttttgtgatttttgtagaggtggagtctcgctgtgttgcccaggctggccttgagctcctggcccaagcagtactctcacctcagcctcccaaaggtgtggggttacaggtgtgaaccacttagcttggccatgacctaaatcttattacacaaaatgaaatgtcagcaatttgacaaaaaaaaagcatactctaaattattgctgaagtttatattgttatagacattgatatttaaattgttagaaattaaaggcataaagccatatatgctgcttttaaagggtgcacaaatattctaagcctccttttaaagaattattatagtctacaaaattttaaaattttcattttcattgatcagtgtattaaatgtaatgccaattatttattttaggccattgatgtaatgcaatgcagttacattgatggaattcactgtatcttagtaaaatggaagagacaagatgaaataagcacacatatatcttctgttatggagtagaactgaggctaaactgtgtagtgtttggatattactaaatgcttaggtaaagtgtgtgtgtgtgtgtgtgtgtgtgtgtatgtatgcacatacatgcacaagtatatttttctccccatattctatttctgcctaggttacgacattcattctgaaatgtctaacaccagaaacattattgttatgatctctccaaatatgaaaaacaagtaaaagaagctaaagggcaaaagtagggaatttacctatgtaataattgagtttatattaagagtttattttatggaattagaaatgagtttgtgatagactggatgccatgttgtatatgtatcttgttaaaacttgtttgtaaacaggtttgaaaacttgatccatcgtgcagtagagtcacatattcattaatctttttgcatgttcaatgaaatgctttctattgaactagtttcctattatgtatatgtggtatcagtgtatttggatatagacaaattgaatttcacaatgtgttttaaatatttaaattcttctttttacttttgaaaacaattagcaaatcagtatacaaataccagtaaaatgtgttcaaagataatgtggacaaatacaaatattgaaatttttcattacttttacttctgcatcttttgcataggaagtatgaaaaggcagtatctagtggttgtttcacttctttggatctagatactcgactgtctaagatattaaactgttagatatatggctggaaactcctatctgtgagtcagagttttcttcaggctggtaaaatgtagctgtcttccatgctaggttcggtgtgatctgcaaaaaggcactttctttattgccagcccactgaatttctgaatgatgaccttgcaacccataacaaagtctttcatgcaagcctcgactggctggatatggggtctgtttcttgtctcttttaccttggaatcagccctgagggttgaccttacacatttttatcattctagctgagaaagaaggaagtcaggtaagaagataggaaatgcccttcccaaataggaaaagaaggcaccaactctctttgctgtgtctgcatttccctagctttaggaaatgcatcttgtttagctttccttcttggaggcatcctttaagtaggacatgcgttccttgaggatccagagaagaatagttgcttttagttcttgtactaaaaatcaagagtggattaattctaagtggcccattttgatagagatccctaatttccttctgaagatttgtgtgagcattgtttgtgaccagagacctttatcttgaggatatacatggattcaggagagatagtcttaacataagtcaatgccaattgagaagtagcacagaatccctaagtgacccccctcaggtataataatattgttaattacattttcaatcaattgaaataacaatttagaaaataatggtttagataaactcctatccaggttttctttaaggtacactgagagaaagagaaagagaaagaaatctcagatcatcaaagatatccttaataaagttaagaaaacacactaagactgctgtagttcaatgatgtatagtagtaaatggtcactggcggtattctagttaatttgttttcttctgcatattgttaagtgggcagtgtaattaatcaaagcaatcaatcaatactaacttaatttgtattttttaggtatttccaaaataatctaacataaaccttgcctcaaatgtattattcttggggtaaagtaagtatgaaagagaatgcaatgtagcaggctgtgatgagttgtacactaagagtctaaaaatcacctgggttcatttttagtttcagtacccaaaacccaatgactttaatccaatgactttaatacaatctttccattgagtataatcaaatatgtttcatatgtaaacagagttggacctagtgatttctaaaaaattcttaactgtgcaatattatgaaataatagaaaaatataacactatagaaaagcactcagtttagactaatataaagacagaatcagaaaagtgcttagaaatggtactacagctagggcagggttgacttcaagtgagagttactcagtggcattttcttttttttttttttttggagacagaatcttgctctgtcgctcaggctggattgcagtggcgtgattttggctcactgcaagctccgcctcccaggttcacaccattctcctgcctcagcctcccaagtagctgggactacaggtgtctgccaccatgtccggctaattttttgtatttttagtagagacggggtttcaccttgttagccaggatggtctcgatctcctgaccttatgatctgcctgccttggcctcccaaagtgctgggattacaggcgtgagccaccatgcccagcctgagtgacattttctaagttaaatttttgaatctgaaagatgcaggtgtcaaataatacagtcacaactcaaacttgtgcttaaaattgttttagagaaatatatttcagaatttactgtcacttttagtcaaaagattgacatagaatacaatgtaagcatttttaagaaaggccaacaatccctatcaacatgcagttgtctataattactttacaagtgttatgggtgatacatgttaaccttctataccctggatatttatatattaaggacagtaatcttaactatttcaaaatatgtttttgaaatctttcttaggttgtcttatacttagaacattaaatgtaagtttaagaataattacctaaatattgtactttttcttcacataaggtagattctgtgatgagctatatttttgttatttttactttttggcactagggagagaattgtcttaagatttttaagtcttggagaaatttgtttatcttaaaatacttcggtcagagcattctttgattagaattatgaataactacacaaaattcaaagttaggtaatgaatgccaagcttagtggactcaattttcaacttaaagaattgattttcttaacaatgtattgttttagttgcggaataatgaaatagcaggatacttaggacttgggagacttactactatagatacagtcatacttcaaatttattgcgtgtttgcatgcagacagtaataaaacaggtggtcaataaagggagtgtattagtccattttcatgctgctgataaagacatacctgaaactaggaagtaaaaagaggtttaatggacttacagtttcacatgtctggggaggcctcactatcatggcagaaggcaagcaggagtaagtcatgtcttacatggatggcagcaagcaaagagacagagagcttatgtaaggaaactcttgcttttttttttttttttttgagactgaggctcgctgtgtccctggctggagtgcagtggtgcgatcttggctcactgtaacctctgcctcctgggttcaagcgattctccttcctcagcctcccaggtagctgagattacaggcacatgccagcatgccccactaattttgtatttttagtagagacagggtttcaccatgttggccaggctggtctcggactcctgactccaggcgatccactgcctcagcctcccaaagtaactcccattttttaagccatcagatcttgtgagagttattgcttatcatgagaacaccacaggaaagacctgcctccatgattcagttatctcccgctgggtccctcccacaacacgtgggaattatgggagccacaagatgagatttgggtgggaacacagagccaaaccatatcagggagtcacacagatattttgattttccagtgcagataaaaattacatttgtaccaccctataggctattcagtatacagtagcattatatctaaacaacaatgtacataccttaagtaaaaaaaaacactttattgcaaaaagtcttaacaatcatctaagcctttagcaagtagtaacctttttgctgttagagggttttgcctcaatgttaatggctgctgactgttcaaagtggtggttgcagaaatttggggcggctgtggcagtttcctaaacgaagacaacaatgaagtttgctgcatcaattgactcttcttttcacaaaacatttctctgtagcatgtcatgccattttacaacatttcacctatagtaaaacttttttcaaaattggaatcaacactctcaatacctgttgttgctttatcaactaactttatgtaatactcaaatcctgtgttgtcattttaacagtataacagaacacctccatcaggagcagattccatctccagaaatcactttctttgctcatccataaaaacaactcctcacaactcctcatccattcaggttttattataattttgcagcaattcacttacgtcttcaggctccacttctaaatttctttctcttgctattttcacatctctttttatttccaccacatcttccactgcactgttgaacccctcagtgtcatccatgagagtggaaacaacttttgagatccatctgaggaatcactatctctggacagctataccctaaataaatggattccttaaataataagacttgaaacttcaaattacttcttgattcatgggcttcagaatggttgttgtgttagcaggcatgaaaacagcattaatatccttgtacatctgcatcagaacttttgggtgaccaggtgcgttatcaatgagcagtaatattttgaaaggaatctttttttctttctgagtagtgggtttaaaatcttcagtaaaccatgctgtaaaaatagatatactgtcacccaggctttgttgttctatttctagaacacaagcagagatttaacataattcttaaaggatctagtattttcagaaaggtaaatgagcattgattttaacttcaattcaccaatggtgttagtccctaacaagagagtctacttgtccaatggttctttgaagctagcctttgacttttcctcactagctatgaaagttctagatgacaccttcttccaactgaagactgtttcacctacatcgacgatccgttgtttagtgtagccaccttcatctgtcagcttagcttatcttctggatagcttgccacagcttcactttgtccttttttgttatggagacagcttcttttcttgaacctcatgaaccaacgtctgctggcttccagcttttctgcagcttactcacctctctcacccttcatagaattgaaaaaagggctttctgtggattagattttggcttaagagaatgttgtggttggtctgattttctgttcagagaacaaaaactttatttagctcagcaacagaaagttgtatccttgaaagtcaccctggtaattaatatatgatcagaaaagtaattgacaattttactttgtaggttcctgggggctttgaaagaactatgtttatttcaggaaaggaacaatagtatgttatcatttgaaatgaaaacagtaaaaatctgcactttctatttagtagccagaaaatgtccataaatcctgttttagggcactggaatttggagtaaatgacccattgtttgtataaagatttaaacaaagactgatcatcagctttattctttattattaatgtcctgtgcttgttagtaaaacccagttgcttgggtttttgtatccctggagagtttatttttgttatctttttcactgttaggcttcttactaaagagggattcaagtaagtaaataacttaagagaagcaacaggaattgaaatctataaagctttgttttctcaacttggcacaactgcatctgcctttgcagtctgggattggatgattgattttatatcttggaagctcatttttatatgagtgtgaaacgagtctttcaaaatacactttgtgaagataacattaattagttactgtcatcaaccaacagggacaaacctctcctttttgtgatttctacaggaggattgatttaactgttaaattttgtcatgtttttcaaagagcaataaagaatcccccaggaggaagaatgagaaaagaagcagctcatttttgaggatatgctatgtacaaaacacctcataagacaactgacagtacctacctttcagacaaattatctgagtcacagagaagttacataaattagtcgtgatcccatagcaaatggttgagaagatttaaagtcaaacatgtttccattatttaggacctataaagtgtcaagcatcatggtagtctttggacacataaagtcaacacagggctacttggtaggagttacttctaggtaaaagtcattgttctctaaaactctagccctgttagtgtattacagaatgctattggaaatggagcttatagactatatgaagaatctgtaacagaggacatggaagcagagaagtttttttaatgttagaccaatgatttgtattacatctgaaatgctccaaaatctgaaactttttgagtgtcaacatgaagctcaaaggaaattctcattggagtatattgcattttgcattttctgattaggaatgctcaaccggtaagtatatataatgcaaatattacaaaatcttaaaaaattcaaaatctaaaatacttctggtcacaaccattttggataagggccactcagcctgtatcactgtcagttctgtactgggaagccatatgtgtttttgaacaaaggaattatgttatttagattgactttgttaattgtaatttttaataaaaatttacaattttctggtgaattttatctctagtaaaatttagtctgtgatattttgcttacattctactttgctaaaccatttccttattcctaagcacggaatgattggatctggtgactggacttcactgctccttgctctcaccctcctcagcaaatttcagttttacctcctctcctctcacagttttaattcctaggtctaaattacagatagccatctgcctacccccaactcatgcacctatttactaatttcccaaatatttttaagcgctttctatgtgccaggccttgagtgcacaaatattcgttaagtgctttccatgtgccatgccttggggcatggtggtaagtaaggcaaacctagtcctatacctcgggaacttaccttctaattgaggaggcaaacaagaaacagcaattagtctaattgctttattatatgtgctatgagagacaaggataacatgttaggagagcatattagaaaaggggtgagaatagggaattatcctagcagggtagatcagggagatgacatttgtgctgagacctaaagagtgaatagagttaaccaagcaaaaaaatgtgggatgcaggttgccggggagaggttgggtgtcagctggggtcaccaaagggatgaactcagaagaggaagtatattttattttatttcccatctgaattttctagcaccatagtgtctgcacatttagattttattaaataaaaatgtaaagtagtatattttgcttcacttcctgattgcacattcctagaatattggaatttatattttaactaccacagtgcctcgaataatcctttgcatataatattttctctactggtacttgatttaatatactaacattttttgcttgatttggaatggagtcggtaaagaagaaagaatttttttataaaaataacttacatagtcattacttaccctattataatttcacgattgacttacaattatttagttatggtcatttgaatgtgctacttaaaatttgtcatgagtaatttttagattaaagaagagcaatgttgaaaatgaaactacttgtgtatttagaaaggtgattacaattgacagtattttattgtacattttaaaataactaagagtaaaattggattatttccgtaacactgagaaaggataaatgcttcaggtcatggaaaccccattttctctattatatataataatgtgattattaagcattgtatgcctgtatcaacatatctcatgtacctcataaatatatacacttattatgtacccacaaaattaaaaattaaaaaaagaaaaaggaaaacagaaaggtgtgtagaagctatatcatttagtggtgttgaaagttttaatttgagatgtttagataaatggaccactctttttcaggttgtattgtttttgactgttgaaaagcagaatgcagatacattcattttattaattgtagagctcttatacttttgaaagagagcaagttattgtgctttagaattgtactgacttttttttgttttgatggtgtcttaacgaataaaaataatcttattaacaacaataaaaattcctagatttcgtagctttaataaagataacacttatctcaccaggtaatatgaaaaataacatacagttttaagattccaaggttctcaccagaagctctatattatgaagaagagactgctgttataattttgtgtataaagaagaatcaagcagggaaattaaggagaaatccaagtaaccaagacctttaacagtgtacacaatgactgaactttttataggctttctcaaactttttcattttcatgcgatatataaaccctgcccctgcagtcatgtgtatttccctatgacttaattttctcatctgtcaaatggggtactaaatagtacctgtttcagagtgtattggaagattaagtaatttgaagtttagaagatgtctaatactcagtgagtacacaattaatattagctgttgtttgctcaatagtccaaatgatcaagtaacttttttcaataaggaaacacatctttttgaacctttcgtaaacaagttctttagttgtttttacataactaaacaaatacttatttgggttaatttggtttctttaaggagaaccttgaagaacttttccccaacattttataatttaaaatattgtgagaaagtgactagaaacagatacttttccattaagtttataaaggacatagggaaactttatatgcacactcaggtcattgttttgttttgtttgtggtttttcaatacaagaaagtatttgcttttgattctttttctgttccaactcatgttttcttcctcgggagcagctgtcattcttaggtagaatctcctttctttgtgtactctattaacttctcttccatctcagagtaattgattcctcagcattttattgatgatatggaacagcttttgaaataatttcttcagttttctgtgcgaaatcactttttttccccccaacagggttttgctctgtcacccaggctggaatgcagtggtacaacctaggctcactgcagcctctgcctcccaggttcagattacaggcgtgcagcaccacacctgactaatttttgtatttttattagagatggggtttcaccatgttggccagtctgttctcaaactcctgacctcaagtgatctgcccacctcagcctcccaaagtgctgggattacaggcgtgagccactgcgcccggccttaaatcacttttgaggtagatgtttttctttccgatatgtcgggacaaaattaccttttcttgtgctgcagcatttttttcatagtcttcatatatttattttactatttaccttgcttgaatgaagagacatctggtgagactaggtttttactggcagataagatgtgtggactttcttctaatggctcaacttccacatgagtgatggtcatattccctttccatctctgtaactagaaggaaggttgataagcttagattcagcccagttctcagtggctagcatcatatgaaatgaagtcagggtgtcttttatctctgttgcctctgattgttattgtgttccatatggtgacatcatagacatctacaaattccaccatatgcagttaccaggatcatccctgaatacaccctgttgataacagttaacttgcgggtgtacctcctgcactgcaggcttaacagctgccatctctgtttctttcttctttcactcatcaattatttttgctttttttccctgttaattgcaatatctgaatggccatacacataggaggttgtgaatagtactctggccatttaaaaataatgtttaaaatagggaaataggccagatctggtagcttgtgcttgtaatcccagcactttgggaggccagagtgggcacattgcttgagctcaggagttagagacaagcctggacaccatggcaaaaacccttctctacaaaaaaatacaaaaattagctgggcatcatgaggtgaacctgtagtcctagctactcaagaggctgaggtgggaggatggtgtgagccccataggtagaggttgcagtgagctgagattgcgccactgcacacgaacctaggcaacatactgagaccctgtatttaaaaaaaaaaaattaaaaaaagagaaaatgtatttagtcttttataaatgcagtgtttttggctaagaggcaattcaagggaagatgttaaacatcttctttcctttttctcaagtgtgttggcttttttgtttcttgagctaaatcataggcaggctactgattcattttttatttcaatttcattgactttgttatttgtagaaattcttggcaaagcatataaggactgttttgctagtaataggtttcagttatatttgagttttcatcgtttttagggactatcttagaaatcactttatacttaagcctctcaaaggagaggcttaagttggagtgctcaaaactagctatttaataaatggttagactattcaaataaatattacagagctgatgatctataatatttttccttcttaattctatgaaaaaggtaattttatggtgtctattaattttttccttttgtattatggttaagacaatttattaactgtataatacacagctatatgttatcatctgtgacattttgtgaacatcccataagttaatgtcacgtatcagagataatgttcaaagctgtttattttctagaaaatactttatgtctagtatttgaccatgccacactgccatcagtattgtaagtctcctgagaactactgctgcacatgatgatatatgcatatgacacaataaacaccagatcatagttgtaattcatggatgaggttgggctttcagtgttttgagcaggaaagacttgatagcttcagacaatttagtgagtaagggaacgatcttttggaggactgggatgtaagtcgtctttgaattactttgtatagaggactgtcatttactcaaagctgatatttttcatttcttttaaaaggcaggacctgtcaattcaattcttccagcaaatgctgtgaattgcaaaataagtccaaggactgttctggcagggatcttgggattaaaacaatgaacacattagccctggtgccatgttcatggaccttcgagccattatattacatttaagaaattgcattacatagtgtcacaacttttaccaaaccatatccttttgtgctattattcagtaaatattttttcttacattgggcaaggaattttttcttaaatgaatagatttcaaaaagaagttataggaaatgtctgtggaaacaaaatgcgatttatgtatactgaatatttattaattatcaactattaagatgaagaacatgcccttttatgtagtgcttgaaatcatattaagaacaattaatggtacaactaccacaccttcagaaacagtggttcagaatcattctggaaccaaatacctggaaggagattgtctatcactatcacttcaggaatttgggagtaaggggtgggcactgttctcaaactgttcttcctgaaacctgtccctagtgagctcctacagttgatgagtaaaaaggaattgaaaaacactagtcttgcaagtggggtttgtaataaataatatatcttttgtgtcttttgtaatctcattatacatttagaattatatatgagcattcttcttccttatgtttttagtttgagacagggtctttctctgtagtcccggcagtggtgcagtcacagcatactgcagcctaaaatttctgggctcaggcgatccttctgccctcagtctcctgagtagctgggactacaggtgtacaacactacacctagatattttatttatttacagtagaaatcaggtctcactgtgttgcccagactggtcttgaactcatgggctcaagtgattctcccaccttggcctcccaaggggtgggattataggcatgagccatcgcacctggctgacaatcttacaatgtaaaaacttttaacaagagactatggatacaaataaatttttaatttcctagcaatcctagaacagttgtgtacttaaatgtttatttggtacagaagcattccttatcaaaggtcaagtcatttgagattattcagcagaattagcatggaatgttggaatatataataagacatattttgtgagcttaagtaatttctaatctagttaaagagatgaaacttaaaaacatactttaattaaagaaccatgaaggcctataagcttaagttgcaaagtgtgtgagtctgaaggatgtgcatcaggcattcagatgggatgagaggagtgtgtactaagggtccggggcccttgggcaagaagtcagactctggcactttgaagccttgagtcaatggtgtgttccaattggagtgcatcaaagcaataccaccaataatgtttgctaatgtatgtgctagaaaaagtaaattcttaatcacttttttttagatttgaagattttgtcttgtttgcctgtcttctgtgccatagcttcattgcttggatttctcagaaatccacatctttgccatattgtttgaaattgggcttatgtacacatacacacatacatttaagtatattatattagcatatattaaatggcaagcacactaaatgacaacagctgtgactgtcatggtttaatcagagtgtgcaaagctgatatttttaatccatcatggtaaataagagttttagtcgtcttccattgtgtatagtcttttattaagaggttttcttttgttgttgttgtttgctctttagtttattaatttgttttccttaaaatttgccattgctttattgggaatcaataaaaccatagatttattaggaaaactatttgagaaatagcctttagcgttatctagtaagcagtagtacagaagtataagcatgctgtcaatacatcttcaggttcacttttatctttctgtgtgcaaaacatgactgggattctaatgtttgtttacaagaatacttaaatatgatacactgtcctgtaacacttataagtcatccatagactcaatttaatctggaataatgtttttaaaatagtttttaattaagctcaacaataaagtacttatatagtatattctaagcaatatagtcttcttaataaattatattcccaggtgtgtctcgactaatttgcatttgaaataaaatattttaggcacattttctatttagtttatgtataaaaatatgtacatattgagcaaaaattgttgaaggctttaaaataagccgagattgataatagataaggtcttttacacatgacccatttatgcctggcgtatttcttcacccattttaactttttgattgtatgtgcatcatttcttatcttcagtcaaatttggaaatcaaaatctcagaataatgctttaattttttggttagactcactgggtccttataattgctagttttctcgatctgcagtctttgccagggggggaaaaataaatctaatcccttttaggcctgtttatctataaattctctagttttgttccagttcctgccattcatttctgttttagtgctaatattttcaaggagtttcttgcgcacttcccattataagctgattaaaacccctgtcttggcatctactaatagaagttgcagctgctcctataaactgagcagttaataggaaggaatacgaaggattatagccttttccttttcacattgtttttcctgcaccagactctatataaaaagctcctgcttgtgaagaatcattttgtttgcccataggattttctctctgcattaacttttagtgttttgaaccactcagcattcaatgttttttactctcttttaaactttaagttttcctttgtgcagcttctttaatgaaactttccaatcgctttacagagaatagctttttttgatcctctaactatagcaagacatagtatacaaatacattacactataactgatttcaactttggaaaactgtgtgaacatgtatcagtgagaaagtcacttagttacttttaggaaataactgtgtgttaaaaggatttttaatcttctgtagtgtttatacatcaacggcttagggttgaacattcttttgaagcactcatcctgtatttcgtattaaataaatttggattaataagccttgtggaagtgtcttcgtaatattaatttatttataagtgaggaggagaagatccatttaaatacaacagggataatactttgttcaggaattatagagaagagttaattccatagaaacagaataaaggaaactctctatgaagtagaagataataatatatcaggtcctcatcttttcattcaagacttaagacaaaaatgtctccttaaattcacttcagccttgtggttttctaatgttatgaaatattgtctgttttgaaacactttaagatttattttctgatgaaattcctttggaggcaatacatgggtaagaggtggaaggagaggaaaaaaaatcctattaagctaataagagaaaaaacttgttaaagtgttataaatatatagaaagagttgaaaggaagaagacatgttagagagatgaagtggggaagtaaatgaatcacttcggttaagtggattcttaatttattgctggctactaaccatgatcttagttttcttaattttcattgtgatacatgaaacagagaatggggaaagtctgaaccttacagtaagtgatatttagaatcttagccatcaatatgggaaaatacatgtaccataaaaaaaagctgggttttttttttaagtttgggagttaaatgtacaataatatctatttgacattatgagagttatattttcttaaattagatacaaaagactcagaatttgactgtattaaaattaaaatatttatttgtgtatgtgtgtgtgacaaaaaccataacaatgcttaaggaataaagtcaaatcagaaccagtattattctcaatcttgttcactgaaatgtttaatttaaaaagacacgaataggcatatttggtggaatatttttatttcctcagctgattctttaagaaagtatgaaattatcagtattcattttattatagaaaatttgtttcaattttagttcaatatccagtggtacacaaatgtagtattgattaaatgaagtattgattaaaaattacaaaactcttgcgttgaagggctggaaaactgaggttttcttagagaagaggaggattactgtatgagaaagctaaataatccatattgaagacaattgcaaaaacaacagtagctatgtgataagcattattcatatgctaggatcatttttttttttgagatggagtcttgctctgtcacccaggctggagtgcagtggcgcaatctgggctcactgcaagctctacctcctgggttcaagccattctcctgcctcagcctccggagtagctgggactacaggcacccgccaccatgcctggctaattttttgtatttttagtagagatgaggttagaccaccctgttagccaggatggtctcgatctcctgaccttgtgatccgcccgcctctgcctcccaaagtgctgggattacaggcatgagccaccgcacctggccggtcatttttatttaaaacctaattatattaaattgaagatctcttcatcaacagaagttcaagtaaaaaaattatcagattttgaggcttactggcagtgaaatagtgattccattaattgaaattagaaactaatgtagaggagaaactagagttcctaaactgatcgtgagtttgcagtaggatatattgagtttggaacattttggaatgtgattttgtggtttgaaaaagagttctgagctattgctatagatttaaagaggatgtgtttgtgaaagtacttgagaacaccaaggatttatgattatagaaagaagacggaggatagaatcttgaagaagaaccaactgcaggtataaaaggatacagttctatagaatatctaagatagtaaaggaagtaagaagtgctgccagtaacacaataaaatatagccattaaaaggtcaattaagaactagcaggtggttcactgatagaaaactgttataacagttttataatagaaacagttgaaatagaaaacagttgaaaatgtctgtattgcttgctgttttaagtgatactaaaagatagtatgcttcgaattttgggagagttgcttttacatatcctctttgggttttcctaggatgtttttgttcatcgtaaagcatcactaggttgatcttctaccagatgtactgagcctttctttgttgttttaaatgttggtgacagataatccttaatgggtagtgttcacacaggactctttcagaacaatttatttttccagcactaaaatcttctttgactttaaagtgacctgtgaaagatttagtttccgactcaacaattaattttgcattacataaatatttcatttgaagtttcaaaatgctcgcctttatttttggtgacaggtatgattgtcactaaaactttcagatttgtgacattcataggatttaatatactgcattttttgtcaaaaagtatttaatctccttttatcacattacttttgtcagtgaatcaagtgatttggtcttggctgggtgcggtggctcacacttgtattcccagcactttgggaggccaaggtaggtggttcacttgaggccagctgggtgtggtggtgcacacctttaatcccagctactggggaggctgaggcacaagaatcgcttgaacccaagaagtggaggttgcagtgagccaacattgggccctgtactacagcccgggcgacagagcaagactctgtctcaaaaaaaacaaacaaaaaattgatttggtctttttaaatttgaatctaacttccacattttttcttttacacttacataaattcttagcactccgatcaattcctttgtttggggtttcatattttcagttttgtgagctttgtttaatatgaaaacagtatgaaacctagtggtatcacaagttcgtgaacagcaggagcgataagtcacttaaaatatgaagctcatgaggttgtgttgattatttttcaattctctaatctttttctagatgacctgccgctcttcttaaggtaacaacagggtgtgggagaattgatacatgaatactcttgaattgacagataagtacacttggctttggtgatgttaacatagctctgtgcgcacccctttcactaccatgaccatcacccattaccaccatctcctgaagcaaaaacaaatcttaaagattgtgaatgtgaagacattgcatgcttttaaaagtcacttagtttaagagaaagaagtatcacctggcattattgcctagagctctgtcgttcacgtagattgcactggtatgtgtagagcaaagggccggggcttcaatgcagcaggctggctgcaggttgtatgccctgtcaatgagtatttgttgattgttgactgcatatttatatgtaattataaaatctagatctacttagaatatgatccatacatgatttattaaaaatttcagcttaatattcatgctaacatatttaattactgattttaaaatgaaatattaaaaaaattatagtataacccctttataaggatgcctattatactctactttttttataacgtactccattgttacacttctttatggaaaggagtaagtgaaaaataaggcgatcccagttattaactgtcttctccattccacttacaacactcagtagcaggtacagacgtgatgatgattccagagcattatatgagtctgactccaaggaagattagagatgcattcactgtataccattttaccatgcatttactgtactgtgctcactaatggattacaggagagaacctatttacaatactattgtcaagaaaaactgttttaattaatgttaagcaaaaaattagattgtgtatataatacttaaatatagatagtactggttatttttttaaactttctttaatatcctttatgaaatagaaggtctgatggtattggtcaaatggtacaaagtttcaggatgaaatgacacttaatgtaccaattggggcaatagttacaataatgtagtgtatgcatgaaattggctaagaggatagatcttaaataaacacacacacacacgcacacacccacacacgtccccccacccactgcacatggtaactgtgtagaggtgagagatatgttaaagtaagtctggtgaaagattttaattatgtcatttcaacagttccttaggaactaaaaaatacaacatatgcaatccttgtgtttgttactacttttcagtctgaccaaatgagctttttttgctgttaaaaagaaaaaaaatgtggcacatacacacaatggaatactatgcagccataaaaaatgatgagttcatgtcctttgtagggacatggatgaaactggaaaccatcattctcagcaaactatcgcaaggacaaaaaaccaaacactgcatgttctcactcatgggtgggaattgaacaatgagaacacatggacacaggaagggggacatcacacactggggactgtcctcgggtgggggcagtggagagggatagccttaggagatatacctaatgctaaatgacacgttaatgggtgcagcacaccaacatggcacatgtatacatatgtaacaaacctgcacgttgtgcacatgtaccctaaaacttaaagtataataataataaaatttaaaaaaaagtagaggaaaactttttatggtgttttgttaaacgaagcactattaacttaatcaaaacaagaacgaggatcaaattaaatctattttatgctacctgacccacctacatcgctcaagaaaaccactgctcattttaaaacatatgaacttctgctacaactcaccccaagggtactgtttactgttgccagagaaggaagcagctttgtcatcaatctatgcctgtggtttggaccttcctccctggtggggttcacgatttttattacttttttctcctctttgttcataatgtcttaatctagttagaagttttctaattggtagagtggtgatggtagtgtcttttacagtatagctttaagataattcacatgagtgactaacagtttctggctcattctagatggccccaaattgttaacagcttttgtcattttcccttaaaaactattggagtaaattcatccttttaaggatgtacaattgagttatctactatattcttttctatatacattttctgataaaaagctttttaaatttctccagaaaagttaataatttttaaaattatgtaatataaagaattcctagattgttctaaattagacattggatatgcgtttttcctgacagtatatcaactaattttatagagttacgttggaagtatgtgaaatgatacccctgtgttcatgctggaccactttgtgtatgtgtttgtatctgcgtgtgtgtgtgtgtgtgtgtgtgtgtgcacatgtatcttctaatcctaaagtgaaaaatttatccattgttttgcttcatgatgaaaaagttatttttggagaaagggttcttaaccttcatttcatagataaagtggtttgtagatggcttcttggggtctggtgaatattttgaaattatattctattgtgtgaacactgagagtgtatataattttagattgtacagatatataattttctgatttgaccatccatagctttcatcagattctcaaaactttctcaagccattggtttaaaaggatcaaacgtaactttggtttttaagtagttggttcagaagtttaacatacttgaggaattttgaaggctagttttataattggagcaattataaaggaacagaggattatagacattatttagcaaatcatgttaaggtttgtttttgtctcaaaactttcttcatcattatattcttctgtctgggtcatccttactggcatgctctttatcataatggtgctactatattgtactgccgtaccacaccagaatatcagttctaaacattacctttcaaaccccacatccagcacagaaaaaggccatctaaaaaaagttttcatcttggaattgtggtgaggaggggaattgtgaagagaaaaatatcaaatttgttaatgattagtatacacgtttttcccaagtcaagccaagaaaatggcattttatttttaaaacaatatttgacttttgacttcagaaaggaaaaaataatttcttcatgtatatgatacttttttgaagttgctagttttatttcagggatctcatatatcatggtgaattaattccaagtatgaatttaatataactctattccatagaaacagattttatgacacggtaatcagttgctggtgtctttttgtagaatatgggggatctcagtcagttcttaacacagtggccttcagtaagcaatggtagttcagaaaccaacccttacattaccctttttatccaccaaattttatttgtaaatatgtttgcaggtgaaatataaacttttttcttaggcagtttagccagtcagcaaatatttattgaatgtctattatgtgtgaggcactgtgctatgtgttaggagatacagtagttaaaacaaacaaatgaactaaaccaaaccaaaacaacaacaacaaaaaaaacaagaaacaaacagaagctttggcaaaaaaagtgattttattaattaaattatgcgcagatactttaaaaactaagtaatcaaataattaaatgaatatatgtgtgaaaattgaattcattgtgagggatatgaaatgtgtactttaatgaagattcagtttttcatatttttaaccctcatcagtgaacacatttggaatgatctcttgtcttctctaagttaatatgaaatttaccactttttaagagtatcaaattcgggaacggtatttataatctgaagtagaattaatgttaaccctactgattcaagcagtggagtgaagccagaatccagcaaatcattaataattggtaaagatgtctcttacttcattggtaatattagaaacaccccacaaataacccactgaaaagcagtaaaactgttattggatcatattagttattaaagttattaggattgttactgtttttgttgttttacctattttaagataaagtactgtaaatataacagctattgccaagtttacgaaaacaaagaaaaagttacactcagtgggctgagttgaataaagaggcaataggaaaatatacacttgtgaattaatcacacaaacatccaggttgaaaattttcctggagtagtgtaatatagtggaaagaaaatagtatttagactcaaaagatttgtattgaaggtttatgttgtcattaggaaaattatagtgtccagtttttctggggatattcacagtttatgtctgtttgtctgacataattaataacatcactctcttttattctcaaaaatgtattgtttagacaagatattatatgatgacccttatttattgtgacaactaattctgttttcataataattaagtgtgcatgatacaattagtttttatttgttgttttagctggtaaaaacttatgtatgagaaggttttttgtaatcggaaaatcattgtaagaactataaagagatacataggccggttgtggtggctcaggcctataatccaagtactttgggaggctgaggtggatggatcatgaggtcaggagttcaagaccagcctggccaagatggtgataccccgtctctactaaaactacaaaaattggccaggcgcggtggcaggtgcctgtaatcccagctactacagaggttgaggcaggagaattgcttgaacccaggcagcagaggttgcagtgagcagagactacactcagcctgggtgaccaaaaaaaaaaaaagagagagagataaagatgtttgtattcatttgggcaaagtgattaaggtgactataaaatagagtagttttatttttatcatatcactcttaaacaattaacattggtgttttttggattatttgtgtaatgtccattctctgaaagtgtgttgtgttgaaatcaactcacagaccatggcaacaagcaatattaaaactttgactttgcctttgataagagatatatttcattgaattaaaattcaatgggtttactaaactgagaaaatggaagaattattttgtagtttcatcagtgttcaattttgaatgttcttcagtttattctctttatcatcttcaagaggtacctcatgcctttctattagctttgaaaatgaaaataattttattatttctgtaagtcattatcagcagtcacagatgttaatgttcttccctattaatttgatcttaagtgtgcaattgtcaaacacttctgtgcagctctattcatgaatcctgttttatttcagaggatttattttatttctataaaatggttgcacctttgcttttaaaatttcttcctggaaagctattggaggatttgtattaatttgaaacaaaagaaaacaaaaccaatttttacactagcaaatgaatttctaacttcaaggtccctttatcaatagcaagaagaaacttattctgcctaaatctgagaagtctttaactcaccatcgggaggactacaaaaccttggcaagcaagagtcaccttaccatatggaacttttaaatatgtagtttctgggacaagatattaagggataataattgctactttgcagggttactaaaagcattaaaagataatgtatatgaaagtatctggctagtaacctgcaattttgagtagatactcaatagctattagttgagttaatgagcaagatctgggaagaatgaagagtcaagggaataaataatgctctttcttttattccaaataatgctctttcttttatttttttctatgccagccaagacccgctcccttaaagattagtacaaatgtccatgaataaaagttcattgactgactcagatagtcatttttacaagcttatgtgtctttccaatccttcaaatttttttaacttccaaaatctgaaattgaagattctgaaccacctagattaggatttgaggtcaccaaaagactcaattttactatctccatctactggcaggtaggaactatatccaagcatctggactggcatagaaaagaggagaaagaacatttaaaaggtaagcaaaacgtatatttttatttactctgagtttttaagcttttcttatcagaaactgttgtactttcatgtaattaagcttgatacaatgaaccatattagagcaagagaatttgtttaggtagtacaatactcttatctgattcttcaacatgagcaagtgtgaatgtgaatgccttcctttcataatgggagtactttctgtctttgcacttagtaagtttccatgtagtcattccaatgccctcttactgttttcactcatactcctaataatctttaaaccgcaaaaatgtctacattcccacttctgtatattctctgacatgttagagatagttttacctggcaaattatttttattaccatcatttagaaagagtagaagtatgtttctcaaagttgaatttattattctgttgtttcttatattttttcattgtctgtttataattattttaattgggcagaaagaactaaataagtttcctgttaattgaccagtaataattacatcagttctttttaaaattgatactttgcttttccctcaaaaatcttgaaatttccttggtttacttttcactatgatcaaaagttgcagtatgataactgctataaaaaatgctttgagggtttatgtggttgtgcagtaatagatctttaagtttaaatcatatattttaaatagtttcatattttaagtcttacattatgcattatgcatatctttctttaaaaagccatatctacacttgagaaaagaagtaaaagacatttgtcaagataattagtattattactattgctgcaattaaataagtataatttgtgcatttttttttcccaattagttttctcctccgcgccccgtgtcaggtgtttgttcatatctttgctttctttctttagatagtggtacatttcttttagagggatagatggatttataaggaacatagtggagaattttcaactacagaattagatttcatggaaaagaattgtcaaggaaatggtattccaacatgtctgttcacttgctcgaaggtcgtgaatgcagccggtccatttgctgggtaggggattacactcacataaacagtgcaaatgccataaaggaggacactcagatcttcttgtggcatctgacaatgtccagtctgacagataactcttcaaagttggccctgagatcagaagacaaggaagtaggtatttttcaataatgttgaaggaactagtgataatggggtgttagagaataatctcaccttgctaacagaattttggtgagcctcataaagtcagttcagtctctattttgaataaaagcatatgtcttctcaaatttattccattctgtctcaactcctcttttagtaccactgtcccttgatcttcagatcagtttgaaagctgttgtcataaagctagctgttgctgaagaattttgctagttgttacagtcaagccaattctagaataaaggatacttaaaatcttcatgtttaagcttttcactctttttttttataggccagctagatgataaaaataatgtgcactgaggtggaataacagcacaattgggtattctcattggtattaaaaatgtctttgctttgagaaataaaatttaagcaacccgtcttcccacaaactatccaagctttcttattaatttatggttttaatttctttaaaaacctaatgtttatatttttcgtatttttacatcactttaagattgacaaaaattgttacaggttgggagtgtggggtagggaggtaatttttctagcagggctgaatggataggatgttcacgagcatattttgtttaaacttagcctttgaggggcaatcatgtcctaggataattgccctttatttatacctgatagagttatgtggaattactgctgaaaccaaacatcttgctacaaatataacttccaaatttcaaatatcatgtatgcaattgtaaacactttagcacttattgacattatttaatcacataagatagaaggacatgatttgtatagaagtgaccaaatttagtatttttcttgccctcaattagcattcctaagaaaatcataggttcatcatgtatacattatatacattcacttttgaagctaaaatgctaaatggaacaggaagcagtaaactcattttcagcattaatatattaatctgaatatagtaagactaaaatgaatatgtttctattttcttattttttaaaattcatttgttttgctcaattcagagcttaaaaagagaattttaagtatcttttaaatattcattaaaagcataaactgatgggcttatttgcattttttctatgaaatagtaaatttgttttggttatctttttgttgttactttcattggtaaattttaaacatcttcctgtcaaaatgtcagtactttatctagatgttgtatgctcacaaagtaataggtagctactttccatattttaaattgcttgtaaattctgctctgaatgttgtaaattatatgtccaacacaggtagaaaattaacagatgcttaatctccaaaacagatgaaattctttattgaaaatattttccttaaagttgtttgtttaaaggatatataatgtgaatttgtggttaaccacgttagccagtttttgccacaacagtattattaggtgtaaatgtattattctgcttcaaatattttagagtgcctaatattttatgtgaactttctaattttaattcaataagagagttgattacatatttaaaaaatcaatagtgaacctttaaggtgaatgcttcttttgtaatatgaattactcctaattttttttcttccacattctggttttggtctctttaatgtacaatttaacagagtaaaaaacttatagtattgccaaacatgtttcactaagtggggtgtgcaattgtgtgtgtatgcaattatattcattactaattggtatgtaataaaggctttgaggagattctgtgtgtatatacttggccatttatcctatttcataataggtaagaagattattgcttatttttcttccataattgagccttcattttaaaacgtcatatcccattgtatagaacaaaaataagattattttttaccattaccttaaggcaaaaatgccatgttgtcaaatcattaacatttctatatcacatgcttcagtgccagaaaaattttatagatcctctctgctgagtcttttatgatgcaaattgggatattttcaagggcagaaatagtggcacgcataataataatcgcaccaggataacagacttaaataaggctattccaggtaaacccaaacatatattcactgtataattattttggctgtaagtatagaaagttctaactcttattggcttaataataaaagttgtttatttattcacaacactgagaaacctagagttgcagtgattttattgtgttatttgagatcggatctagctgcatttttcaatactaccgtacatctgcccacttttgtgcatcaactttttcattaggctagaatccattatgatggctaaatgggtgcaggagttcgaaatctcacttccatacccgaaattgtcttgtccccaacttttcggaaaaagccattgtatttactctgattggcctatctgaatgggcttatattgattttctaggaatacttctggctagggtcagttcgacctttattcagtggctacttcattgtggtgttgagggatgatgagaagatgctcgctatattaacattccttcattgcatgtggaagctttgttgtgtacttcctgaacacaggcccccatttcttaccaaagctcatggacaagaggctggtggttgagttcctgtacttcttattagattcatgagaacttcaaagtgttttttaaagacagcatcaagtcaaagaaatggtaaaatttctacaaagttgctccttttcctccttctttaattaagctgtagaagtaaatcagaaatttgaaatcactatctaaaaatcactgcttcttgcttaatcaatttgatgttcgtaaaatcagaaggcttatacagatgaccaatgatgtgttatatcttacatatgtcttctttttgatgacatcaggaaacctagtatgtgtgggtaaattttctctcttattctatttgagttaaacagaatatgatggccagtgttcttccatttacttatatactgattagtaattcttttatacaaatatcatttcatttgaactttaaatcaacctgtgattatctccagtttatcaaaaaaaaaaaaccctcagatatcaagtggcttgcctaaaataacagattttattatcaaatagatcatattttacagtttagataaaataatgactacaactgtggcattcccaaggtgtggtacattataaaatgtgttctattttcaaaataagtaggtatattaagaaaatggcagatctcaataatgcatactctaagtcctatcactttctgctgaaatatgtttgtaggttattacggatgaactttgagtaagacatcaaatgtaaactaagggactttattagggtctataaattgtaaatcatattatctttatcatatacagcgtctggaagttcaggagtgaaggatgaattgttgaagtgatatgtaaaattgttttctgccacgtttgtataatctcaagtttctttagagtatcaataggtattaggtgctgccatgtgccaggaacaggttatgggcttcagtaaatacagctgaccttctaggaattgtagtgtggtagaaaagtgaatccataattatgattaaaatattcactcctaaagggagtgtacaccaggaatcagctattgccttccaaaagaggtaacatctgaaactggctcgtttactagtatagctggtccaggaatgaaaccaaattacaaccctagaggttatcgcatgaagaggacaggactttatttttaagcacctgtagaagtacttgaaacataataggttctcattatataatttttggttatttcttaacttcaggaataaagtgattaactgtcttctgggataagctcaggagccacaactggacatattctaaataattgtagtagttccgtggtttactgaatatagcaatcactttttttacttttccttagtgaatatttatttgtgtaattggaatagttggaggtaaccaacactagctttgttgttttattgtgctatttgtcttaaagatatgggaaatgatgataaagcagaaactagagtctcttttccctctagcccatcattatacttttatattaatagaatttaaaatattaagcatgtaaatggagtaattctatatagtttgcaattgatggagagagatttgtttgctctgtggacctcaagtataccttctctctacagaatcaaataagattaggatgaaattactctgcatttcctaggcaaaaacacaccagctcatggagccagtgaaactatatgtgtatatatgtcaatgattttaactaacagttgttaaaagtgaattttgttagttgagaattaaggagattgaaagcagatgcagaaatagctatatccacaaactagcaacattaggatgtagaaaaattatcacaggtgaaaaaaacagtgagcatagcaaagcacaaattaaatgggtgaatgtgtgtattatcaatttatagagtgagaatggggaatacatgcatctcactctaagagaaatgcatttttacatagtttgaaaataacacatatttgcaagcaaatacatccaaaatgtcacaggacatccgtgaggccgatctgtttactggtgacatgttgctacagtcgtgcctacatgaaacagaggagcagaatccacaactgccaaactaaaccaagattcaagacctacttctttctacctaattttaatctaccatttcttttctgctaaaatcaacttaaaacattagcataaagacatggatgatttttaggagttgcatattatccagaaacttcctcgttagtgttatctttattaataatgtagcattttgaaggattataatttgaattgcattttatgattctcttactaccaccttctttcacccataataaatatttttttaaaggaaccaagagtatgtaatgcatggtaaacattatagaattgctttgattttaagtgctaaactgactacttacagatatatagtgattctatataactgaattgtatatatacacatatagtcaacagttttacagtatttacattattagtctctcttcttttccttttttaaattttttattcattttagtttccagtacctctaccttaagaggagttgggtatggtaatctgaaattgtctataatttttaaaatgtagtatttatacatattttcatttttcatgtcaagctcgttatctaagatatacaagattgattcttgttaagtgtgcaaggatcatgtgataaatattttagtgatttgactataaactttttttttgtttggtaatttgagtatactgtctgttggatataggaaaagcaaatgttcaataaaatattctcaagtgggtacttttctcatccctaaaatactagtaaagttatatgttcaaaaaaatgactgttaaaacaacagaatataagcacagtgtcttaatttggtaaacttaatgtttgttgcttctttttctttcttcttctgattataggcctagttgcttgagatttacataaaactttgacagtcatctgcaaatcataagtgtttggtggcaaacctccttgcatttcaaggtgaattttttgggagcagtaatttaacttaaaagaaaatttacaatttttttttaaccacaaataaggcccagattttcagtctttaaattatgtttaaatatagtccaatttaatagtgaattataaaggaaaaaatgtaaacacaaacttaagtatatatattttagccatgcgctttatgactgaagatataaaaatagaattcagatcttttaatagctatgtagttttctcaattatatgccacacactgctatatttgtaatgagtgccttggataaaaggcatttgttttgaagcaaaatagggtagatgctaggttttaataaatctgatgggaaaaaataattcattgagaatactagttgccaaaatgagaaggattatttttataaattactataagtacctctgaaatatgtagattatcggaagaaactttggacaatagggagaaactcatttttgaaagaaatatttgaaaatagttaatgaatttacttttcaagagtttatgattattactttctttttaatgttttgcttttttatttttgaggcaaggtcttgctctgtcaccaaggctggagtgcagtggtgccatcacagctcactgcagcctcaacctcctgggcttaagcgatccttccacttcagcctcccaagtagctgggactgaaggcacatgccaccatgtccagctaatttttgttattttttctagagacaaggtttcaccatgttgcccaagctggtctcaaactcttgagcttaagggatccacctgccttgatctcccaaaatgctgggattacagacaggagccacagtgcctgggccgagcattattttcttaataaaatttgtctatgtggagaattcatctaactttatagttccttctgtattcttaggagatacactggtgctaaataatatgcgtagaaaaggcgttaattattttatatatattattacagccaatagcagtatcaaatattagcatctattaagaggaaacatgttctgtatagggtgcttactgctgaggaaaaattttagcactgagaagattggtagcattcagttatttaattatatctcataaataaaaacgttacaattatttggggtagtttaggattaaacaggttgtcctttaaccttagtcatagtctaactaatatacaacccttcacattgtgtctttcaggaagtttcctagagcaacattcttaaattgtattttattaatgtgaaataatgttaacatattttgattaacataaatactaaatgaaaagtagctgcagttactgcaattagtgctgacaattgtgagcaaaaagaaatacccataattcaaacagctttgtgtgcgatagaaggtgtattagttttctaatattatgtaagaaatttctacaaatttagcagtttaaaatatcctttatcaacttcagttctgtcagttaggattccaggcaccacgtgactgaattcttgttcagggtcttagaagattcagatgaaggtgtccaccagactagactcctttctggaggctgtagagaacagtctgcttccaagctgaccagggtcctcaatctttcagaactgagttgttcatttccttgctggctgtcatccttagactgttctcagcttctagaggcttcccacatccattggcacatggcttcctgcattttcaaagccagaaataaagaatcaccctcctgttgaagtatctctcacactttgaaatttctctgggtttaggaaggacccagtttatcttgtgggctcacttgataaagttagacccacccaaatatgattaactcaaagtcaactaacctaatcatgggagtaatatcccattagatttcacacactcgaggagaggattatgaaaggatgagggacaattggagatcattttagaattctacctatcataaaggaagtgagatcactagtgcgaagataaaagaagatacagactttaagatattgagtagagagacagagaataggttggtggaaagggacttaggtttctggaagtaaaataaatgaagaagaggaaatggcagaaagctataataccaagacaaaaggaagaaagaagaaacatgtagggtttaatctgaaatgtcgtcatttcataggacttagtaaactctgttacacagcttgatggcacatatccaaaaggcagtgaatacaatgatacttaccttattttggagagtaatctctccatgatgttactgcaaatacagtgttcagtgttgtgcagcatatctccaaattatgaataccaatgaggcattgctaaagactgttgtgatattatgagtatataaaagttgcactatataattgtcagatatcctaccatgcatatcacttcatgtgttcaatgtccagtctaaggcttttactttttttaaaataaaatagtattagaaattcaataagggatatttaaaagtttttgttgttgttgctgttgttgttgtttttctcattggaagttagcatccttacacggatttttttttttttttttttttttttttgagatggagtctcattctgtcgcccaggctggagtgcagtggcgggatctcccctcactgcaagctccgccttctgggttcacaccattctcctgcctcagcctccggagtagcagggactacaggcgcccgcccctgcaccccgctaattttttgtatttttagtagagacgggatttcaccgtggtctcgatctcctgacctcgtgatccacccgcctcggcctcccaaagtgctgggattacaggcgtgagccaccgcgatggtccttacatggatttttatggcctggagcctataactagcctagttcttacattttttggagtggttcaatgactgcttattttataacttatcaattgtgggtttcgtctcattattaactctcaactggttgggtataggaatacttcctttctcagcagtgccaacttgccctttctctcaattctctccccaacattttaataaaaaggaggagagatattattaacagtatattttagcatttcataaatgtgaaaaggtaccttgcctaataaacttggaagccattttgtactatactctgcccttggagatttagaattcatatttgtgtattcatgcattgagaagtgctgcaacattttttatattttaatattttcatgtactgctaatagatcccttataacaagaaattgagaccattattttgatcttgctttacttttcagagtcatttaagatttaggttatttagtaattccagttcacgtgaagctctgaacttgtattgcataccttttttgtttttcccagaagttatgggtccaaataatgagctgttattaagaacattttgccagctcaattcctaaagcaatggtaataaaaagaggtaagaagctgtaaatagtgtgtcgtatggtatgctaattgacatttcaaagatcagtgagaaaagctgaaaacagtcttttctacctatccacttctgcctcttttatcctcacatttcactttcttcaaatatcttaatacccttcttattttgccatatataaaattaatgcaaatctttgaataattagttgactgtagctctgcagctttaagttagagaattaaaatcattatttgtattttttaaaatagaattatatctagtgtatttttattctaaaatgtctcatatttgataacttctcagaaatttgaatgttaactcagctttattgtgattttaggactccaaaagagtttgtagttgacgtttcagtaattaaattccttaaaagagtaatttgctatgttccttcaagtataaatatgaaacaggtttttattcaataatgataaaataatcttttttctggatcagttctggaaagagtggtatttggcatatatcatataaaacacactcagcacttgtctgaggtaaagtgtgaataataaacacttgctttgatacctataatttttgaaatctaaatgtatgtctatgtctatgttttttgctttaggagtacaagatcctcagcatgagagaattattactgtgtctactaatggaagtattcacagcccaaggtttcctcatacttatccaagaaatacggtcttggtatggagattagtagcagtagaggaaaatgtatggatacaacttacgtttgatgaaagatttgggcttgaagacccagaagatgacatatgcaagtaagtgatcatacttgaaatcccaacaatgtaacaactgttaaaagtctttcaaattgcttaattttgatgatctgattttaaatgacatcttttgttttatttttctgatgatctaagaaatttccagccttattgaagctatgttttatttgaagtcttcatttaaaatcggaagacacattgtgcatacaaagtcattgttttctacctacttctaaaattatttaatataatttatggtaaaaaagcatacatggaataaaaccatttaaaataaggattagagaatacaaagctgtataaaggactgtagttgtgctagaaaaccaaagttgcggttactgctaaaaatcttatatttgaccttcctcatagccaaatcaataaaataaatgataagctactgaaagaaaaagttctatccacaggtacatattacctggatacatacccatgcacaggactaagaagtttgaatattacatcacaaagaagaaatatagttcagaaagcagcattagatatttaggctaacgttatgccttgccaggtaggaattcgtcataattatcctagaagcattcatgaaccaaagtcagctggagtatttcacccacgcaaaagaccacctactgtatgtcacacaaatattactctgtaaatcccatatgaatacacttgtcaaggttgggtggtcttactgaagatttttcacttcaatgacatttgtataacatgaaaatattttacttgaacttcactggattttttattttctctttgatatacaagttaaaagagaattttcatctcatggtatattacagataaatatttcagtacaaatgaaataaactttgtacttgctgtcatcacagtttttatctttagcacttacatagttacatattcttcacatttgttctttctgtgactgtgcatttcatgttgttgtttttccttacatctataattttagactttgagaactagaagctaccctgattatctttagaagactaccagaggagtaaagcagatgccctagatctcgttcagatttggtacctaaacaaatgctaaacccatttttcctaacacctatttaggcagtttttcatcatgctgtactgcacctcttgtctttttttatatataaacataatcttgtcaaaaattgcaaggggtgtaagattttgccctacttgcaaagtagtaagtaatcctatcccttttgtggatgctaatgaagacaggagacttctgggtcagagacaaaggacttcattacaaaagtagcagtcactggagtattattagcactttcttgtgctttctcctagagttccagttcccacaggttaacaccaagagagccatgtgacaccagctacccatattccttcctgattacaccttcttgtcactgcaaatataatcattgtcctaaattttgttactcattctcctgattttctctataatttcataagaagtacatatttctctatgtgtgatcttacaaaaatagttaattccttggctgttttgaaatatgtatcaatggagtaataccatgtgctttcttttatgatttaacatatgtttcagaacaagcaaaactaaaaaaattatgctttaaaaattagttcatattgaggcagatagcttattagatcatttgttgtctttgacgtataatatttcatcatagaaataatcaaccttttttgtgtcttctgctttgaggaacgtttgacttgtttccagttctccttgtgcaaaagagcaataaaactttgagactttctgacaatggtttcagtgttttaagacatttatattttcagctttactaggtagagttaaattgttttttcaaaattatcagtttatacatttcccaacaatatacaaaaatttttgttgcacagcattctcaccaacttctgatctgtcttttaaaaaattgtaatatgggtaagtgtgaaattgtaccttatcattggttttattttgtttttctgattactaataaggttgagaaatttttatatttattatcagccattcatattacctttttatcatgcctgcttatgtcttttgctccttttgtattgatctgtttggctatttaaattttgcctttaatttttctttatttatctggaatttatttatgttggtggtatgaggtttttcaggagggtatccaatagtatgccagcatcatttattgaatagtcattgttttccccagtgaaatgcaaagtcagctgacttgcagatcgggtttctatatgtagtctgctctgtttcttctgttactttggtcaattttgtttttcttaaatgaatgacactgtcttaactgctgtagcattctagaagctttgtgataagcaaatctcaccttattttattcccattttggagcattgtggatgttttgctttttagtataaaaataggtataaaaaatgttgtaaagatagtacagagagttttgtatacttttaacccaggttcctccaatgttagcatcctacatactttggcatatttgcataactaagaaatcaatattcatacagtattattaactaaactacaggtcttatttggatgtcagcagtttttccagtttgtcaccttttctgtttcaggatctttttcagattaaactcattgcatttagttgtaatgtctcgttagtcacctagaatctctgactgtttctctttccttgtgtctcatgactagacagttttgaagagtacggtcaggtattttgtagaatgtccccccagtttagattgttcacatgttttgtcatgcttacactgagattataagttttggggaagaattccaaataggtgatatgcccttatcatatcaggaggtacatacaaccagccttacttattagtgatgatgttagctttgatcacttacgtatggtggtatctgctgggcttctgctctgctacggtaatatatttttctttcatattctattatttggatgtatgtagctaattctagcccacactcaaggagatactgattacactccacctcctaaagggtatatgcatatattatttggaattcttcagcaaagaaggtttgtctgtccttccttttttcatttcttccttctgtcatttatattagtaaaaattaataatatttattttattatttgtgttataagcaaaatctatcattattaactttcttgctgaaattgttctgtctgcagccgttgggactaaaggatttgctcttaacatgtcaatattgagtatgatggttgatgaaggtttatgttttgttttccttcaatttactttttcatttgaagtgctttccttcgtttttattttgctaagaggcattttccccttagggaaaatatctttattattcttttcttttggatttaaaagtaagctgccaacattatgacactttgtacccactgtgtgttgtttaagaacaaggatatttcccatcgaacattagtagcagtatcaagtgaaataaatttaacattaatatgaaactcttacccagtgtttcccatcatccccaaatgttttttaatcattttttcatctttttgatctaataaaacattataattgcatttggttattgtaactctttcgtcttctttagtctggaagagtcttcttgtcttttcttacctttcatgacattggtcaggaattttgaacaattcctgaccattctacagactgtctctcaatattaatttatctgaatatttcttcataattagatctctcaatattaatttatctgcatatttcttcataattaggtcctgcttaaatatattggccagaatgctctttgtaagtatttctgattgcttataatgtcactttcttgcattatcagtgacatgagtttgatgactatccaccagatttctctgttgtggatgtgctttgtttttccacattgtaattaatgtgatttatggggatatacttcaaaaacatgcaaatcttgttctgtggcagtctatcacccaatttttttagcatccatttatgagtccacttttaaagacagttattcattttatgttttctaggcatttttttgaagttttcagttttattgtcattagtattttcacaatgtgtccttattagattttaatttctgctgcatctttatgtcttttgttttattactaatattgttttgtgctccctcctcttcattttgctttgcttttctgtttcctcacttagtcttgcctatgatttggtttattcattgttctttcaaagaaacaaattttggctctgttatgactgttaaagaataatgttttcaaaaggtaaaatttgacttctctgtagatattaagtaaacacatattaaatgttttatttaacttactaataaagtggtcaatcagatgttataaccagtttaataacaattcaaagaacagacacaattatagattgggaatatagaaataaatgtgcaaatggaggcaaaattggcctcttccacagtaagggagagaactccattaaacttccactggacatagtttatttatatgtctatagacaataattatttttatttgatataaatcatttataccttactgagttgtaaaatagttcaaaggcaataaaaggtgctgagctccgacagaattggaattagatagccaggagggaattattcaaagcagaaattatgaataattttccacaaagcacaactctttctccacatggctagcttctctctctgtatatatatatatttttaatttattttcttacattcattatgtcctttgttctcttctgttatgaagtactttctaacttctgaagttgaatgttattttaattgttttatttttaaattgttcatataaacttaataatttctttatagatattgtgtagaggcgccctgccaattttgataatgtggtattttattttcggtccagttcaagatttttacaatatctattgttctcttcttttaaagcatagattatatagaagcaatttttaaattttcatatatatatgagtttttaaaatgcagttacagatttctaagttgtgttttgaataaagaattaagttgtttgaaatttaataattgcttcatttgcttcagatatttagttttttcaaatattctttgttcaaagaatgcatgtttttgcagtagtgtatttatgttcctattacatcaatttttgcagttgtgcacagcatctgtatcttttctgatattttctttgtgatacatcaatttctgagacagttgcattaaattattttaatagaggttacatatatttgcaaatttcaccttgttggtctgttgaaagctttatatcatttaaaattatgttagttgatgcatacaatttcagaaatgtaatattctttattgttactaatcttttgttttagcctcaagaagtatattacgcctaatgttaatgtagcaaatcaagtaattttggttatttttgtccggcattctttccattcttttactttcaactttcttatgtccttgtttgtatgtgtccagtcatgttagtatgtgtgtctgtgtatgttatagttgtctctctagaaaggaacatgagtagcattaaaaaaattccaaagaaatcttcatattttcactgtggaatttaatctagtacgtggattgtttgtatggatattttggattctattctattacttcttttgtactcattttctgttgcttcagtttcctgtcttgcattcatttagcttgttttcttattccatttttcttttctactaatttagactgtacatcaatttctattttgaatgactactttagaagtgcacactgaacttaaaaatatctaaagccaatcaatgtttgccctatgccaaataatataactgagaacaatttaactaactaaatgctagcttctaagacaccatgacactatgttgagaaaacagagctgagtttatttgctttctgtggtgatggaaaattttacattgacagatttaatagtgaattggaggaagaaaagctaaactagattttgttaatttggagtttggtctaagatgaatttttcagtgtggggacttgattaggactgggcaagaatcaggatataatagtttagaagaagcagaaatagcaaggcaaggattttgaggacaggagttcagtagtattaggtagtaaactattgatgcttcagttgaaggagttaacagttcttttgggaagttcctataatgaacagtaaagttattgtccttggcaagaatctcctggagtctactgaagacaataaaatagataagttactgtaaacagtgaactggggagggtaggtggttttggtccttattgtccaagctggttttggttctcaccacagttactaccactcctgagaatatgtaactgggttttggactgtaattcacaatttcagtcttgttcatgatggcaggaaaaagacaggataaacaaacaaacaaaaaattcagtacctctttaagatatgttgtgggaaccctactataaagtcagctaagaacagttgcccggtgttgtggaagatgctatggttcctttctgtggtatgcctacctcagccgctggcaaggggaaggggaagcagattagcttaaagtgttcgttacatatccccaagacttgctttaggagcccatctgtgctggagcacatgcatggtggttactgtctcatcctgtttggactgctgtaacaaaccataaactgggtggcttataaagcacagaattttatttctcacagttctggatgctgggaaggccaagatcaaggcaccagcagattgtgtatctggcgatggaggaccagcttcctggttcaaagatgactgtcttctctctgtgtcttcccattgttaaatgggtgagggatctcttgtgggcctcttctataagactgctgatcccgttcatgacctaatcatctcccaaataccctaccttcaaataccatcaccttaggggttaggatttcacatatgagttttgcaaggacacaaacattcgaaccataccagtgacctaaacaaatcaccaaagctttaaggaagaagaggagggtgtgttgtagttgtgtaggcaaacatagtgtctgctacagtgctgtggctttaaataagaagtaatctaagtattgaagcatagaaagattagtcataatgaggagatatatgggaatgtaatgtatattgggccttgaagaataggcaagacatcagtagctgactagtacctaatggacactcacgaacagttactgaaaataaaataacaggtgggttacagataaatgagaactacaaatagtgttagactggagatagagaaaataatttgagaacaatgtgtttctctggagcctgagatgccttggaggtgtggtaagtggtgggtgtgtaatggtagagaggatcaaattgtgaagaaccttgactactaagctgagagatttgaacttccctttttaggctatcagaagaaatggttttgttgcagaacagggtcatgtactggtctatattttaggaagagaatgctgatagaagcatgcagagtatgttgaaggagggattgaaggcaatccctccttggagggattttgttatgttttagttggagatattttgttatttctcaaacacaaaactttagaggtatatattttctcagacttagagcttggctaatttttttttttctgcttgatggattaatagaaagcatgttgctctattaccactacttttttctttgttatcggtctgggtaggaatgggaatagggttgcctgtgcacttgtgtgcaaagaaaacctttaaatcgtcccagtgctttttatttgaaagatatattatcttttgccccagagcacaagctgtgggagaaacaaaatgaccaatttcaatattattgacattataaacatttatactgaagacaaaccaaagaataacttagagtgttaaatgtccattctgttatagaagagatggcctttctcttttttcttcgtgttgaacagggaaattttacatgggacctgagaagaggagacaccaatattgcatcagatctagaaataatcataccattctgctagagatatgccataataaaataagtttcctgaataggtaaaggcttacattgaaacatatagggattcatacaaggaagtgttaatttaagactcttttatcaaatgaccacagatagttagctagtgtattagtccattctcatggtgctatagtgaactgcctgaggccaggtgtggtggctcatgcctgtaatcctagcactttgggagaccaagataggtggctcaccagaggtcaggagattgagaccagcttggccagtttggtaaaaccctgtctctaccaaaaaaagaaaatgagctgggcatggtggcacgtgcttgtaatctcagttacttgggaggctgaagtgggagaattgcttgaacctgggaggtggaggttgcagtgagccaagattgtgccactgcactccagcctgggtgacagagttagatcctgtcaaaaattaaaaaaaaaaaaaaaaactgcctgagactgggtaatttgtaaaggaaaaaggtttaatttactcagttccacagggctggagaggcttcaggaaacttacaatcatggtggaaggggaagcaaacacatccttcttcacatgtcagcaggaaggagaagtgctgagcaaaagaaggagaagccccttataaaaccatcagatcttgtgataacccactcactatcatgagaacagcatgagggcaaccacccccatgatccaattacctcccatccggtcactcccatgacgtgtggggattatgggaactacaattcaagatgtgatttgggtgaggacacagccaaattatatcattcctccccagcccccctcccaaatctcatgtcctcacatttcaaaacacagtcatcactttccaacagtcccccaaaatcttaactctttcaagtattaacccaaaagtccaagtccaaagtctcatttgagacaaggcaagtcccttctgcctatgagcctgtaaaatcaaaagcaagttagttacttcctagatacaatgggggtacaggcattgattaaatacacccattccaaatgggagaaattggcttaaacataggggctatagcatgtaacatgtaatataacatgtaagtccaaaatcccgtggggcagtcaaatcgtaaagttccaaaatgaacccctttgagtccatgtctcactttccgatcatgctgatgcaagacgtgaactcgcatggccttgggcagctctgcccctgtggctttgcagggtacagccccactctcagctgctctcaaaggctagcattgagtttctgtggcttttccaggtgcacagtgcaagctgttgatggacctacaattctggggtctggaggacagtggccctcttctcacagctccactaggcagtgccccagtggggactttctgtaggggattcaactccacatttcccttctgcattgccctagcaaaggttctccatgagggctccacccctgcaggagacttctgcctggagataccagtgtttccatagatcctctaaagtctaagtggagattcccaaacctcaattcttgttttctgtgcacccacaggaccaacactacatagaagctaccaaggcttggggcttacactctctaaagcaacagcctgagctgtacctttaccccttttagccatggctggagctgctgggattcagggcactaagtccctaggctgcacacagcatggagaccctgggcctgacccataaaaccatttttccctcctaggcctccatgcctgtgatgggagggctgctgcgaaggtctgtgacattccctggagacatttttcccattgtcttggtgattagcatttggctccttgttacttatgcaaattgctgtagctggcttgaatttctcttcagaaagtaggtttttcttttctactgcattgtcaggctgcaaattttccaaactcttatgctctgtcacctcttgaatgctttgctgcttagaaatgttttccaccagatactctacataatctctctcaagttcaaagttccacacatctctagggcaggagcaaaaaaccgccagtctctttcctaaagtatagcaagagtgacctttaatccagttcccaacaagttccttatctccatctgagaccacctctgcctcgacctcattgtgcatatcactatcaacattttggtcaaagccgttcaacaagtctttaagaatttccacactttcccaaatcttcctgtcttctgagccctccaagtctcgaggaagtttcaaactttcccatattttcctgtcttcttctgatccctccaaatggttccagtttctgcctgttacccagttccgaaattggttccacatatttgggtatctttacagcagcaccccactactcccagtaccaatttactgtattagtccattctcacgcggctgtaaagaactgcccaagactgggtaatttataaaggaaagaagtttaattggctcacagttcagcagggctggggaggactcaggaaacttacaatcatggtggaaggggaagcaaacacatccttcttcacatgggggcaggaagaagtgcctagcaaaaggggaaaaagccccttataaaagcatcagatcttgtgagaactcactatcacaagaacagcatgagggtaactgccccatgttgggagaaaagctgagtgttgggagagaagctgaggcagggcttgcatatctgacataatgtaaaagagtcttggaacatgtctggggtccagggtctaaaacctcttgtggcctttggaatgtgtctagacttgctggctccttgcttctagcactgccattatctcaagtagccatatgtttcaaagaaaatgttaaaccgtcacagctttagctcagtcgcttaatacaccgcttcctttcaacccccacatcctcaccatctgtttctttgtttgatcaccaataaatagcatgggcttccagagctcagggccttcgcagcttccatactagcattggccccctggtcccactttatctcttaacttgtcttttctcattcctttgactcctccggactttgtagcccccatggcctggtgttgggtctgatcaccccaacagccccagtgattcaattaccttccacctgttccctctcacaacatatggagattatgggaactaaaattcaggatgatatttgggtgggaacacagccaaatcatatcagcaagtgattgtaactagtaaaaaaggaaatgtttagattatgatactgaagattttaggcatagactttatttagtatctaaaatgatgccatcaaatctcttttggtatttttctctgcctctgttgatttctctgttgatttttctctgcctgtatagatttgcattctactagttgacttcattctctatcaggctgtcctcataagatagcagagaaagtcatgaaagtgtcaaggtatttagcacttaaatgatctttgaaagagacaaaaagttttccgcaaaagctctaggaagaattgtgattggcctggtttggaccaagtatccatatgtgagccaattgccatagcaggaactaggaatatgtgttcctctgattggcaagatttgggttacatgcccaccctgagagccaactgttgtcctatgattggtggagaaatggcccctgaaagcaaaacattcctttttctttaggaggaggaagaggtgctggtggtacaaaaataaccatctctgctattggtgcttaggacagataagcattgacaggcagctttcaaatttagttactgtttttactacgcgcacttctggacacagaataaagttctctttagagtgaagattttgccaatgccctttccagcaactcttttgaatgtagttagcccagtggcataatttatagctttgttgtcctttgactctgtagcaattacttttgtaacttaaaaaaaaaaaatcattcccaagagggcttaaaatagagggtggggatctgaccaagtctgagatcaagggattctgctcttggctaatgagatgttttggttttatattttgaaatgttcaaaatcaacattccaagtagagaaagaaagtgtcctgtaactcccaacctcctgtctggctcaaccactgtctcactaaccctttacctattttcctgcctcttatcctctcctcttctattgtcaacacctccctctcttctctagctttctttctctagcttgtctgtttgatattgcacaaagatcacttccttgcatcaattagaagagtttatgctctatgagcatttgggggattttggaatgccattttttgtgtcatgcccttactttccataattgccttgataccactgaaataatgatgcagtcttttatttgagtcttccagttggcacaatggcttaaatatgaacaatttctagaaccaaagaaatattcatgttactatctggctagctagctagttatctattgtagcatttaccaggaaaaaaaaaagcaatggcaatagaacacaaattagcattattgttattattactgagacagagtctcactctgtcaccaggctgccgtgcagtggcacaatctcggctcactgcagcctccaactccctggttcaagggattctcctgcctcagcctcccaagtaggtgggattgcaggcatgtgccaccacgcctagcctagaacactaattattaaaaataaagtacttctaactgtataaatttaaaaatacactgtaataattctgttttggcctttcttgtctcaacctcatcaatgttttgtttagatatacctccagtattgaaatattaatatcatattcctatatgagctttcaaataacattttctgaaattcacctgaccttgttaattcttgacccttggagtactagattctgttcaggttccagctgtctttatggaacagcctcactcctaaagaagccaatctttaaataggctacctcttcaggcttttataatacaggcagattctgacttaaaatttattcctaactgactgattgattgtttttcattgttattttatttcccctctaaggattttgtcacaatgactaaaaaaaaatcttttacaaaaaaaatttattgttttcctatacagtaaagaaaggttaaattaacatttaacaaagtccttccaagttaaatgtaaagcaatttcattgcatttgattcacatgtgaaggtacagaatggaagtaaggacttccttcccaatttcatgtaggtcatacttacaccttcattttcagcagaagaaatgatatgaatattatatcctagtcagtgtttactgtaggtaaggcagcataactgtgagtctcaggaggatgattctttgaaggcagaggcaagtattatcattaaccaaaacttttggaaagaaaaaagaataagggttttcagttggtatatagactatttcttagaaatcaaggagaaagttattagattaaaatatgtaaagaaaaatttatgaaaagatcctcatttaaatgtaacttttttaagttaaatcaaggggaaaaccttaccttaatttagtgcaatgctctaaagcaggatttacatagttgtgagttgcctaccgattcactgaaacttgaatgttggtcatggcagatgctcatatcacccaccccctggcttaagaacaattggtgagacctctttgtattcaccaatattcatgcaaaggtgggaaatgaaggaggagaccagaggttcctgctcctgtggggtaaacttgtcctctgtgaactccagttcagagcactagattatgtcatactcctttttatgtagatatagaaatacggtcttgcctagaatactgtataccttcattaatttttatcaataacatgtttaggttatcagtacaccgaggtttatgttcctgttcccagtaattaaaatcccacaggagactctgaggagagaagattgttcttcatgcatcaaggtaaaatcctgaatgcatttttcagtacacaaagtattgggattactagtttggaaaatgaagagattttctccaggtgccatactgattgcttagattttttggtaggacaaattggcagcatatttacatgagggagttaaactgactggtaaaaacactggcgtgtgatgtttccagttcagttctatcacttactactaggaatatggccctggttaaattactttgcctattttgtcattgtgtgcttaaaatataataggatttttaaaatataatgggattgggttattcttaaaatatagtgagattgggttattgggttaaaagaaaggggttgacttccagatgaagattcaaatcccttctagcactagaagatctggttcccaggattatccacaaatatacagagacactaacatttttttttgccttcatccaagcatataatgtttataaaagctcttttaaaatataaaagtttaaataatatgattcagatttcttaaaatgttgacttatgtatgatccttcggattaaaattcattttcagcttggctgaactaattgacattcccaacaatattgaataggagttcccttttctccgcagcgtctattattttgtgctttttaataattgccagtctgaccgatgtgaggtgattttcattatctcatgattttcatttgcatttctctgatgattagtgatgacattagttttaaatggtaaatgcttaaactgctgataaactctatttgtaatcagtttaagaaaatcaattttctggaaatgtcacttctgtagcagccctctccgaccctatcccacacctcatctaaatgagtaatataacattttacctagtcccattctttcatatttttgagctttgagaatctttttaaaaattaaatataatatggcaaaaattttactgcttaaaaatctatcaagctgttcagttgtgttttttttttgccattttcagactaactatatgactcaagaccatgaaaaattgctcattgcagtggaacccactattcttttgattcaacatgctactgacagttatgaagtagtaaagggctttctattacccataatgcattttgaaacttcagtgcccagagatttttttccccaaaaacagttattcctcttagctgtttcaagaactttgaaaatgtttgaataaattttcaaatctcaagtaagcttttctttctgtctgctgagagacatagatcgtctccccatatggcagctgatttaaccccctactcctttctcaccagaaatctcaccagaaaccccatgcactaacttcaaaaacatcgtctacttcttgacctttctatctgtagctctccatctcagtctgtcactttgaataagcaagctagttcatgatatcaaaatatttgtgtaaatggaaccagtcataatttattgcttctaaaattatttcatgggattgtggtaggcactgtttttgctgaggtattggggttaatctcagtggaaatgaggcctgcattgtatgttatcttagtgtactttgagaaaaaaatgtcaaattgcagcagtttacctactgtttatctggattaagaacatccaaaaaagtgattataatagtttgatatcatgctgcaaattgtgacactcctctttaaaacttagcaagattcagatatttgtttacatgtctcaagatctgtaatatgaggattttcccaagagataaaaatgaaggtccaaaattctattccaagttttctgtgtaatatacaaagaaggaaaaagagaaggtatgaaataaaggagggaagtagagagtaaggaaggaagaaagaagggagggaagaagatacctctcaatgtttcaggccatttgcactgcattcattttctgatgctctcaagttattgagatcctgggtagagaacccaagcaaatagttgttatgtaataaatgctacaatatgttgattcctactatttgccaagccttgaactaggttggttatccacaactctaatctttacagcagtccttcaaggagtaggtatcattattccctattttacaaggaagcttacttacaggctgaaagaggatataaaaattatctaagtttaaagagcaagtaaattgtagagatagtattcacacctttgctctaagatatgctattatataagaataaaattatcactttttctattagctgttaaattatttgctaggcaaaacgaaaaagttactgtctttcctgttcatcataaaactaaataaaaataacaccttgttaaagagtgtaaattattaagtaatgtaagtttaatcacataaacaatttactcttatttgatgattttgacaataaagtatgtggtttacagcacataactccattccaaaactgtttgcaaacaggcatttatgttcctcaaatattttaagattggtgcaaagttaaagtttattctctctgtttcattgtgcagcagttagattatgtgaacatttactttcctatagtcacagacttaatacgtgcttattgaatatccactactaaagaagcctgagttacacagtagaagcattaacatagtctctgcctcagcgaaccttttaactagccggagatatctatgcttgtgaaacaagaaagaaacaaaatcttattaaattaaatgctgtgttgtgaagaataaaacatatttgcaaaaggtagaagtctgaacagaaatgtacagccttgtggaggccatcagcaggcccactgccaagaaacttcaaaagttgatatttgccttcagaaattcaccacttgaatgtggccttttgctgggatgactcaaaatctgatttcaacagtacattaaacagtgatcagtttctcaatgacagatccatatgaaccaaactctcaaaataccaacccgtaagccagaattaaatggattacatttaactgaaaagtataagtagtcccccaggggccagccagtcagaggattggttgcaggactgcccacatacacccaaatccgcatatactatagtccagcagcaggccctgcagaccgacatattggaaaagtcggccctgtatatacatgggttttgcattcctgaaatactgtactttgcaagtttggttgaaaaaattccacataatactggacccacgcagttcaaacgcccgttgttcaggggtcaaccatatactgctagaaatcctggttagttaaagaaaataacggccattgatggtttcgaatgtggtatatgtggcttatataccacttgtgttttaagaaaatggcatgggccaggcatggtggctgacacctataatcccagcactttgggaggcagaggcgggtggatcacgaggtcaggagttcgaggccagcctggccaacatggcgaaaccctgtctctactaaaaatacaaaaattagccaggcatggtggcgggtgcctgtaatcccagctactcaggaggctgaggcaggagaatcgcttgaacccgagaggcggagattgtggtgagccgagatcgtgccattgcactccagcctgggcaacaagagcaagactccatctcaaaaaaaaaaaaaaaaaaaagaaagaaagaaagaaggtggcatgataaaatgaggcctgtttttaaggaagataagccttgaagtggtgtggagaaatagtgcatggagggaggagaagaaagagtattggctatagatgccttatgggagacaactggaataatttctaatattaagttaatgaggaccagtaataatggcatttccatattaagagagaaactagaaaaaaaattttaaaagagaaaactatttgaagtaacagtttataggatggggtgtgtgtaataaatagaccatggaattaaaacccagcaagttgcataaactgtataaactagtgtgccaaatgtatatagcaaatcaaagtgctcactgtgggaatagtgagcatgtgagaagatgaaggatgattgatattataataaggtttgaaaaattgtatctaatttattactcgaaatacagtctagtgtccttgtttttaaaaagccagttacatttttttttcttttttcaagagacagggttggccgggtgtggtagctcacacctgtaatcctagcactttgggaggccgaggtggatggatcacttggtcaggagttggagaccagcctggccaacatgaagaaaccccatctctactaaaaatacaaaaattagctgggcgtggtggcacatccctgtggtcccagctattcaggaggctgaggcaggagaattgctgtaactcgggaggtggaggttgcagtgagtcgagatcatggcactgcactccagcctgcgcgatagagcaaggctccatctcaaaaaaaaaaaaaaaaaaaaaagacagggtctcattatgttgtctaggctggcctcaaactcttgggctcaagggatcctcctgcctcagccacccaactagctaggaataccagcatgtaccactgcacccagctaaatttttagaaaattaggtatacttatatttaatgtgaataaccacaattagagaaaaaaatgttcaagagtacaaatattggttatatggggatatttcaacagcacaagtgtaattttgactagtcgattgcctactctgtgcatatttgtgtatgaacatgtatgttactctattatgtatgtgcgaattcactcctctgtctatccatccatcactcaacagtcatatagtcctctctatgtatggaggaaataccatgctaaatattggggatacaaagattattagatgggcccctggcctctggaaagcattgaatagtaaagggataggcatacaaaaaatataattctaaatagtcatgggtgtggtagggaccatgctgcaaagacattgcaatctctgcctataggactcacagaaggcatctctgaggagtaatatttagctgaaatctgaaggagaagtggaagtgggccaagtgaagtggagaaagttatagtattggtagtaaataacttaattgatcacatttttcaatattgagcatggaatcttttgttttaaagaattgcatgctcgatattttgaaagccaccattagatagtttttaagaatatccaatgaaatgtaccaccgtatgtgcttggaacccattagtcataacttggtgatataaagtacgttcttgacctatgacaggactattattgctggagttgctgtaccaaaaaatgtgatcatatttgccatctggtgaaatatactgtctcgcccaggttgaggtccacaagtgactaaatgaccaaaatgactaaagccctaagtagcccacaattactcagttgcctgtaggtccacatggagaatggaaagttgtgtttcatcagatctctgaactgaaggtcatggtgggggcagggaaaggatgcacagtgctttatcttttattttcctttgtagtttgaggtgcgtaagttctcatatcaaccaaatggaatggtataatgctagtgccatagtgtcacacagttgacaaggtctgaggacatgaagttttttttttttttaatgcaattcctgtcttcaaagagcttatttttagaattgtatttgctgtatattttaagacacttaaatatgtacttttcatattttaattctactttatataaaaatacttataatttttcaacttagtaattgaaatcagagtaagtaaattgctacaaatggccaattgttggacctcagttttgcttatatgtgtaacaattaacacagcttttcagatacatttttgaagtaatgggccctgtttctatttggttctattaaattagtgaagtagtactagtgggaaggttctcacactaccaagtggtttgagactcttgtacttaatttttatttttgttgtctataagattaataaaattgagaagtgatgcacgattgatccttggtgtttgcagagagggatattgaggctcagtgaaataaatgggtagataaaaattctgaatatatgaatataactcacgagataataatagcttttatttaaaagctatcctacctcttctgtcaaggagagaaaaatctaagaaataacatctgtaacaaaagaggaaatgaagtgagtgatataattgaaactgtcaaaaactgccaaattttctggtgacacaagagactatcaaaggatatggtaggaatcctagatattaaagcactttgaaggggtaattttaacaggataaagcaataaataaatagagagcaagaggaaaattttaaagtgagaaaaagaaagtaaaataaacctagggccaaaaaatctctgcctagggatattgcccaggatggtagatttagccaagtgggcactcggcctagaatttcttatttcccttttcatgctacaaaatatgaagtaatagccttagcaggacttattacaatgatgaaatcacctaacaatctgaaatgctgcttccctttatgtgaagatatttgttttgttttgcttcttgagaaatggcagtctgtctttcttcttaattcctcgttcaacaatccatttctgtgaaaaatataatcctgtatattccataaaccccttggcattggaaataagagtgatgatcttagtagatcataagagttagaaagttgttttcctacttttaacatgtgataggaataagattacttctatttctaatttctcaaattctaaatttctcataatagaagttaaattatttttcttttgttcaatatctgaagtttcagaaaatattaatgtctgtacttcactaaatttccattaaatagtttagtttccacagaatcccattctctagtgaagattgattttcttaaaattgctaagtaaactttaattttaaaaaatgtgtatacccactttagctaattctgcctctggagtctgcatttttttggatatttttatgttgtttacagtattccaagtgattgattttattgattggtcatgaatattcttaaagtatatacaagcttacttaggaagtaatatataaatgaaagtgatgtaagtagaattttacctgttctatctgtacgttaaatataccataagagcacacacatgctaattatatttccagaatacaattatatatacatgcatatatatacacacacatatacataattacatatatacatatgtatacacacattatttttataatggtcactgaagaaaagggagaaaaagcaaaaaaccagtcaaaatttctgatagctctttgagtcattcttgtaccttaaattagaaaacagaggtaaatttctttcctagaaatctggaacactaatggagttttcattagataattaaaacctctgccacttattaagcacggtcttgatgccggatctcatctgtcattacttcttgaaactgttctgattggctctgtatctgttaagaagtaaaggacataatctgtatcagaagagtgagatggggcatgtgtcaggtgtatcccaaagtgtgcttttgtgttctaaacggtgaccttttaaagtgtgatttgcgctgcaaaatgtataagaaaaaggattttgtgctgttagaaggcacttgtggtctgcagtagtcagagatctccagagccagagtgctccctcacccgtcagcactttggaagagttttgtgaaagtgacagagtgagaaagaggtattatattatataacatttccggcggaagtagcttcatttgcctcaatgggacgagagcttctcctgatctttggcctgcatgttcggaggagaggccttgcaaagtccaggactccactgtttcacgcatttgctttgcctcttaacactcccatgtgtacatgtgtgttttcttatttcctaatagcaaatctttgaggacctcatcatatactggtgtttatagttggttgccatggattggatattacttgtagaaaattattgtctttggtgataacagtgctgtattgaccttggaaaataataaaattttctggcaaatgtagtaatgggtatgtgtgtgtatgtatgtacgtatgtgggtattgcgtaagcatgtagtctaagctgcatattttttgacataacagcacacatctaactaaatgtgattttgttcttaaacaagaaaaaaaaaactaagatttaaaaaaatggtccacaggaccattggatttagttttttgttttgctgaagaggaacctgaagtctaagccatttttatattgaacacctacttctttagaatcatcagtcatcagtcagcattgaaatgctctgctcatttgcttgcgtttgtcgaagtacaagtgtatcaatctgttattttttttttttttgagatggagtctcactctgtcacccaggctggagtgcagtggcgtgatctcccctcactgcaacctctgcctcccacattcaagcgattctcctgcctcagcctcccgagtagctgggactacaggtgcccgccaccacacccggctaattttttgtatttttagtagagacgaggtttcaccatgttagccaggatggtctcaatctcctgacctcgtgttccgcccaccttggcctcccaaagtgctggaatttcaggcgtgtgccactgtgcccagccaatctgttcttactaaaggcaaattttgaataatgaattatcttggatgaacagaatttttcttaagcttcagagagtatttttccagatgcatttataggaaaccatttcattatagaatagatattcattaaacataaatgcttaaaatacttcaaaaatgctcatatttgggaactgtacctgaaattctctaatatcctaaaaggaacaatatttttatttcactttggtttgttctaaaacaaactcatttttcattttcatggacatcaccaagacctaaatttgtatatataaatgaagaattaaaatggcttatgctgctggtcagctgtttaaatattttcttttaaaatcagggttgaagtcatggtattgctttgataggcctttaatccttttcaaattttattatcatgctacttaaatgtttctctcagctttttataaatccatatctaaagtccatcaccttttgcaaatgtagcaataatacagagcagataaaagttgaaagaatctaacctatagtaaatcctttaaagatgccttgattaattgtaaaatgataaaaatttgactcatcttcaccttaaacagaaaataatttcctttacagtcaccaaaaattacaatggcatggtggctcattcctgtaccccaacactttgagaggccaagctggatggaccacctgaggtcaggagttcaagaccaacctggctaacagggtgaaaccctgtctctactaaaaatacaaaaattagttgggcgaggtggcaggtgcctgtcatcccagctactcacagctactcaggaggctgaggcaggagaatcgcttgaacccgggaggcagaggttgcagtgagccgagatcacaccactgcactccagcctgggcaacgagagtgaaactccatctcaaaaaaaaaaaaaaaaaaaaaaaaaaaaaaaaaaatccaactcaaagctggatatggtggctcatgactgtaatcccagccctttgggaggccaatgtgggaggattgcttgagcccagggtttgagcagcagcctaggcaataaagaccccttctctaaaaaaatttgaaaaattaacctggcctggtagtgtgtacctgtagtcccagctacttgggaggctgaggcaggaggatcccttggggctaggagttaaaggttgcaatgaactatgattgtgctactgcactctaatctagatgacagagtgagactgtcttcaagaaaaaaaaaaaaaagaaaattgcataatcatactaacatgttcctgactttttatagatatgtttaggcaacactgttcagctatacaaagaacataatttagttgagaggaaaacagtgtatcaaagaaggagcagcctatagggtcccttccgacagagagtaaactacaagtttcttatacctggaacactcttgccattgggtaggtgagagaatatatttatagcccttctttcttttcttcttcttcttcttcttcttcttcttcttcttcttcttcttcttcttattattattattattattattattattattattattattatttggagacagggtgttgctctgtcagaaagtctatagtgtggtggtgagatcatggctcactgcagccttgacctcccattctcaagtgatcctcccacctcagcctccccagtagctggtactacaggcaggcatcaccagcctgggaattttttttttttttttggtagaaacggggtttcaccatctttcccaggctattcttgaacttctgagcttaagcagtctgcccaccttggcttcccaaagtactgggattacagacgtgagtcaccacgcctggccttaaatttttatgccctttaagtatgccttgatgtggacattcccatctctatattcctagataccctaaactcagtagttggaatgcatttgaggagggcctacccttttcctgcatctgcctacctcgactgtgttcaaagtagaaggggaaatggcaaaatgataatccatgaggtaaaaattttacttaaatctagatatgttaattttatttcttaaatttagtttctcaaatttctttcaataatgcggtgatttagttgttggcacatgtattaaggcattatgtctatgaactgttacttaattatgactgatttaatagtgactcactctatatatgctctacagacagccacataccacagggcatcacacccagcaggcctaaatattaatgaggtttttataaaactaattacaagaaagtctctcatggagagtacagaaggtggtccctagaagagagaggactatgaatagtgtcctttgtcatggaagccatctctcagttaacattagatgtattagatgcctaaatcttggcattatttcagtaatagtacaatggtatgaggtgatgtttccgtaaaagtgcttatctacacataggtagtagctgactgaagataggtaatcacttatgtcaggaactgatcagtcataggaaagaaatgctgagccaagtaggtgagcactttttatacatgaatgcatttaatcctatgggttacaaaatgcagaaacaaaaattaagtactcaatatttttgctagttgttgatgaatctgtcttctactacagtgaagggagtgttaattatggtaaacgtgtatatatatgtgtgtgtgtatatatgtgtgtatatatatgtgtgtgtatgtatgtatgtgtgtgtatatatgtgtgtatatgtgtgtgtgtgtgtgtgtgtgtatatatatatatatatatatatatatatatatatatatatatgcttacattgttctagacgggttaaattcaggacagttactcccacagataagaagggcaaaaagcctagttttggagcctctttagttgaaattagtgatctttgctcacagtgtagtgcaataggttactaaaacttattcctacagtctaacgaaaactttgtaccctttgatcaacatcttctctttcctcatccattccaactccctctaggctctggtaaccacctttctaatttctgtttctatgagagcaacttttttagatttcacatataaatgagatcatttagtacttgtctttctgtggctggcttattgcaccttgcataatgtcctgttccgttcatgttgtcatgaatgaaacattttcttctttctgaaggctgtatagtattccaatgtttatatatactacactttccttatccatttattcgttgatggacacttaggttgctttaatatcatagttactgtgaatactgctgaaatgaacaaggaagtgcagatatctcttcgacatattgattgcagtggatatatactgagtagtggtattgctgggtcatatggtatttctatttttctctttttgaggaaccttcacagtattttgcacaatggctgtactagtttacattcccaccagcaatgctcacaacatgacattgtaccccataaactcacactattgtatttttcaattaaaattattttttttaaagtagtgatctttgcatgaggagctttgtgatctgctttgccacagaggtgaagtcttccataggttgcatgtattgttgcaataatagcaataataagaagagaacaaaacaaaactatcacttactgagtaacttattgctaggcactatgctaaacactttatatacattctccctctgtttaatcttcacaacagtcttgtgagttaataaatattttccccattttacagataagggtctggatagtttaaattagaattttcacaagtgataatgaatagtcacattttattttatttttatttttaaactcagagacagggtcttgctatgttgtccagatgggtcttgaactcctgaccacaggtgatgtgctcagctccgtctcccaaagtgctaggattacaggcatgagccaccctgtccctggccagtagtgacattttaaactggatgattctttgttctgtcctgtttagctagagaagtatcatgtaatggttaagaatatgagctctgggctgggtgctgtggctcaagcctgtaacctcagcactttgggaggctgaggtgggcagatcacctgaggtcaggagtttgagaccagcctgaccaacacggagaaaccccatctctatgcctgtaatcccagctactcgggaggctgaggcaggagaatcgcttgaacctgggaggcgaaggttgcaaggttgcagtgagccgagatcgcaccatggcactccagcctgggtaacaggagcaaaactccatctcaaaaaaataaataaataaataaaagagaatatgagctctgaagcttagagtaaggtttctgctccaggtctattacccttacctatatgagttttcccttgttacataatctctgcatatgtctaatgtgggtataataacagtaaccagatggggctgtgtttgaagactggatgagttgatatttatgaagtttctggttcataatatgcattacatgttgatttttatgtttattattgtatatgaatattttacaagccttattgtgattttgataaaaataaattcatgcctttttgtcattcagtaatattgtatgtgcttcctcatacagtaatattgtatgtgcttcctcatacagtattcacactttattggttaaatttattactatgcactttttttttttttttttttttgagacagtttcactccgtctcccaggctggagtgcagtggcgcaatctcggctcactgcaagctccgcctcccgggttcacgccattctcctgcctcagcctcccaggtagctgggactacaggcgcccaccaccacgcccggctaattttttgtaattttagtagagatggggtttcaccgtgttagccaggatggtctcgatctcctgaactcgtgatctacccgccttggcctcccaaactgctgggattacaggccactttttaaatttcactatgaaagacatttttatccctgatattcaggttttgtttttctctgtcttaaagaaaaatttttgatatttgtatattggtcctaaattcagtccctttactgaattcccttattagttccagatagattataaaagccagcagttttggaatcatttttgacccctgtcattctctcataccccacactaagttctgtcaaatctaccttaaaagtatatccacattggcagccaggcacggtggctcaagcctataatcccagcactttgggagccaaggcagggggatcagttgaggccgggagctcaagaccagcctggccaacatagagaaaccccgtctctactaaaaatacaaaaaattagccaggccatggtggtgcacacctgtaatcccggctacgccagaggctgaggaaccggaatcgcttgaagccaggaggcagagattgcagtgagccaagatcataccactgcactccagcctgggctacagagcaagaccctgtctcgaaaagataaaataaaataaatatacgtagagagtggtggttcacatctgtaaccccagcatgttgggcggccgaggtgggagtatcacttgagcccaggagtttgaaaccagcctgggcaatatagtgagacccttatctctacaaaaagttaaaaaaaaagaaaaaaaaattcagatgtgatgcctcgcacctgtagtcccagctgcttgggaggctgaggtaggaagaattgcttaagcccaggagatcaaagctgcagtgggctgtaattgcaccactgtactccagcctgtatgacagagtgagacggtttcaaaaaaaattgtatactcacactctctcacacacattcacacacacacacacatacacacacacacacacacacacacatacaacaggcaacattccttgggatgtctcaactttcatactatatatactccaagccatcttgtcccactcctgaattattgccaggctcttctagcctctgtgcttacccgaccacaatctgttctcatgggaatctattattaactaaggatcgtttgtttcttctgtatctattacaactttttatcttattctgttactaaaacagctagagcctttttccaaaatattggaaactaatggtgagaatggccagccctatccttgttctaactttaatgagaattacctttaatttgatccaatatactgcctctagtttctgttgaataatgttttaccttgatttgaaattttatgctattcacagtttacccagtttttatctaagttgttgattttattatattgtttcagtgtttatgagtatgatcatatattttttttctcctcttactattctgaagggtcattcttagttcatcttcatattcatgaactaaagccatactcagtcataaagtattacaggcgtaccttggagatattgttggttaggtaccagatcactgcaataaagcaaatatcacaatacaatcacgtgaatattttggtttctcagtacttataaaactgaagttcacacaatactgtagtctattaagtatgcagtagcattatatcagaaatttgagttctcatctttttgctcacatcctgcctcaatgtggtggctgctgactgatcatggtggtgcttattgaaggtttgagtggctgtggcagtttattaaaataagacaacaatgaactttgacatgttgattgattcttacttccatgaaatatttctctgtagcattaagtgctatttgctagccttttacccacagtagaacttcttttgcaattgtaggtcagttctctcagaccctgctgctgctctatcaactaagtttatggaatattataaatcccttgttgtcatttcaacagtgttcatggcatcttcaccaggaaaaatttcaaccttgagaaaccattttgtttgcccatccataagaagcaactcctcattcattcaatgtttatcatgaaattgcagcaattcagttacctgttcaggttccacttccaattctagttctcttgctatttccaccacctgtgcagttacttcctccatcaaagtcttgaacctgtcagatttatccgtgaagattggaaccagtttcttccaaactcctgttaatgttgatatgttgacctcctcccatgaatcatgaatattgttaatggcatcaagaatggtgaatcctttccagaagattttcagtttactctgcccagattcaccagaggaattactatccatggcagctattaccttgtgaaatatgtttcttacataataagacttaaaactcagaattactccttggcccatggactgcagaatagatattgagttagcaggcatgaaaacataaatctccttgtatgtaaatctccttatacgtacatcttcatcagagctcttgggtgaccaggtggattgcaaatgagcagtaatattttgaaagaatctttttttctgagcagtagtacgtttaaaatatttagtaaaccatgctgtaaacaaatgtgccatcatccaggctttgttgttccattgatacagcataggcagagtagactgagcataattcttaagagccctagcatttttggaatggtaaatgagcattagcttcaacgtaaagtcaccagatgcattagcccctaacaagggagtcagcctgtcctttgaaactttgaagccaggcattgacttttcttctctagctatcaaattactagatgtcatcttcttccaatagaagactgtttgatctacactgaaaatctggtgttttttttagcatatccacctttatcaattatcttagttgatcttctggataacctgctgcagcttctccatcagtacttgctgcttcaccttgcacttttatgttatgaaaatggcttccttcattcaacctcatgaagcaacctctgttagcttccaacttttcttctgtagcttccttacccttcttaaccttcatagaattaaagagagttaggaccttgctctggactaggctttggcttaggaatgctgtggcacatttttttaatttgagcaattatttcaaactttttcattattatgtggcaaggtcctctccctctccttgagcctccttattccctgagatacaagaatattggaacaaggccaattaacgctaaaatggcctctaagagttcaagtgaaagagtcactgtctctcactttaaatcaaaagctagaaagagtgggccaggtgcggtggctcaagcctgtaatcccagcactttgggaggcccaggcgggcggatcacgaggtcaggagatcgagaccatcctggctaacacagtgaaaccccgtctctattaaaaatacaaaaaattagcctggtagtcccagctactcgggaggctgaggcaggagaatggcgtgaacccaggaggcggagcttgcagtgagccaagatcgcgccactgcactccagcctgggcgacagagcgagactccgtctcaaaaaaaaaaaaaaaaaaaaaacagctagaaagaatgacacttagtgaggaaggcatgttgcaccagttagacaagttgtgactgcaaaagaaaagtagttgaaggaagtgatgagcacaactccggtgaagacactaaatgatatgaaggcaaaacagctccattgctgagttaacacaaaatgtgacccaggaacacaaagtgagcacatgctgtcagaaaaaaatggttccaatagacttgcttttcacacagggttgccataaattttcaattgtaaaaaacgcggtatctgtgaagagcaagaaaatgcattgagtgtatatcttttaatcaaattatatttgattacaatttacttgggaatttttgcattttattctatttaagagtgaaattagcttaatttttagtatctagtattgccatttcaaagaactttgatacaagatttagcctagaatttttttttttttttaagacggagtattgctcttgtctccgaggctgaagtgcgttggcgtgatcttggctcactgcaacctccacctcctgggttcaagcaattctcctgcctcagcctcctgagtagctgggattacaggcatccgccaccacgccaggctaatttttgtacttttagtagagatggggtttcaccatgtaggccaggctggtcttgaactcctgacctcaggtgatctgcccaccttggcctcccaaagtgccgggattacaggcatgagccaccacgcccagccctagcctagcattttaaaatttaatggggaggatagctgcgctggtcaaattaaaaattgttcatataaaattggaatgatatgttcttttagagttaaatagaactctcctatgaaactccatgttactgcatcttttttcttaaaagagagagggagacagggtctttccatgttgcccaagctagtcatgctctcctgacctcccaagtaatccttgacagtccttttcatttcttctagagttattagtatcttaactttttctacttttccagtaaatattgatactttgcattttcttagtcatccattttatctaatttttcaggtttaattagcataaagttacataaaatatacttatacttttaaaatatagtcttacttgtgattatatcttcttcctcattgctaattttgtaaattctcgatttattctctctctaaccccttgttgagaatcagctttttgttttaattctgaattttaactttaattttgattatatctcttacagcttttgtctttattaattttcacctgatattttgttttgatttgcttaatttttctagctttgtaagttgacctcatggtttatatatttgtagtttttttttagtaataacatgattttaaatgagtagtttctcaccacataacatttgtaagcatttctcacaagtagaactcttcatggtttcatgagaattacccattcatgtgttgtgagtcctgtgaagcatgcctattggttttacttacacatttccaagtagggttaaaactcttcataaagaatttagagtggctgttaataaatattaccaaattaattaaaataaatctctataaaatttataggcctaaattaccacattgactattcagttttatctgtatggccctaatatttctccagtcgctgaaaaagaccttttggccaatctgaatagagatacagaaattctctgcagttaggccttaaaataaagcagatataattatataggcatattttaaatataataagcaatgtggcttagcacttaagagcatgggctctaaggtttgactcgtgagaatgaagccttcgctttgcagttagttgctggtgtgaccttgttcaagttacttatcttttctatattttgtaactaatagactggatggaggaaaagtgttaatttttatgattgttgtgaggattaaatgagttactatataaaaagtacctaagaaaaaacagtgtctgtcacataggaatcacttagtaaatgtaattattattattttttgaattatttttattataatttaaagcatagataaacaatttgctgttgaagtggtaatctaatacttctatttttgtgtaccagttgcattctgctaaactaaagcataagccaatacacactgtagaatgtttgtcatcttcttaattttattacctttctcaacaagcttagactccagttgacatttgcagggctaggcctttttaaaatccacattcatttgttggcagggtttctttcacactactgacaggtttgataattcatagggtagatttaattgacagggttttagttagcatgaactagaaacagcctgttttgcaggcttggtttatttttgctgaaagaagctgagtgtctgacaattatgtttactaatgaattcatttctttggtatactccttaaaattctcaggagtaagaaagacgtcctcatggcctcacagttttctaattcccacatgagaacgaaaattttgtctacaacaccagacttgtttgttaaacataaaagaacgtaaatcctccacaggtccccaggggtgtgttagagaaagggagtgatcattataaaccacttagccctgtatgctctgtatcatgttgccatgagaaagtgatgtttgattggctcataaaataggtttagtaaatcctttaaatactgacgtggccaattgtgcacattggaaattaatacctgagagtgtattataaggattaccatgtctccagagcagtcacctgggcatgtgtagatttctgaatttaaggatgactgtgttttgtgatttcacttttatgtgtcaatattgcttagttttatcatcctcttttcatttggctatggcccacagatacatttttcatcattgttttctctcttcattctcttcttgatgtttgggctatgttagcatatatcagccaaccaacctttgctgtgaatcccatattctgcaaatggtgttgtgtcagaaaataagaaaaatatcaagttgttaaagcagacgacctgatttaatgcattattctttttctatcctcactatgcattcccaaaccagttgaaaggaaatatggaatgaagtgacaacggggtgtgtgtgtgtgtgtgtgtgtgtgtgtgtgtgtgtgtgtgtgtaaaaaattatttcattaataactttaaattccatagatgtcttaatagttattgtgtgtgacgataaaaattaatggtagaataattgcatgaatttggaattatatatttttgtatgacacgagttctgagaaaatcttgaaatgcctaatttattatgaaactattagtagcatatgctaagttctactgttttatagacaacacagtaccttattagatgtttgtttcacttaaactttatggagaacaaaactatatagatttttcaaagcactgtcataaatatatgcactagacttgcatgagcatgtaagaattagttgccagctgtctcgctgcaaatccagaaattttcataaggattattttccaaatggcatcaaattcagttggaaatcttcatgaaataagtaataatatgctcatcacccttctcctatttacaggacagtggattttgtatcgacataaatcagagaaggcaaaagttaagatatttttgtttcttaataaagtgttaacattttaatctagatatttttgtgtcgttaaagccctttttaaaatacttttaaagaagttacagatcatataacatatgaggtagtttatttttaaacagaaataaaaagaaaataatatatagtaaagtagctatttgagttgttaattttagacttcctgaagagaatattcttttctctttaggatgctttttttattaggaagattaaaatggttattttgaaaaatggtctcaagaaaattttgtacacaatgtgttctgctgaagcagtgtattgaaatgacttcatcctggccaaatccaatgatactttttagttttcacctctttgatctttctttggcacttggcattattgaccactcctgcttcaggtgaaattctctcttctctgttaccttaacgtctgcaccttccctcacagtggcttccctcttatttccctgactgctccttctcaggatgcttttgttaaaggatcttttctattgacccacacttgaaatgttactgtttcctcgaattcctcgaacatgtggtgattacctgtctgtgttactcccctctatgaagcctccagcggctctgcctcttaagtgcaagggtggccaactcagatgccaaagagcaaatataagtaaatgaagataatctggattttttttttaaatcatagaaagtagatagagatttttaaaaactagaaagagcatgcctcatgtgaagcatttttcatttagtcccagcctcagttgctatgaaggccaagtattcattccttcactcaccaaatactgacacagcgtttactatgtgcctggggtgtaggtgctcaggataagacagtaaagtaagcaaagatatctcctttgctggagctgacacgaattctggagatgagccctcgtggagtcacccaaagctaatgatatttattattaccagatcttcaattttttaaaagccgaacatccaggttttctatgaaattccattttttaaaacgttgacaaattttttaaagagacatcgagcccattggaatgtgcctacatgttttcaacattggcctaccaaataatccaatgtcttattaccatgcaataccaagacctcacctgcatctatttgtccaccatgatctccatctgatttttgtttcccaccctcagttcacaatggaccatgcttagcgctttctttcttctttacatcttatgtattgtacttcttgctagaatgcattttcatcccccacccctttcaccccttgtcagtcaatactctgaaagcccaagtgtcaagtcctttgtaagctgaccttcatctcactgtataaaattacactctttcttctactattccacagtatttcttacatactctaattagagcacttaccaatgtgttttatggacccagaacccaaaaaaagctttagttatgtgtttgtatcctgagaatctagcagagcagtttgcgccaaatcagtgtttcataaatccctgtcgaatgagtggtggtaacctgcatcacacaggctcacctcccaagcacagaacaaacagatccttatgaatagaaactttgtttcatgtgtagacaaccctgatgtaaaaattaccattcgataaaaatgatgattatcaacgtttctgccaaatagatctgaaatatctacttaggtctgctatacccaccatccccgaaccacacacatacactgcctaacccttccacatcccgcacacacatacactaaaactcctggaatggttatactggctggcttatgtatatgtaacttataaccctggacttctcatgtgatatagcaaaatcatatctcctctttgtctttgtgttttcttatttactgcttttaagcttccaaggttatgttaaaaagtaggtgtgcagaggttggaggggtgcaggacagagatgggagacaaactttcttgagtggcagctctgtgcaaacaatgttttaggtgctgcacatgtgctgtcccatttttcctttcttcaaatgtctctgagttaggtagcattattcccagtttaccagtgaggaaaatgaagctgaagtagtttaagttccatgccttaagagagttttggatacttcagatttataagtataattgtttcattatacactttgtcttttttcagcaactttttctttcatatgtttaatgttacgtaaaatgtagtatttttggtagtctggtatctactgaatttaaaattttgaaaaaaatctatcagtggtttacaaccatgtcagacttcgttttaacaaaagttttgcaatgccctgcttagtattctgaaatgcaattcatagaagcagttatctgtttacatgtgaaattgttttaaaaataaatatattgtctgcatgttatataaatctattaaaatagcaaagtaatttatattaaaataatctgtttcaatatataaatgaacagtaacaattaccctagaaaaataaagggaaaatgttagcatcttttaagtcgactcattgcgaatgtaacagctataaatatagactaataagaatatgtttgttttagttgggatgaaaatggtatatctagtattcctgttagtgacatgtttttccaagtgagtaactcttggttaagtttaaaacaaaacacagaaaattccctcaatttactctatagttgacgttatttaaaatttatcttaactaaaacagtgcaaaacatatatgcgtttatacatgagatgatgtaagatgatgtttatagttagatgaactgtagtagaatttgcacctgcatgaaatgtccagtgaaatatttgaaaggcatggaggacatggggcaaatactcattttcagaactttccattgttgggcattcgtggaccttgcctgctacatttcaatcactcccttctcacccccaattattgagacaacctaaaatgttcccacagatttgtgaaacagtctgtcatggggcaataatggtctcagtgaacaccactgatccaaaccttccaaaccaaaagttgacatgtgtttaaaacaatcatttattcctctgtttaagatactgtgtatagtgaaatgtaaaatagaaatatgtacgaactggttcctttcttcaaggattaacagcctaagaagatggatcacttatacacatatatggttagttagaaatatgtgtttatcaaaacgagaaagatgacagtgagctgagaacacccaggaaggtcacagaaaggaagaacagtaccaagtgaagtgcgaaagatgcgtatacaatgaagtgactctaggaaagcttgcatcacagatgaggaaagagccaaggcccctggccaggatgaaagagttactctcagaaaataaagggcagtaataataggaattaagagtggagtcacactgtcatgtccaaatgaaaattatattcaataattcatgaatcgaatgtcagatagggttgctccttacaaaatgtttaagttttaggatggttatttaatgaatttggaattcgtaaacagaaaaactaaggactccaaagagactcatagttcttcaactgggccctcattttcagttgtgtctcttctttagaattcttaattatatgttcccggttaaattttggattaactcactgctgtggtccgtagagtcatagcacccacagacatgaaacttgtaattgccagaataacagattatgaaatgatgtctctttccctttgtctttttgcaggtatgattttgtagaagttgaggaacccagtgatggaactatattagggcgctggtgtggttctggtactgtaccaggaaaacagatttctaaaggaaatcaaattaggataagatttgtatctgatgaatattttccttctgaaccagggttctgcatccactacaacattgtcatgccagtaagtaccactttcagatccccttatttaattggatcagctttttgtttctttttatttttctcctcttacacatgagaatcagaaaaaaaatcagaaaacaaacctagctgggatttcatttttatgtaaataaaaactcttacatgccaagccagcaattcattaggcaaattagaaaatatgaaatcagtatttaccattttatatcatattcatgtgtattgttaagcagaaatttccctgtttgattgctcaggagtctatgaaatattatctagacaactgattaaataaaggaaatttaagtattggttaagggtatagctaaaaagaagcaatacaatgcaaactgaattttgaaaatgacaatttattcatttagtaataatagaatcatttatcatgtatgattgaagttaaaggagaaatctctgaagtatgttataaatgttataaattgtgtatgttataaattgtgaattttgatcagttttattatgtagcttatttaagatatcccaaactctactccattctgaaatactttttgccagtatatattctgttccattttctttgttcctttccaaaactttttaaagtttaatataatactttaatatttttaaatttatttaataaaatgtaacaattctacctgtaaatgaaaaatgttaatgatagacaaagatgtacatttttattaataggcaatagtttaatactgattatttgcttgattaaagccactaagaatctgtttagtatacttttacagtatcttgtttcacagaacttagtgagtttaatattttttaggctagggtggcgttgagggccatggatacactttcacaaagtgaaatatttctcaaatatttaaatatgggatatattaattgtagtaaaaaacatactagcaggtctttgtgagagcaaaggttttattcatcccaaacatgtgacaaaataaactttaaattaaggatattatttatattttaaatgaacttctgtctatattatattaatttaaatgtgtataaatagcaatctactgtcctcctatagaataaaacacaaaagctaacgtataaatatcactactgaaggtttttttttctgattttgtgactacatagattatctggttgtataacccaaggagttatatggattaaatcaaatatgtaatgataaaagcatactatatgtatgtattacacatatacatagtagacatagtatatgtatggtatttatagcagctagctcagttctgagcacataatagtctctcaataaatacttgaatgctgagttgatcatgcaattcagtcacccagcttaactaatacaggattcactgtatatgtgtgaaagttgtcagattcataagacttgtgatgaagtaagaacccaaaggttgattgaaagtgccatccatcctcttggctaagaaaagtcctgtcaccagggttgacctattatcagagatttactgtgactgagaccagacaccacatctgggagactttaggccaaatgtatgtcattggttccattattgaaattaaattgaccacatttttaaatgattgtttaatcatttaacaatgattggtaaattgtcaatatggacttcaatgggctattgtcaactctcctggactctattgagccaggctttgtgtggcaactacattgacctattctgggctgtagataatggagacatgtggggagtaaaggcataggagttcttgtaattaaactatgtttaggaaaacaataggcttttggactggaagaaacaggagagaatgaaggtagtgtcctacattgcctaataagtgtaagttggtgattttcatttttaagattgctttctggagaaattatatgaattttacaatctcacaagctttgttttttctgtgtttaaatttacgttgacaattaacctgccatttcttcagccgtcctttgtcttggttccatatatccattcatctctctacttacagccacattcattctactcttaataaactgtctgcagaagggtgagatctgatgagttagaatttgacaagtggttatgctgttaagccttgcagaatgttttgaattatcattgtgtactcctaaattacacccctccctccatgcaccccctccaccccccacactttgctaacagggtgcaatccatcaatcttatctgtgtaacagattaatgaaagcctaaagcaagaaagtgtgcctcctggacagcagacttaaaagttcttgaggcctttgctcaggggcaagggtccctccaagcccctggatcatctctgatgcttttatttttctctttttgctctggatgaacttcatgtcagcacactctgttccccagaggcaacggtctcattgattagaaacctacctctgcaaaattccactttagattccactggccacaatgatttctttgtaatagtaaaaataatattaactactagtttatagtagacaattaactttctgcattgaggtttgtcaggagtgcctagcacaatgccattcacattgtagctgctcattaagatttcatagaaattcagccatttcatcttagagttgtccaaaacccacagggagctatactaccttcctatttattatatgtcacctttgttcctctcacacaacagagataattcataaaccggaacgcagtagactcacaggaatgacaccagatattctgctgtcctaatatattacgctatattaccaaagacacattcttgcattagctaaataattgccctggttttctttttaggggaggcagtgaggagtgggaattagtgggacatccactgaagttaaagaattgagtgcatactaatgattttataaacattagtatatacagttaacattatctacttttcataatcaacccaatgaatattttgcatgcattactatacagaaaaaattttaagtgagtttaatcacatttttttctaggacaaattatgggttaagtttattttaaaattctttatatttcacaggtaaagagataaccctgtagccttctttgggactataaatggatatcgggttctggtcaacagttaagactccttggttctgattaccatgtgtcttagaggcagagttttaatacattagttaaaattttcagaaacagtttttgccacacaagttgccattaaaaattatgttctcccttgtaagatgatttacccactctttttttcctcagtttatgaataacagagcatatagttaaataagagatgacttgttcatttgaataaagtgatgctgttctaatatttaaagattttacatatttattataaatatcagtactttcctttacaatattgggatttccatatcattttcttgattcacaggtaccttacaataagacataattaaaatttctctctccattttttcatttggtgttataaactaaacctagttttagaaataactttagcatatgttatttacttgaggttatagctagttatagctttttaaaacagtagtactagaattgctacataattttaaaattacagcatttcaatgatattttagagaattatttatagaaatattattctccagtcatgctccattaataactaataaaaaataaatttctgcaaattgatgccaaatgatacatacagtgttcaacttttatgattgtgcctaaggagttaatgtctttgatttttttccctttctgctaaaagagaaaaaaaaaaaagacctggtagattagcagtgagagattgtttgggaagaaatgaagcaaaactgaaataaaacagtgcaagcttgtttctgtttggaggccacacacggtgagagcccagaacacatttcagatcttttagaaagaaaggaaaatttcttgtttaattttggagtaatttataatagattatatatgttttactctgtgtactgtagcataagcaccattatttaaaatgataagaaacctaaaaaggctgaaataataacttttgctccagaatcaaaagactttattaaaagttttatttctcagttctaaaagtaaaaagtactgcatattttttggtcagaaaactgcttcaattaaaccatacctatttttaagtaaaatatacaaatctaaatctgaatttttaaagttattttagtcttatatttagaactattcttcttgagtacagtgctatttgttgtttttttaatgtctgtgagatttgaagattttcttattctccctccaatttggttaacattatgaaaaatgattaccactgatttttcttaaatggttttaatgaatattatatttttcagtctcttagtctaaggtttctgatccaaagtaatgataatgtttacaataatttatttacttttttccatttaatgagtatatcagtttatattaagagaattagaagttatagccaccatacaaattgagtcaatgtatatttaccctctttttctttgcctgataagctgggcagggggtggatgaactgaagagtactttaactcacaacacttcagtgaacttcatcttcctttaagttgccgcctgatttgttctatcacttctatgattttacattttaaaaaactatgtataatcagtgatacttgtttgaatatacaagtgaatcttgtttattcttgttattaaattatatacaaagattaataatatagtatagtatgtaagtattatagccacattataacccccactgtgtgtttttcttaatggtgattttgtaaatgacttatccagagttcagacggcgtactggccagcatgccctgtggaagggtgtagggtttctgtggggaggggttagaaggacacttgatgcctgaggtgctattaaggaatgcatgactgattgccaaagtggttattaattatgcaggatatggtgaacaaagcagcacagtgaatattgaagtgagagggggaaaagaggagggaggatattttttttcatcccttctgacatatgccagtaggttatttcactgttaatatcatgtcaagaaaagtcttaactgaaagccaaatttgcttttatgttcaggttaagaaaaactccaaccaactctcaaacaaggcttcaaatatattaattcactttctttcctaggaaaaaaagcagcatgcctggaataaaaatacttagagcaatataataacaccaatcctacaggaaaaacattagtggtgggatgtactcaagattttttaaaatgttaaattttcataacttattgcattgcattcccctattgttaaaccaattctaataagtcgacatttatttgaaaacttacttaaaaatagatttgtatttacctcgagaattaagagaaaatttgatgcttagaatttttttgtatttagagactggaagaggtatttcaagtactatttatctacactgtagtctgaagcacttgttgaatgattagatttttattaaaatatacaatatacttgtatatttatgcaaggagtcttgagatgacagtattttattgcagctaggaaattatataattgctatagagactaaactcttacttggctaagaattgcttaatatatttttcaattccacttctccatgggcacaatgctctctttcatatgacgatcatggtgtctctgtttcatttctactgattccttttgttccaattaatttcttgctaagaaaaaatttcacagatgctatgatttgtagttagaaagaaaaacgcaattagcactatgtaggaatggtaaatggcagacagattattgtaagtcattttataagagtgttgtaaataaaatcgtagattaattgaaaccttgaggtttgattgattcatattttatagctaaagccacaaagatttaaaagcttggagttaaaatggcaacctcacaactctttccatctaaacctgatggaaggagttgttttctagaaataaatatggtgcaagttaaaattataaattaaatagtttttcttcaatattcctacccattcaataccctaaatcccttaattatcagatatttgttgagaagattcaaagatgtatataatatctcccttggtctctgataacttatctcgttttggaggaaaaaaatacctataaaaatgcagtatgtgagtgtcatgttgagtggtttggaaagattttgagaaggaagatgggaatgtggagagcagagggatgtcataacccttagattaaagaaaaaaatcaataagcaatcaaacaaaaagtccaggagctattcagtataaattttttctcaaatgtgttataaaaatctctcaagagcatattaaaaatgcttgttaccagattagtcagagatcctcattttcttggtctggggtgatactcaattatctgtgttttcatcagatatgcttggagattcagttgctctaaactatagtttgatcagaatacgattacttttttttaacttgccaacattagcagttatttatttatttgtttatttatttatttttacaattacttttatttcaagattttggtgaatttttttatattcaaacaaatgaattttatatgaatagattagaaactctgcacacatgtttaatacatgtgtatttttcagggttacaaaaagagtgggactttcccataaaattaggtagatatctttcagtttctagcacttgtatttattgtaccaactcttccaagcattatattaaagactatcaattttgtcaacggtcagtgtctgttacccacagaactatgaaagattgtcctctgctgccttttctgttcaacactaaacttgtttggtaattcacagatgacatagttccagcattgaagcacagttctggaatagatattcattcattctacaatgttagatactgttagtaaaataagacatttccagttgtcaagaaatattctttcattttctatatacattttttacatttaattttaattttgtcagttaattttgcacctgtttctaaatggcaaatatttctcttacatttgttacaaaaatagcagttcataccactttccccttcctaaatgatttttctgccctttgtaggcaggcacttccaattttttgaaataactcttttgaatttacctctacgactctatttaacatgcttttatatctacttcttcactcttttacaaattacctatcgatttctcactggaagataaagccatctttcactttctgtcaccctcctgcctttaccacacatacagatatttcccagcaccccatcctctattatatcttgattatatcaaatccaaattcattgtgtacattatggtggctctgtagtcatttttcacagctgagccttgaactatataccatgactacatttccgtttctgttctttttatgtttcccttagaattattttttggcttgtttagcttttatattcatcactgattcatcctgaaactgttcctcagattgtgtaaatctcctctcagtacactcagacacatttggttttctaataatttcatcttcttcaagaaatctttgctgcaatcatctggcctgctccaatgtggactgcttgccctttagaatggctgcacaaaccgtcatccttgcagtctccttctgccatcatcctgagtattccttttgacgttttcttgcattagatcctctgtttgctggatcttttgtcttcctgtgtctcaatttacttccttgtttgcgaagagagtaaaacttccatgaatatactgagaaaatggagcatcagagataaaatttttgcagccttgcataacttaaaatgctctaagtattaaccctcaaacttaaatgaattctgattaagtctagaatttaagctggccacttaaaagttgattggacattctgtgcctgtggatgggcttgcccactattgtcttcactgtactgcgtgctggcttagtcagtttcttcaaaacactctgattcctctcatctcttttctaagagtataaatactggttaccaatgttctgaactaggagctgagttgattaacactgagatatttggcattgtatatatctaatatatatgttttgtgtatgtaaaatgtatatgtgtgtgtgtgtgtgtgtgtgtgtgtgtatgtgtgtgtatgtttctactctaccttctccataccctcaactctgcttgggttttccacagaacgaatctgaactgtcttctgccaagaggaaagcagatttggggtatctggcaatttcattaacagatttttagtcattcttttattgttcctttatgtatatttaattgcttcttgtctatgcccctgccaaattttgcaaagcccaccaatccaatgacgacacatccaactcctttttagttttcagaattttattgctgttgactcctttctgactttctttggccttaagggtgtaagccaaaaagtatgtgagactgatctcaatcaatttagaagtttatgttgccaaagttaacgatatacccagaagaaaacaacacagaatcatcaaaacagtctgtggcccatgcctttctccaacgatgaatttgagggcttcagtatttaaaggggaaaggtgggctagaggggaaagagggagtatatagtaaccacatgttgcaagaaaaaaggggcaggtaggaaaatagacaattatgtatttgtctcgggctcactaatttggctttttgtgtaacataaggtgaacatagagtagctagctacctgtgaagatatttaaccttttatctgtcgctgtctacttaggaacaaaaggaaaagcagtgtcttgtatgactgaggtttcagcttaattttttgcttttagcataatgaattggggttctgagtttttattttcctttcacaagtgattatgcattttacagacacctttagaattaataatttcaggagagaacagagccacaattaccatttttgcattctttctttattagtggaattcatatattgatgtgcatattaaagattgactttatatttgattaataaaatattcaaaacactgcagaagtatattaaggacatagtatgtgccaagtgccatgctctataaatggcttccaaggaagaactctccatttccctcccatgccagataaaataacccctagtaggagacgctttgcatgattatcctaatattgtgtttactttttatatgcaagaaaggcatatgtagaggttggtactgtcaccctccagggggctctttttgtcaagtgcccagatacagctgatttatcaagacaggggaattgcaatggagatagagtttaatgcacatagagccagctaaacaggaggctggagctttattattactcaaatcagcctccccaaaattcagaggctagggtttttcaaggatagtttggcaggcaagggaatgggtgctgctgactggctatggatgcagtcataggggcatggaaatcggtccttttaccctgactctgcttctgggtgggggccacaggacctgttaagagtctgagtggagctattggtcatcagaaatgcaaacgtctggaaggacatccaaaagaccaatcttaagttctacaatagtgatgctatctgcaagagtaactggggaagttgcaaatattttgaccttgggaataatggctcataatcctttacttctacaccttaacaaagttcaggcttctctcatcctcctaacctcatagtgtttcattcattttacagtgacagttgagtttggggaaaggtgtattaaaacttaagctgtaaactaaatttctcccaaagttagctttgtctaggaatgactaagggcagtttggaagttaaaggcaagatgagggttgattaaatcagagccctttcactgtcataatcttctcacagttacaatttttgtagacagtttcaatattgatgagctatttagcatgtcttgaactctgttataacattaatgtaatgtctagttgtatccactaggatgccaaccctgcttcattcataataacgtggcaagtgtcaccaaatgacttaccatatgatccacacatttgagaaaatgctactctcatcagtattctcataaataatcaacaatttgcctattttagtaatgctgttaatatatttaaatgctttgaacattaaaactagagcttttaaaattttacatatctctctaattcagatgatataattgtatttttatttacttaatattactttgaaatcacatgaatctgattttgtatataactttccatttttatgtcctctgataatcttagaacaaagctaaaagataagtatgattagtgttatatatttctaaagatgttaattttgaaaggctcatatattttaagcttttggaaagaaaatgcttaattgtatcaatttgaaaatacttgagtcaggcaaaagagaatgaacatagattaaaataagtgtgccttatggtggttttaaaaaatatattatttaatccccatattgaaatattactaccattttgtagattaaaactcaacatatatagagtgaagagagttctctttaaaatcagactgcctcttgactggtttggaaaataggagaaagatcattgagaaagaaacaaaaatttaagatctcttctgaccatttttgttttcctattaaaacacctgtatgctattcctgttgattatgatgtcatggatactttggtaactttgaaaaaatggtgaactaattagaatttaccaattttttttagtagtgacaatggtgataaatattgagggttaaactgtagtgtctccacacggtaatctataaaattcaaatccaaacaagaagcttttttaaaaaaatgtcacctggagtctaagaaaaagtaaaaatatgaatgcagtcaatatttttcttatcagtcatatttcatcaatattagcaaaattacccagttccatgatgtatcttagcaatcttgtcagtgccaaatttttcagaactgtattcttatagaaccttgtaaggctaaaatttagctaagaaataggagaataaaattggaaagcaagtatttctagtgaataggctgtcttctattaaacacctcagaatgtgtcactctggtatgcaaaagactcagagcatttttagtttgaaattatgcaatctgtgcacagtatttgaaatataggcactcctacagtaagtttggaggagaaaacacaaatctaaggactaatacaatttttttttcggctttttgcaatgtgaccacatgtaggccaccaaaggcctcagaaaactgaggggggaatttccaagatgtctttgtgtcttggccccagggcaaaggtcctgtgtctgcatagatgttaccactctagttaagtcaggttttgtgtaagtgtgaataaaagccattatggaaatacctggctgatgcctttccttgtgcttcttcaccacaagtaattattcaggcaagagatcaaggctgtcatctcttgctttaaaggagtacatgaattatcttaggttcttccaaggcagattgcttaagaaagctaaagtttatactaaaaattttgttttatgggaaaataataggaaagacattgaggtagcaattatctaagactctaacataaaatctgaggtaggcattggacataaacgtaggaggctccaaatcagcccaggcagcttccaatacctcctctgaaattgggtttttaaatttgtgtagcattgctaaagaggaagtgcctttttttccagtggaataacattctgatagagttgaattttaaaagggcacttttctgctgggtacaagttaatgaaatagcattaagtgtaattagtttttttagagaaagaaatatgcaagcactgaattgttagagagacagagaaacactgcatgccaaaacttgactttcaatacctgagtgaggaggtattaaaatatatgacacatcctttggatgagattcttgagaagccatctcaagctttctgacaccaatattttcctttctttttggaatatgatgagtgatgttttgtggtatcctaatcctattactgataaaagtaatatgaagaactctcacttctacccaggcctacagtgttttgttttgtgttaaagtcaggggaattctaataggattcccaattacgtaaaagaggttcacttgccattcactgtttcctctaccttgctacagtctttatttggcattaagagcaatggcataatttcatgtcactgagcaatttgcagattttaactctctgaaaggtcatagaggcttttggtgtgatcttagaccttgctgttgtgatgccctttgcatctgatttttacttctcttaaatgaggtttagcctaaagctgcctctttaaggtttttgttgttgttgttttgtttttgttttgttttgttttgtttttgtgacggagtctcgctctgtcgcccaagctggagtgcagtgttgcaatctcggctcactgcaaccttcgcctcccgtgttcaagtgattctcctgcctcagcctcccgagtagccgggattacaggcgcccgccaccatgcctggctaatttttttgtatttttggtagagacagggttttaccatgttggccgggctggtctcgaattcctgacctcaagtgatccacccacctgggcctccctaaatgctagaattactggcgtgaggcaccgcgcctggtctcctcaagtattttaatgtcggtctaaaggtttcttcttacataatgaactgtaacctaactagatgtgtaaacagactgtaatctactcttgtaaggagtagcccagtctcagccaatcacagcagccgtacttcaaccgctcgcaggtgaccaactccaagcttgtccaacccatggctcgcgggccccatgtggcccaggacggctttcaatgccgtctaacacaaacttggaaacttccttaaaacattatgagattttatttttgtgattttactttatttcattattgtagctcatcagctatcgttggtgtttattgtatttaatgtgtggcccaagaaagttcttcttcttccagtgtgggacagggaagccaaaagatttgacatccctggaactttaaaccatgttcaaatgcagagctgtgaccaatccagctgtttctgtacctcacttctgttttttgcgtatcactttcctttttctgtctttaaattctgtcagatcacctgacagtgctggagttgctctgaacctattctggttgaagtggggtgtgggcgaggggtgagtgtgctccttaattcacaagtatttttttgctcaattaagctctgttaaatttaattgtctgaagtttttcttttttttttcttttttttttttagactgattgtcgctctgtcgcacagggtggagtgcagtggcgcgatctctgctcactgtaagctctgcctcccaggttcatgccattctcctgcctcagcctcccaagtagctgggactacaggcagccgccaccactcctagctaatcttttcgtatttttagtagagatggggtttcaccgtgttagccaagatggtctcaatctcctcacctcatgatccgctctgctcggcctctcaaagtgctgggattacaggcgtgagccaccacacctggcatttttcttttaatactttcttctttgtcttgcaaggttgtagcaaattgtgactttgcttaaagtaagcattcatttgacttagagttatatgtaattttctataagtttatattaagttgatttaaaaaaccaacagcctatccatagtaataatgatagtatgcatcatttctcgaatacttactattatattgggttcctgctgtaagtcatctcatttattcttttcagtaactctatgctaaatcatcaccattttgcctaaaaggaagtacactcagagaatacagcttggctgaggttcagagaaaataaatgggaaaaattatagtgaaatccataatttcaactacagcacaatgcctcccaaccaatattgcttgaaaagaacttacttaagttttattttgagataattgtaaattgacaccttttgtaaaaaaaaaaaaaaaaaaaaaaaaatacaaagtggtcctgtatactgtccgcctaattttccccaaggataacatcttgcatgaatatataatagtataccacaacctggaaacagacattgatacttggtacaattcaccaaactcaataggaaattatgaataaataaaaatataaaacactatgggggtactaaataaaaatattatataaaaagatatcatttataagttaaaaaatgtttgattagtgcatagttttaaaaatggctcaatcaagagtatcaagaaggagggtataattttgtatcactaaatggctttagaatattaacttgggtaaggaggaaaactttttttctgaagtaggtgattttataatctttatctaaaactctgcagtgtggtgcagaaccatcattgcagcttggagcacaacatctatcatagattaaagattacaaagtcaaaaataataccacaaatcactcctcttgatgtgggattcagagtaaacgtgtgaaacataaatagtcactataaataaatccatgaatgaggctctgctgcctccacgacagagattaatgaagttttaggatactaagagctcaagatataatctacagctttaaactgatgtcaagattcagaactgattgctttaaaagcccttcatttttctagaaaagattgatgactgtagtgcagctaaatctctcccatgcaaaatttatgtaatttggttccaacaggtatcttatatggtagttttacatattaaatttaactatacaatatgtaaaagttaaactgttttcaaagcagtccacattaacacatgatattttcaaagtatttcttaattttagaattcattggaagtctgctcatgaacatatttggggtttgtagctggaccattagttaacttgagtagttcaggtggagaatcataaaaattatgtacatattggtaaacatttaattttaattttaccactcatcatttagggcctgtactttttttttaaacagggatttgccaactggagttgtgttgtatttcttccaaaaattatagccacaatgcctcaattatgactttcagtttggttttctttgagttaaattgaaaacttaaagataccttttaatgcaatctaagctcagaaatcctccatgattttatgaggctttccttcctgtatttcacagttatctctctcatacctgacttaacagcagttttttatagtaactcattttatatggagtccttccaaggcattcgtctaaattttcaaagaagcaataactcatatttaattgggttacataatatttgaataacttagtaattaaaacaacaggtgctagtgatataaatacttttgggaacaaatacaagtgtctcttggtaagtgtaagatttaactgctggaaacagaaaggatgccagtaagcagtagtgttcagtgagttgtcagtgtcaacagtcagtatgcttcacatgcataggagaagtggttaaaccaggtcagcgatggcaatagctgctgtcctttgtcctttgttctgtttccatcttgatactgcatgatatgtcattggaaaatcgtaaattaaatgcatgcggtcaatagagaggtgattggtaacgtgtcttggtatatatatatccaagtagctagtaatatgcttgacaaaatgttgatatttaatatatttttgttctcttccatgatttttttctataattagcttcactagttttcaagctatttttctatgtagttgcaggcttctttgagtttgaaggagtgagtgttctactagaatgataccctttaatagaattccagatgaaggtatataaatagatatttttatcttattaataaaaagcaaaaggtcttgtaaaaaatattactcaccaaagtaaaggaaaagcagagtttccttttcttcctgtcttccttcctccctcccttcttttttcttccttcttctctttcattcttatttttctttctcttcttaaatgcttccctatcttaagctacttcttggtttgtgttactttgaaagctaatatttcaaaattttgtccagatttccctactctaatgcttctttaggaaagaggcaaacttttttgtttttaaattcttctgtaagttaaaacaactccttagttaaaatcacacattctattttctaatatataccatgctcttccaatatagagcatgtcctgatttaaggagaaagatggttgaatgtgtaagctgtaagcagctaagctgcttcagctttcccagtgtgtcagcaacgccagggctatgaaaagatcaagctgaagaaacacggtttaaagttatctcaggtttattttccttacaagctgccataatccacacatagtgcgcagtcaaaggtgctggaataggacaatgttttatgatacaaattatatcatccatgttaacagtagtacttactcttctaagaccttggatgctactaaggtattagtagctcctcagttactgaccttaaccaagatcctttactgaatctcactgcaagggtgttgtgttcttataaccttgagtgcttcacatttggcttgaattcccatcctaccatgaatctacctatataaacctgggcagtttttttttttaatccaaaaatgtgaatgacaaaaatttctgccatatattatcatgaggattactatgaaatgcttagcccagtgtttagcatgtggtagtcaacaagtatgtgttacctttgttttaaggtcaggtttattgacatgttctgattccaggccactgcccccctgattggtatttaaaaaatttttttgcccaagaccccactataaggacaaattttaaagtgtgatcatgtatacacacacatataacattttaaagtgttttatatatatatatatatatatatatatatgcacataattcatatgtattataaaatagtacttaaccttactatatgaaattgtttttttttctcaagaatgctggtcacaatgcactaaattgatttcacaactccactaaacatgtcacaacgtgagtttgaaaagtcttagattataaaagatgtatcatttgtacatgaaagagtatgctctttggtcattttacgtccctttctgggaaaagattgtataataacactaaaatatgtaaagattaattcttatagtccccaaaattgatattaaaaatagtttccattataacctgctacatctaaaatggactttagaaaatctagattttaaagtcttctatcaacatttgactccttttaagaatttgtgcttgatgatagcttttcagaattttactgtttaatgaagataggaactatttattgaatgtctacttgtattctatgatattaaaatagacagcttgttgaagttatgccctgtggttgagtttgcttcccccttatttgaagaactcatcaatctctagtacaggaatttcaggttcaattagtagtttctgattcaacactccagagtccatctgtcccctgtaactgtttggtgccaatggcaatatgcggaggtgaaggtgagggtttccttcataccctctggaaatctttaagttttcagggaaacaaaagaagaggcaagagtgatgacttatggatggctgtctcattgtagtgcttataaaatgcaggtgtgtgaaatttgttctctgcattataattggaaatgcagattaaaggttttggaaaccacagttattcattgtttagataggtctgtagacttcctgaactatgcacactacgtggaattggcctttagtggtatttgctttgtgtattaatggcatttctgcctgaagataatggcatttctgcctgaagatagtgtatttttggtagaaataacttgtcattcaattgaaacattttgcttgtgagatgctggagtttcaaaatatttatctgctcatgtatgcacacctgtttccctgcttttctgttttctgatcttgacacgtttgtttttgtttttaaaaatgtgctctgtgattttttgtggaatgtgacttttacattctaactcaattccaaattggctcaagtgtcccaccaatacactacttgtttaattcatattatgaataaattatattgacagttgtcttttccttcatatatttggattgtacctccagtggaacctgtattttttacacttttatccaaattgtatattatatagatattagtatttatttaatcactttcctaaccactcacccaccagattcagtgtgctacttttgaatttagaacattaagaatttcagttcactggtcacatttgttttaagcagacaaagatcctaggcgttttccttggaccttgggattgacagaaattttttacagatgttaaccatggtgaaattgctttttaaatatccctgttgatctctttgaataataaacgggaggatttcattagatatatcaaagtttccaggctttcccgaaatatatttgaaagttcatggccaaatggagattaggttttcaggccaatcctaggcaaggtgttaacattgctgttaccacactcatatgtattactcagtgaagacatgtttttaatatgttttaagatttgtctttgtaatgcatctttgtaaggttaccacaactaatgtattttattactcttagggaaatttcagtgtggtacgtgggatgctaaataattaaagctaaatagttaacatgtaggaaacaaaataaatacatataattttgttttaaaatttaaatatgtaaaatctatgtttgcactgctttgtatttagcagatattcccccagttaatgtgtgaatcagttctttgaaattcaagctttatcttaaataattcttctttattaggtcatttcagtgcattctttacattatttcctctttttttttttaaactgtcctaaagctgttgttactatatgcttgattaaaagaaaatttatttttgaggttctctgagcttggatattttaaagcatgtcagactcaacataatcatttctgagtttccacgttagtaataaatacacgataagctggatatcaacaataataattgtactcttttacaggaatgatggcaattcatccaaatgtcttgagatcagagcctgtcttaacctttgtattttcactttatagtggggtacctaggacatagtaagcactcttaaaattttaagtgaatgaatggatgatagatccatctttccttggtgttctggtggcagagacaaatgttcctgtgacagcaagcagcacaaggtcattaagtagtactggctgggaaaatgccaggctttgcattgtattgtggtaaaccaaattcctgaagcccaaagccagagagccgcagccctaagctccatatgaatgttgatcctaggaaaaatccctggtggtttgcctgaggaatcattggcaccttcaagatgtgaaattgatgccaatgtaggatgtaaaatgcaaaagccaggcaggaaaaaagattcagatcatgtggagtaataaaaaacatccaagttcctaccctgtgccagaggaacttaatttattggcttgccccgttctcagtatggcatcacaatagctgtacctaatttgtattgtgcctttcatgttacagaatatttcacatgcacaaacatgtttagtgaataattaggatgaaaaaatctcaataaataattggtataagttttggagttcacatcttgaggttaatatttttgttgagaaaaattgggatggatagaatttgcaatagacatacattgtttgctgatgatcaatttagggggaagattgtcttgtgttgttaatatttaaacatgtttattctatccaaattcataaagtttcaacatttggagaaacctttaaattgtttttgcttatcttccatctgattcacaatctcctttcctcccaaacaaaatgactttgtgaccatggcataaaatataagaattcattgtctcttagctcttaagtccattccatttttaactaatattgttttcagaaagttctttcctgtattaaacaaaaatctttcttctttcaacttcctctcacaggtccttatctttcctttgaagctacttgcaataattttatgaccttcaccattgctaataatgcatgcttattatgttttaagatacaattatgtgcattattttatttgagctgcaaaacaacccattaaattagatagcttatgtgttattatctgtcttacagatacatacactaaaatacagagaaaataaataattggccagtgatcacactcataaaatgataaatggtgaatccagggcctgtgcccaggtcttctgatttaaaattccatgttcttgccatgatactatgtttcctcaaagtattctttcttttttttttttttttttttttgagatggagactcactctgtcatccaggctggagtaccgtggcatgatctcggctcactgcaagctccgcctcccgggttcacgccattctcctgcctcagcctcctgagtatctggaactacaggcacccgtcaccatgcctggctaacttttttgtatttttattagagatgtggtttcaccgtgttagccaggatggtctcgatctcctgacctcatgatccgcctgcctcggcctcccgaagtgctgggattgcaggtgtgagccactgcacccggccagtattctttctaatttttagtgatgtctcataaagtctttacttcttcagattatatatcctcagcttctttagtttctcgattttgtcagccacttctcaagtgacctgattttcaataaaagcagctagatgatgagtgctagttggtgtgtgtgtgcatgtgtgtgcacacgtgcagatcttgagaaaagttcatagacttctggctggtatttataaaatattttgtagttacacccagtctttgaatgcccccgtacacacagcttattttttgtttagctgagtctatcatcttaagtaaaattttatgtattttcataaacaaatttgtacatcatgtgccttctcagaggcaaagagttttcaagtgaagaattataggcctaactctttattttctatgttactattttgtcaaaccagaaaaatgtattttttctaggcagctgtttaagaatcataagtttttctgtctgcactccgtatttgattagagggaaaacctcacatcttaccaacttcattcattctggctagcacagaaaataaatgttttcagattgtagcagtggattcaataaaacaaaagtatttccagtgttcacttagaaactgctttgtccagtagatacaggattataccaggatctaaatatcagaggaagaggttacccttgtgtcaacaattatataattctatactcaaaacccaagaacaaactaaccacttcctaaattatgaatagcagtagcacaagctgaaaccacagttgatcagtgcatataaaaccagttttcctagtacttgtatataattattttcataatattttgcacaaaataatcagaagtcagaaaatatttctgcatcagtgaataaggaagacatttagcaagataaattcttttaaagtaaccatttctgaaaaatggttttaaaaacggcattgtatttgttgcatgagcattcatattaaccaacttaaatagtcctctttaaaactgatttctcagaaactctactgcttacactgaatgtttcaagtcccttgaagctaatactttgaaccaaataccctttctttgaggctaattggttagaagatgattaaaattcggatttgaatttcaccagttttccacattgaataagaagcagcattgaattcattgtgaagacagccaattgctcagttcaagtaaggatttttggccctgctaagtttctgatactgaaatttaactttttaattattataaacttttatcaacttgtcttcaaaaatttctaaaataccgactcatgaatttaatctctcttagccaagttcttaaagggccttagtaacaaaagttgccgttgatcttggtagcttttcggggttctggagattctctgtggacacctaggcattcttccttcagctttcctgtgtatttgtctttctttgctctcaatgtgttctgtgtgtgtttttttttctcctatcactgcagcatttgcttagtttgacttcttatcggtgagactccttgtccgagattattggccagcacacttgatttaagaacgctctggaaatactcagccacagaattatgcccccacaccatgaatgttgtccatgaatgaaatgctgttgtcattctctagacctgttttagagtcatatgttctgtagtgctactgtccagacattcggcatcttctttgtctatcttctctactcctctcctagactgttaccttacattttccctctcctcaagcctctggcattatttctcccatcctcactcttagatggtaattttttttctctgtcacaaggagattacaagcaatcagaaaaggacttctgaacactttcctcacgctacttacctgcatgtctcactggccctcagcaactgactttcctcccagtgaccctaggcgaacattgtttgtcttccttactccatctcattcatctcttgaccactcaagtgtgcctcctgcactcttctctctctctcctcctccttcttcttttttccattggccattctattggttcattaccctcagcacatcaataaggctattacttctcccatctttaaaggaatatgtgcttctcctgatcccacatcgtcatccagctaccacgcatgttgtctcctctcttctcagcaactgctcacgacagttatgttgcattcactgccctctttttattctcttctaaactcatgctcatcatattttttgcctcatcatttgtcagaatcgcacttggtactccatgatgacgtattgctaaattcagtggaaaatcctcaatcctcctcttatcagacctatcatcagtggttgacacaactgattattcacttcttttcactgaacactttgacactggtatccagatcagcactctctccctgttttccacctatctctctggccactcctcagtcctcttcactggttcctccttctctctctctcaactggaattatgacaatgtttctagattcagtcccctttttaatagagatcactttataaccatggcacctcttcctaataacattcatttgacaatcttgtccagtctcatgacttttagtaatatccataaacctctggatctcaaatttatgtatctagcccatgtaacctagaatcttctcttgaatacccacacacctctcaatctttccatttggattattgaaactacttctaagtggcctccctgttgctaccattgccttcctgcattctattttcagcacagcagtgagtgtgatccttttaaacataaggcagatgatataactcatttccttgaaactctccaatagctcccaactacagttgccaaagtgaacaaatgaaaacacaggattgcctagttttatatgtgaatttcagctaaacaatgaatgattttataattttggggccatacttatactaaaagattatttattgtttatctgaaattcaaatgtaactgggcatcctctgttttatctggcagctctactccccagtcacccagagtaaattgctaatcctcaccgtgacctacagtgtccccttgtagtcctattatctccaacctttggtccagccacagcgtcccctccttgtcattccttgagttgaatttacctaacatacttccaaacagattatttgccctgatattccatattcatgggataatcttcctcacatagccccacgacttcaagcgtcaactccttaaggttttgcttgcacgtcagcttctcacagaggccttgcctgtcattcttgtcttcttcctgctttactttttacttcttcctgcttttacttttttcctgcaatacactttaccatctaacattgtatgtgcattatttatgttgtgcatggtctgtttttctccaatagaatatgtattacataaaggcagagatatttacttcttttgttcactgcttgatcctcagcacctagaagagtgtctggctcgtattagttgctcagtatgtatttattgcaaatgaatatatattacataaatggtgacaagatagataatcaagagcctattagtgtggttatgaatgatcatattatgttgattagggtaatggtgattagtttcacagtaccgtatctgaaatcagctgaagcaatgaaagttttagggaaataaagatgatttcagagcattgtacacttagggcaaagcgatacagaatagaggggcagggtaaagaacaaggcaaagaaaagaatgtaggaagatattttttcaattgaccttgaactttgtgggaagatattgatcaactgacctagaactttattaaatctcactgtgactttgcacctcctgagtattctagccctgcccaatgtagacattagattctacatggaaaaaaatgtgcattattttaatagtcccgtaagttgatcctagttgatagaattttaccttttgtaactgcatgaatgttacactttgaagagtcggtcatctctcacctgtactgacaatgctgttcagtcacccctttatctgatgctggctgctccctttccagactgttgtgcacccagtagattccttgcatatcagattgagaactgatggatctacttttagaagtttattaaacttagggccgggcacagtggctcacatccgtaatcccagcactttgggaggctgaggctggcagatcacctgaggtcaggagctcgagactagcctggccaacatggtgaaaccccatctttaaaaaatacaaaatacaaagtgcaaaaattagccaggtgtggtggcggacccctgtaatcacagctacttggcagcctgaggcagaagaatcccttgaaccctggaggcagaggttgcagtgagccaagattgcgccactgtactccacacaccagcctgaatgacagagtgagactccgtctcaaaaaaaaattcagaacagtaagatcttagcctgggtgtccttagtctctgcctatgcagaatgtgaatcatcctgtttgctttatagtttatatcacagtggcaatcatatccctgagctgttagggatcaaagtttctacattgttctcatgtacactaaaaattattgagaataaaatggaccactgtacatacataaagtgtaatcatttatttaacagccttccaattatgaacatttgttttaaattttatttttaattttctctattaataatgctacaatgactatccttggattatacttctgattatttccttaagataaaaattctgaatatggaattacaggatctgaaaaaatggacacttttaagactgcttgtggaaaatattgttgaattgtcttacagaaatactttgacattttagtcttctttacagttcatgagaaaaatatttttgccccgtcttgatctacaattgacattaactctcctctgtcttctgatttcttttattcattggccttcttttctaattgcaaatatacacgtatttctgtacttattatattaagcttttttctaatctttcttctcataaatctatgattctttcttatttttttctccctgccaaacttaatgaaaaagttctacttgctttctccatttcactgctttttaacggccccctttcttcctttcttacttcgatgaaacttctctattcctaaggtcacagaacaccacctgtggaatagctacagtggcctacttttactcctctttcttgttgatctttccattactttgatgttattctccctcttctactcctcaaaactctcttctccttgggaggaaaaatcactaagacctccaggctctcttcccgacccttagattgatctattttgagacaccagtgctggttgatccagtgccttggccattggtctaagtatggggaaatcccattttcctgtcttctatcctcttttcttttcatgtgtgctcttagctcatggctttaacatttgacatttgtatatgttaatgattatctttctctattccaagtgagtcctctatatttaatgccacaaaaatgtttgcagttgtctgctggatatatgcgtgtcaatacacctccacttattataaattgacccaacctgaacttttccttctttcttaccaattttgcctgtattacatagttatgtcactgttaatgcattccctgaagctagaatcatttaaaattaagcatatctcttctctccctgattccccatcccaccagctaccaatcctgttggttctaccatggtcatgtactttgccacccttcttttcatttgttttcctcaatggtggtaatcaatcagatcataaagcatactctttttagcacttcattaatattctgtcagatcctgaatactattggagatcaaaatatccaaaagacatcaagatttggccccaccatgaaagaacttcgaggcaagtaggagggacacgtacaacaatttcaatttgatgtagtgctagacatatgaacagaatggtggatcacaaaggtcgaccagcttagaggtagtcgtgtatatatagagagaggtctcactagtggaagcctcctggagaagctgagtctttattagtgggtagtgattagccatgtgacaaggcaataaaagcagttattattaacaaagggcaacatcaggagcaaaggttcagatgccaaagccttgttcatggctcccaccagagtctgcacacccccttctcccaacccaaggcacctcctcacctaaaatagaagtagaaagccagaaaaattaaacttgtatgtatcccaccttccttaacatctcttttgactcttgtactgctttgtgattaaatccagattccatagcatggcacacacaaagccttcccaatcagaccccaattcattcctgcagcctcaccttccaccatctactctccccctaatagcaatgctttgtcacagtcttcatctttttcttcacccaacaccatttttttccaactcagtttctttgtaaatatctaaagtgcttctcccttctaatctatataataattactttctaattctctaagctctagattaactttgatctcttctttgtatcacctccttaattctctaggcagaattaatcacactcacagcacttgggtttttacttccgttatagtcattacctaaaggacacaggtttttccatcaagagatacgaacctcacaatggctatattattcatattcttcatttgttgtgagcacgtgacaggagtataatatagtctactgaatgatttaactttttatctaaccctgttttcagagccatatcttgcttgtatcaatagaagaagccttttcaggtgtgtttgaggtgaccgtaccaacttttcacaaaaatattctatgttctctgttgcccctggtgatcgttttgacctgcccagaattctgaccgtgagacacaatctcattttagtgtggtgaccgacatgtaaaaacatgaccaaagaacatataactgtttatgcttttattttttgaaagtgttcagatctgtgcatgagtactaaagattttatggcagaatagggatgtcacagagtgatttaaaaatgtaaaaaaaatgcccaaacacttcacaaaataattatcatttatatttttctccattgttgaaataggaacggcatgctaactagttactttacagaagtttcttttaatgtaacaccgtacactgtaattaagataccagtgacatggtgggcctcagagttgaaatcctgcattttgcataggattttttgttggtttcatttcatataaagattttataggcaaagaatatgaattcagaaaaccgacataggataagtgagcagccaagggtatcattatgcttattttttaagttctttagcacagaggtattcgtagccataaagattaatttgctgatgtgtaatgcccatttctccctccagaacaactactgaatataaatctgttttagaagagaaagaagtctgtttcagaattttccttgtagggttggacaagctctgatttgccacatcagtctagaaagaatgttgggtggagatgtcattgaacgctgcctaatgaggtcatgccactccatgtaacacagaccaacatcaatcatgagctatattttttaaaataattatttatctttgctaaacttggtacaacttgggtaattaaatatataataaaaatgtgtatgataatccctaaatatgtatagtgctgaattgtttattaaatttttaaaatatgctattttgcttaatccttataccagttttcctaggtaggtggaatcatccctcctttgaatacctgttcctacagacacacacataaatgaggtgttcaccatgtaattttgacaaacgccccattttctatggctggtaggtatgcctcccctaccctgaagaagagagtactgtttgcattgtcagcagtaggagagttagtgagtgccttctgacaggataaaatgtacctgggagggatgaatggcaggttgcaggaggcatactgcattaaccgaggcttgtgaaatctgtacaaagcccttccattgagttccactgtgaataatctatagaatgtttaaaataaaggccattttttaagtttgaaatttaaaagcaggatatttttctagaaaagtaattggtatttttactaatactctattgaccatttgttgtagaatgtgtaaatttctgttatttaattcagacaacaatggcaaaggcattgtttaacagggagaccagttagaagactgtttcacatgttggcctgaattgtaaagtggcagcaatggaagtagggaaaatggtcagattccagacatagtatgaagattgagccaagataacttgatgtgggatatggagtgtagcacagaaaagagaggagcaaagtacgactgcaaattacggaattggcatttactgaaatggtaataatgtgttgataagaaataggaattttctggtagtccgcgtataaatgatatgcaatgctttgaaactatagaagatcaccaaggggaagcatgtagacagaaactagaaaaggtccaagcagagatccttgggacactccagcatgtaaaaagaaggtgataaggaggaaccagcactcagagctaaggagaagcatcttgttaggtaaaagaaaatctgcagagcacagtgtgtgaaaagccactttcacacactgattggtcagttagtaagactgaaaaaacagaccattggattcagccatgtgggggggtcattgctgacctttgcatacattctaatggcttcccctgaattagctcatttttcccctcaaagcagttcactgggggatttttctgttgccctctcagtttcagctacttaacactctttttatactgtcaagacattttaaagtaaataactctgtacccttatttcttactccaaagtaaggccttccactcaaggcacatacaaagctagaatgaagttgagtgtattatccaactatttaacttattgaacatataattgacaatgtctaccaatatagccactattcctgagctagatttccacaaaacattccacgatttcccttaatggtggttgagtgatacattgaataaatattgtactgtaggataaatttctgtaagaaagtgtcttcaaagattttgggtttgaggtatatattctttcatgttttgcagtgaaggtgtgtttttcttccaatagttcttagtttacattttctttcattggaagttcatcactgttaggcgttatcttgagtattataacaaagcaaatccacaagtattcaatataagattaggaaaaaaattcctgcgatactttgttgtcaaacacttgccactgatagacgttattttagcttttaaggcctgtcacattgtttattcagaggaattgtttttcaaattttagtaaaaaaaaaaaaaaaaaaaaaccttaattttggcttcccacagatgccattgtggaaagcattcttagtactatgttatttagtcatcccatggaattctagttttccacattgattattacttataacccgcagtttgacctaggaagtgggaaactgtgtattgactctgactcaccagccaacaatgagcctgctctgtggtggagttgacttctgtggagaccttcaaatctaaagtgcttgcactagggtgaatttttttctttagtttgtagaccaccagtgctttaggtgagaaggtgttgagagtaacagtgttttagtttgtaaatctggttagatagtaatggttctccagtttcatgatgacgggaaaagtgagtccgtagcagttgtttcatctatcaagttggtaagaaggtctacttagtaaataaacattacttttatttaagacaacactttgggcaaaattagccatctcttttttcatatatccattcttctcaggaagacttctgctctccggggtttttctgaaaccatgaaactcatggcctttgaaggccagttgcaggtttgagccttaaaatgtattgcttttaaatgctggctcatacgcttttcatactggactgttgctgtgatgggttatatagatatgtcaagttttattcaattgtcatgctctttgaataagaacccctcaattttaagccttgatgtgaatataattggccaccttccctaggatttctcacttaaatatataatctgcattactcacaccatattaaaacatctgttcttgagtaggaatgcaagcatttgcttttcattgccggcttaaaaataatttaaaaacatgacccagataactttttgaatgaattcggataagaacatagggaaaggcaaagaagcgtgtttaaatgaattgtttcaggacattcttgtgtctttacagaacctcccgtgagttgttcctggcaggcatttgtgtctgcatgccctgtctgctgcttaggctctttaaaagtaagacctctgtacaatatatcagtttgacattacataaatgagattggagacacctttaagaagtgatgttacccaaggctggacatttattgtcttctcttaaacacctgatcattttataatattgttttatttttaactccgacaataaaacctaatctgcattcctaaccttttgttaggtatgaatgaattgaaaactttatcagtttgaagtgtactatatgcagttgactgggaaagttgcaacataaatctttgtaggccctaatagttttgcaacagttgctatgctactcaaggtaaacatttatatgtgtgtatttgtccaaggaagattcattttaagtgtgtttttaaaattgcactggccacaaaaatcctaataaaatgacaagctatggttttttagaggtaagtaatgactgattgtgaaattataagtagttcagatagtactattccaaacaggaagtcagcttttcttttttctaaaaaaggggaaagatgttaacaagtgcagaaaatatttaaggtagccataataaaatacaaaacagtaaaacactgatttttgaaaagaacagtggaaaagtcaataagaaaacttaacttttgcagccaaacttgctgtcttgagcttgttcctatggctatgattttgtctgaactcctgggctgccagttatttttcattaataaaaatagaaatatatttgtttttcagtaattcttacatactaagttcactttttttctggtccacattcaccaggatttgtgtgatacttgtttggttacttgtgtgattcataatagcagattctcgttttggcaagagaaaactctcttctatgatgcagtatacttggcttctcacaaaggcaagcattttctcttgttttgttaatagtgctcacctcacaggtttttacttttgttcatttgccttattttttatttttttattttttattttttgaggcagagtctcactttatcacccaggctggagtgccatggcccagtcttggctcattgcaacctccgcctcctgggttcaagtgattcttgtccctcagcctcccaagtagctgggattataagcgtggccaacatgcctggctaattttttgtatttttagtagagatggggtttcactatgttggccaggctggtcttgaacttctaaacctcaagtgatccacccgccttggcttcgggaagtgctgggattacaggtgtgagccactgcacctgtgtgagcccttacaggtttttaaataaatgcttgttgaatgattgaacagacatggtgtaatattatcctttgtttgctcctataatagttaagtggagaagttgatggcatgtattagcattctagggctgccttaacaaaataccacagacttaaacagtggtgccttaaacaatggaaacttgttttctcaaaattttggttgctagaaattgagatcagggtgtcagtaggtttggtttcttctgacacctctctcctatacttgtagatgttcattttcttcctgtgtcttcagatggtcttccctctctactatgtctatgttaaaatgttctcttactataagaacaccaatcatgttagattagggtccaccctagttaccttattttactgatctctttaaagaccctgtctccaaatacaggcattctgagatactgtgagtaggactttagtagaatagaaattttgagtgaactctaattcagcccataatacaacgtgtgtctatattcatttaaacatttttggtatcagttttctaagcacggacttgtttccttcagatttttaggaccatactgcttctatttataagccagacatgcctttctaggatatttgatgtcttaaagagcagggtaaacttcatgtactctcaaaattttatatatatatgtaaatgtagaattatcccacagttgtaccacagggcagtgtttcccaaaactcactcatctgctaaaacaacaaggagagttaaaagaaaaaaaaaatagagttcagtcccattatagacttactaagttgtttattatatttttgaagctctcaagataattttgctgaagctgtattggaccctcttgtatctgataattaagtagaatttttacatgtaaaagctggcaagaaacttgaaggtcattgaatatagctaccatattttgtagtggaggaaactgaggcacagattgattatgcagtttagtcaaactctcttccctacatgtgagtatctctgggatttagagtccagttccttaactcctgatcgtagttctctcattatcatgttgtcattcagagtaactttcatcagagaattttaaagacccgattttgcataggatccttatctcatggagctgacatcttagaaatgtactctttggcaggacacttcatcacatagattgtagatgcttttctgctctttgacaacctgtccttacaaagtaataggcctaaaagggtctaggctagggccacaccctcaccaagcttgtcattactgccctgcaggtgataacacagaagcttttctctggctgaataagggttttggtttagttgtctacattgcagaacaccaagaaactctgcttccggtttgtgtccattgctatccactaaattgtcttagcacaacctatagcttaaaagtacaccatcatatttttatgaagaataaaagacataaacaggaaatgtgaaaatccaagtcaaggcgtattttgcatattctaaccagtttaacagcccaatcataagtgtttttaaatatcaaaagtattgttagaattttctagatactaattatgggagaaaatgctattagtctgtaatgaacagtgttactttgttagagagaaaagtaaaacttaaaaattcaaagacatttttttttctgtaacttctttttttcattgctcccccctttctctctgagagtccctttaaacaacttagaaaagcagaactttgaaactgaacaactcggctctttcttgaaccagtgggtggagggacagtcatgagaaggcccttaaatagaagcaccacttcccctgttctgtccagggattgattctttgaatcctgggaacttatgttcattcttctttcctgttttctgggtggggaccactgtgtgtggggtgtggtggggaaagagttgtctttctaaatttatcaaattttaatttaaatatttagaagcttagagatttgtaacaccaactgatctatacatacagtaacagaagatgcttttctcccaacctttcacatttgaagggatgggtatgcagattgcagatacttcactggacctaaggtgtgcatcttttgtttgcccattattacaggcttatcttgttttgccttcttttgtgttaatattttggactgcatctcagcaatattaatttcagttagaactttgtattgcttcaaaagaaatgctttattcagagagtctccaacagactggaagcaaaataagccaaatcattcttggattacagtctaattgaaattaccctacatagcaattatattttatgcttaaaatatacatctgcaccctgacaatttaataaataatgtatactttttgtattaacttgctagcaaccacttattttatctgtacagattttgaaactttccatttgtaataatactgattctttgactattattgaccccttaatttttactttataaaacatttgtatacatatataggcttatatttttgaaatatgcaaaaatttgcgttaactttttacaccataaatttaatcaatagtagcttaattagctaaattaaaattaaaaccgtttttagatcaatgtttatatctataatagagttttcagtcatagttctgtcaaagcaattttgtgttccttggacaattatagaaaacactgggtaataaaaacatattagggtaataaactctcaaagtttaacagactaatgggtagagcaaaaatatcataaaataattagaaaatatcttagtcctaatattttagccagatccttgacattattgaaattaagtctttaatagtaaccattgtactgtatatatatgtacttacacattttccatgtatctttgcgtatctttgtttattctgtaacatcatgtcataaacctcagatatacaaaataaaacttatttaaaaaacaaaaagatgaaaggagtaacagctgagtggagacttggaaagtacatgtgagtaatccaggcaaggaaggaggccagacattgtcattccactgtgcttttctcataatgcacacacaggccctggaacactgtagttactcaataaacttttgttaaaaaaaaaaaaaaaaaaaggatgaaatcattgttggcccaaggctgccacgttcatttctgccgattataccctgtaagaatgttcccctgtgggcagcgggacacccacaaagccaggagccccacgagggttgtgcctgtccagaggaaaggtgctccttttcctagtttactgggcagcttctgctcttcaagccaagtgctcacagagcagcccacagagggctgtgggacagtgatgaccctgttgtgccaggtttcatggatgaattggatttttgaaaaggtcattgtaatggtaaagatttatgatgtggatcaacggggggagagtttttgcatgtcaggtatggggacagatttagcataagttacaaagtctgagatgatattatatgtgcagtagtcagtgaagagactagactgattggaacaaaatatgcatgtctctgatgagtagcagattagagtggaaggtgagcagaggtcagtttttgagggctctgaatgctgtgtaaggaatttggattttatcctccagatgagaaatcacataggcatttgtccaaattcatcataggatcagtaatatcttatttagtagattaacccaggattatgcagcatagaacaaaaggagagaaaaatgattaaaggtaaggagataaggttagaagctgctatttatagtacatgtttttagtatggagcccaggatggaagtaatgagaatgaaaaggaagagccgatgtgttagtgttttcctatatgtgggcatttagattgcttccagtctttctaatcattgaacatatttccatgtgcataagtgaaagaatattcagtgcttatcagttacatcagctaaagtgttgtgcctacgtacactaacttctgcaggcagagcagaggagttccaatttaatcacatcctcagtaatcctttttaaaattcttgcccatctcatctgtgtgaaaaagtatccttttttcgtatgtgaaataatatctctctttggatttctctgataatgaagttcagcatattttcatatgtttattgaccattcaagctttttatctgtaatatgcccatttttcttccattgcatttgtctttatttttgtatattctggatactaatcttatgacagtcacatagtttgtcagtgtgttctccagtgtccctccgatctcttaatcttgtttattaggcattttatattaaaaatatattgtaggcaatttattaagctgatcttttatgatttagatattttctatcttgattaataagttctttaatgtcaaatgatttctaactattttgttctagatcttttgggttaattatttcttattccatttttaatttatgtgacactaatttgcataactaccaggtaatttttcagattaaggaaaatgaaaagtggaaaagaaaaggaaaatttggtaaactgtattatagttttcattctaagtttgtaattgaaccatgaagatatttttaattcttttatatgaccaaaagatatccatatccctcacggttggtggtaatgaaaattaatgtctttctcattgattttacaggaaatctatcagagttcatcttcatgaagtctttgcagagtagttatttctaattggattcaatacaatttcccttcacacatatttccagcctcagtctttataatttcttgcatatgtccagaaggaatacattgtcgtttttaaaacagttaacacaggattcattttactttcagcaattcacagaagctgtgagtccttcagtgctacccccttcagctttgccactggacctgcttaataatgctataactgcctttagtaccttggaagaccttattcgatatcttgaaccagagagatggcagttggacttagaagatctatataggccaacttggcaacttcttggcaaggcttttgtttttggaagaaaatccagaggtaagctccctcttcagattagaacctcatttaattttcttaacagctaatgtttcagattcttctgccacagcttctaaagggtagagtttaaaattcatcagtgatatattcaatacattttcttatcatttgagcatatttatatattgaataataatatatacaaaaggaggaacttagttataacccagtgggtgtggaaaattgaaagggggatacttctgaaaattccagttatatattatcttcaaaaatatcattttgatgaagtccttcattgcattttacaaaaatcactgcttactcaaacctaatacttggaatatgttgattttgggactcaaaagaaattatcatagctgcaaaaccaggttagggatagaaaaaggggatcctctacaaaaatgtttgtctacagtatctcccatgggtcagtattatatgactttgcattttctaagcctagacaattctaagaactatgaaaaatggcaacgacccaacataaaatagaattcatagttttcaaggcaggattcatagcaagaaaacaagaacctaaaagaacccacaccataataatttttaactatataaatttgctgttgaaataatcacttttgcccatatgggtgtatctttctctaagagtgaaagtgatgttaattaaacctaattctgcatggccaagaaattggaaataatcttaactgagttttctataaaattacctaatttttttagtaacattggaattggaaagcatccatagcagacacaaatgaaaacgtatagaaataactgtttaattacaatgcactcaaaatatctgttttagtctgtcagaaacagtgaaatcgactgctttggagaatgcagtgacagcctagagaatttatatgaaaggaataatgttcggttaatttgagccattcacaagggcagattgcaccagacttgctcttctaaaccttgtcagaaggaaacccgattcctgccctttcctgctctaagagttgcagcttttttggatcatgagctttaatctcagcaggtcatgttcagacttgcccagccctggtatttcactatgccaacagacgtggtttccttttggcaatatttgaaatcagtgttcaagtgcctgggcagttgagtcctgtccagatgctgaaagctgttacatatttataagatttgatcttgatgaataacttgatgaataacttacgagcaacacttcccttccctcccacttaggaacaggaagatgaagatctgcaagactagctgaaatatccatgaatagagcccttgttagcaaatttgaagttgattatcatgttgatctgtaagaagcaggggcagtgaatcaggttctaaactgagatctagttttttgacagctgatttctggatttgagcctaaaaacctcccttctagccaaggctttatgcctgaaaatgtacgcctggtgctcaaagatttggccagaggctagcctgcattcaaaagcatcggaagctgaacagatctttcagatattcatttaacactttcaaaattgaagccctttgcagttttccaaatttattaactttttaagcatgcaaaaagtgtgagaaaagcagtgtacatttttggaactttacataaactaaaatacaagtgtaggataacatctatatagacaaaaccaactcccctcctgagagtatctctacaaaggaataaggagtcaaacttttaaaagcttctaattagacattgaaatagatttcccacagaataaacatcacagtgttaccacattcatcttagaaagaccaccctcagattacattacagtaatagactatctttggactgaatatcttaaaagaatgaacaactaacaaagaaaaatattactgttttttgtagcaaaacgtataatattaatgacatttgcatttaaaaataatgattttggttggtgatgtgctcaaaatctgcattctttagaaaaacaaactaatacctgtatttgttttcttaggagataattatgaaaaggaaaaaaatctgaagaccaacttttacaaatatttggcagagggaaacttctttaatattattatagttaagctattcaaaaagtatcctttggtacattatctttctttcttcttttcctttttctctttatttgccttccccccccaaaagtactatacaatgtttcaagaatgtatgacatatgacttaacttaatgaagcttatatgcgtttgaagccttagcagtaggcagcataaatttcaaaatgaaatgccaaatttaaaatccttagttatatttttagaaaactgtggactgcataaatgctttacttttttttctttcactttcttcctctagttcagggttttcattcataccttgctactgctacaaaaaaatactgtattttctaagtcaagcttaactagtacgtaaaaagggcttttgacttttgtgtcaaacatgataaatgagtggaagctaagttaaaagtgtgtttaaattttcacattgtagcaggtatcacaactaagttcacttgggaaatctgtctaaccttttattgtggttaagtaaacattttaaaggaaacgtatacaatctcattttctattatcatgaaatagcatatttaaaactacttgacataggtgaatatgctttgagagctgagagcttcttcactcacattctaaagaagtataattcttaaataagcattgaagactttggcaaccagattttgtgtttgtgcatattttaagtcttcttcctccttgcccaggcattaaatactagagaaaagcttcaaataagctcatatatagttttaacaattaaagaggaatgtatgcatatactattagatcagcaaaatgaaaccaggtaaaatatgtgataccatttagcataatgagctcattacttttattagggataagttggcctattcagagcatttgaaagaaggatttgctttaaatatttaaaagctttgccttcacaggatcattttcagattaaaaagaaatctttcagtagccaaatgaaacaatgactttcccttgagttagaaaaataattttttagctgaataaggtgttgaaatggactcattgaattgggatttctttggtgctttcctatacttgactcaggttttagtctatcatatagtttacatacatttctaatttacaattacctatgcataattttataatacgtttcttaaaatacttaaattatcaaagacaattaagacaatataagtattaaaaacacctgatcacatgtataacaaatccaagaaaataagcatttgattcttaccttgtcacttaaaaattaataaaacttagcttttaatttaaaaaattggattacatcgtgattatttctacttgaagccatctttaaccagaaaatagctttcttttttttcattcatgtctgtgttatccatattagtggaaaggtatttaagtaggtttattatattttagataatatttctaaatttttaaaaaactttattaggagaaaaaaaccctgaaggcatatatgttatctgaaagtattcaatctcattggaattgctttatttgaatatttctaggggaaaaaaataggcagagatgtaaggcagaaaataaattatattagaagtctttatcctaatagtaattacctactattcatgtgatatgtataaattcacattgaacatggcatgttatttcgatataattttcctgaggcagaatcattttgtagttaaaaacaatggttctttgaggatttactgcaataaagaatattttgttaggtcctcaaaagtaggtattcttcatagaataaagcacaaacagcatagttaaccaacttgctaaaggagtagaggctggggttataaattagataaattaaacatttcttccacccattagcaggggaaggataggtatctgaaggagtttagtttagttagtctgaatttccaagatgggaaatcattcaatgcatttgaagcattgccttccaacaacttctgctcttataaagtatgtcattttttttcactcatggtctacacagctgtcttcaaatgtgcgttctcttcatgctttttttatattttatgatggttattgccatagagattatagaaagagctgttgacacatttcaataaattgttcttcactaattgtatgagcctaaaatccttttaagaattatacttgttttttaatcaaagcattcatcatcttgcattttattcttctctcctgtgttctccatgtctattttttttttttttactaaggttaaaacgtgtggccttttttgtctgtataaagtttcctatttatagctttcaactgttttgttggctctgttcttaatattacacaatggcatctctttactggtcgctaagtcataatgaagctttgtttgctatgaactagaaggtccaatttgtagttgtatatctctaaaatctacttacaataagagcggatattgttatggatattgttcatgaaataacgtaagatttctttatgaaaagagcttaatgaaatacattcaggctcaaagcatcaacatctatttttctttgctttcttttataccatatagtggtggatctgaaccttctaacagaggaggtaagattatacagctgcacacctcgtaacttctcagtgtccataagggaagaactaaagagaaccgataccattttctggccaggttgtctcctggttaaacgctgtggtgggaactgtgcctgttgtctccacaattgcaatgaatgtcaatgtgtcccaagcaaagttactaaaaaataccacgaggtaggtatacaattttctttttggtttccttcgggtattttatgtcttagaacaaaacagtgaatctgaaatgcgtttatgtttggaaaaaagacgtagtattcatggggaaaaaaaagaggtctacaaatagtttatgtttttgttttttaaaattagcacctttaattaaaattccagatattagggatttagaaagtatattctctggtagtataacatgagtggtcagtgaagtttttgcctctcataccaaaaataaagtgttttctgagggaaaaaaaaatgagtaaagtttttcaacttttaaacttttcaaaatatgaaggaaaaatatttcaaagacaagctcagagataaattattgtctactttggagaaaggagagctttgatatttatttttctacttgggacaacagagactcctaagatgacatattcataattataataaactttgtattattcatgttgcttcaaataacatgttaaactttgtgtggatgttttaacctttcatctctttattctttggaataaaagaaaatataatatgacatgttagtaattattgttttttagaaccctggaaaccttagaacttgtacacttaatgtttttcttagtgatggagtctcccaattaaatcccaacacctcccccagcagcatcatacagcatcattctatcaggaagccatccttcttgatgagtcaacttgaatttctacaaaacattaacattagaccaagtcaaaatctgcccttctgacatcatttcaatatgactgcctttcctttcatttttccattaaataagaatacagaacaaatatctaactaataaataaaatgatttttcatatgcatcaagatttcagtgaaatccttaatgaagtgaaagccgagctctagaatggaaacagggtcccttgtcttcgcgaatccagtgctttttttcccactttatcaattgccaacacaatattggtgaagggcaggaaaatcatgtcataggaagtgtagtttaggaaaccatgcatgtttaggttacctaacagatgagggtttcactgaacactttatgcatatgaaaagtcattttatttattaagtaggtatttatttcatgttattttatttagtggaaaaaagtaaaggtcatggagtaatttttaaatgaagccagaagggcagattttcattggtgtaatttaaaggttttgtaaaatttaaagttgacttttcaagaaggatggtttcctgatacatgtatggcacctgatgctgctggaggaggagatgggatataataattgaagaaaactaaaagatactgaagcatgataatgttattaataagattcttactttttgtgtcaatcactggatctctttgtgggaagacattttagccaaataaatatattttcttaatgatttttctaagttccacataagaattttcagaaaagcaagtcaggaaccttatatatgtataaacttagatgttgtatcttcattgaaatgctggtgtcctaccagtcctagcatgactaattcatcctcagtgcatctgtagggcttcaaaggtactctattagagaacttttactatttcaaaattattgtctatttttctttgtttctattgaattgagagctaaggaaaacaaaagtcacattgcagtgtaatgcttgagaacacaaactccaaagctagacatcccagttttgaacctaacatttgtttgcatgtgactttgagcaaattgcttagccctcgtgcctaaattcctcatctataaggtgagtctccaaccctcatactttattgtggggatttagtgggttgatatttacaaaacacttagaattaagcctggcaattttcatgccattaatatatattagctgctctctcactcatctttgctttttcactgtgcctagtcttattctttggttatggtaaatgatcaataaagatttaatgaattttgccctgaagcaggaaaggtattctggccaaaagatctacaggatactctgacaatagtaaaatattcgttcctttttctctgttcttacttggcttaataattttcatcttgtttatatttttacatatttaattttttatgaaataatagtcttacattcttacattatgtctgtttgttttgcacagacaaacctaaaaatctgtagcattcagttgcctgattctagtgctgaatccctgttcccagtgctctgtggttctcaaaagttcaaggtcattttgtttgaacgtgttgagcaatggtccatgagcatttgttccttgccggttctctctgtgtcttatctactatcttccacaatctctggctcagcttctccctggacattccttttcatggacttatcattttaatttcaacctctccgtctaaattttctgagatgaacattagccctgtttcttttctggtggcataatctatgtccttttcctctttaatattgtctgggacctgctgatcattttccaagtctatttttctccaccaaagtcaaaactttcaaaatgaattaaaaacaagaacactaattgtgtcctccaccattagaatttcttatccaggacttaagtttctagaacataagagattcttctgctatttgtaaatctccatgagcatcagcagacaaagacaggagactttgattcagcaaatgcatcttggcatatgcatgctagaggaagcaaggattgcagcctggcctgactgttaggaccgtgtatggtggcctctctaatctttaccttacatagtaatttttttttccttgctgaatgggaaaatgcatacaggtggacataggaattgaagacgttgtctatgccaatattgcaatttatcttacccacccacccaatctcattccagaaacaatttgcagcaagactgtgataaggaatagtgccaatatctgaaatgtagttagtctgacacactaaatttttcaaaaataataaatcagtactaacataaaatagtattcagtagccattgagttaaatttcacattaaagaaataaagtcaaagtaatttttattttagaattgtgaaatagatgagaaaactactttaaaagtttagaatttctaatagttattacaagactttgaagtttatctcttcaggaagaaagttactaaataaatagaatgtatgagcagtgatattctgagtctataaaattattatctatctctctaataattcatctctgggctaggtacaaataaaggctgtgtcacttactctgtctaagcctctgttcactcatgtgtaaaataggggtaataattgtaaattacttcatagaattcttgtgagttaaagtatgtaaaaacgttattattgtgcctggcacccagtaagcattcaaaaaatgttagctaattaacctctgatattaccacatactccagtgaggtatgcattctctgtttttcttttaagtctttaaatagaacagtcataagacttgacttgtgcctttttggattaatgaacatttttaggactggtagcttttagaaatggctttatgaggttatctatgtcgtatccaaaaagtagagatgctagaaaatttcatattattttgtgctctggcctttgttcataatccaaacaaaatacaatttcctaaactttattgtttctatcataagaaataaaatgtaatacacttaaataggtagcaacaccaaatactttaattaatattttatagaatacacaactgcatctttttgtcatagtattaagaggaaatatgtgtagcataagtgtcaatcttgctgtatttttattaaaaccttgacaatctgaactgcagataactttatttaatagaggcatcattgttattattgccaaacctcttctcactgcacagtaggatccagctgcaggaagttagctgtgactggggctgatgtctatgaagtacatctaatccatctcatcaagtttatagaggacttgaagtgtagccaagaaaattaatgagtggcataattgagcagactcagctgtggagtgatcatgtttctttccacagtatttctgcacttgagtgtattgcatcaagtataaatatttgttaaatgtgtgaataaatgaatgaatgaaagaaagcgacaaacagaaaaacgaattttatattggtagttccaaaatacttaaggtgaaattctaaaatagtcagataaataaaataacaattgcgtggtgagtctttccatttaagtactgttccttattcagagacagaatgcttccaaattgttggcattaaaatgtctgtgctttcatgaaatgatgatttttttttttttttttttttggtgggagagtgttttcataatgcgtgctctaggaaaaattaaaatatgtgtctttcttgggccccaagattcttttctaaaacgttacttgtttataaaagccagtcatagacattcgttgatttttaaaagtggcttactcttattccctttcaggtccttcagttgagaccaaagaccggtgtcaggggattgcacaaatcactcaccgacgtggccctggagcaccatgaggagtgtgactgtgtgtgcagagggagcacaggaggatagccgcatcaccaccagcagctcttgcccagagctgtgcagtgcagtggctgattctattagagaacgtatgcgttatctccatccttaatctcagttgtttgcttcaaggacctttcatcttcaggatttacagtgcattctgaaagaggagacatcaaacagaattaggagttgtgcaacagctcttttgagaggaggcctaaaggacaggagaaaaggtcttcaatcgtggaaagaaaattaaatgttgtattaaatagatcaccagctagtttcagagttaccatgtacgtattccactagctgggttctgtatttcagttctttcgatacggcttagggtaatgtcagtacaggaaaaaaactgtgcaagtgagcacctgattccgttgccttgcttaactctaaagctccatgtcctgggcctaaaatcgtataaaatctggatttttttttttttttttgctcatattcacatatgtaaaccagaacattctatgtactacaaacctggtttttaaaaaggaactatgttgctatgaattaaacttgtgtcgtgctgataggacagactggatttttcatatttcttattaaaatttctgccatttagaagaagagaactacattcatggtttggaagagataaacctgaaaagaagagtggccttatcttcactttatcgataagtcagtttatttgtttcattgtgtacatttttatattctccttttgacattataactgttggcttttctaatcttgttaaatatatctatttttaccaaaggtatttaatattcttttttatgacaacttagatcaactatttttagcttggtaaatttttctaaacacaattgttatagccagaggaacaaagatgatataaaatattgttgctctgacaaaaatacatgtatttcattctcgtatggtgctagagttagattaatctgcattttaaaaaactgaattggaatagaattggtaagttgcaaagactttttgaaaataattaaattatcatatcttccattcctgttattggagatgaaaataaaaagcaacttatgaaagtagacattcagatccagccattactaacctattccttttttggggaaatctgagcctagctcagaaaaacataaagcaccttgaaaaagacttggcagcttcctgataaagcgtgctgtgctgtgcagtaggaacacatcctatttattgtgatgttgtggttttattatcttaaactctgttccatacacttgtataaatacatggatatttttatgtacagaagtatgtctcttaaccagttcacttattgtactctggcaatttaaaagaaaatcagtaaaatattttgcttgtaaaatgcttaatatcgtgcctaggttatgtggtgactatttgaatcaaaaatgtattgaatcatcaaataaaagaatgtggctattttggggagaaaattatgtgtgtgtgtgctcaagatttatttcttggactctgagaaaatgaaagataaaattttctgttatgattttcatttagcaaaagcatatgtcaattcaaaagacaaaaaaagggaagatacctgtgagccttctctgcctcttgtttccaatgcctttgagcaatggttttatttttcttactggtcttaatacagatttctggtaatttaagtttcacctgacttgaaagttgtatggtttatgaaatgcttggtgataggtggtatggtagtatgaaactggaaaaaaacttgcaggtttccactcatgtcttcattgtcactggcaactactaaatggggtgagcataaattgatttggtgcatggattattgtacattgcacacttcaagatatggttcctcagttccagacatagattcctattcagggctggtatcttcagcatcctttcctcagcctttcaacttggcagagatgtctagtgtccagggccttctgtcttcagactgctcttcaggcaagcacccttttcctgtgctttgacacctgcagttctgccctgcctccaactatgtggaaaacaaagaaacaaaatgagcctatgtgttctgtcttacttccttaccttttcctggttttgtcctatccatatagaggccaactagatatatggaatatgcaacgtagtaagtagttggcagtttacaactttcattagtatagtaaagactactaagtcttagtaaatagcctgtttaactgtgtttaatccattgtttcccatctttgaacgaaatatattttcccttttttaatatttattttttgtttacttataaaatcttgacagccagaagagatcataagggtagcagtcctcagttgccagtcggtgagtggttaccatgtgaggactaaccactttataatcacttactcatagatcgtcctgtgtattttactaaacacacacacacacacacacacacataaatagcacatgaccctaatttctgagaagtacagtaagtattgactgtattgaccacacaccgttttgtgtatgatatctgtttcaagcctttgtccttgagacatgggctgttttgcccagtgatgtttactaaaataaaagcaagccttaaatgtca

SEQ ID NO: 79 - DNA, 90373 bp, Homo sapiens
gcttgtagggtgaagacagaattcagagggtgacatcagcctgagcgggggccagaagaaacagagtggaggagtctggtttcatttacagttttgggtcagttctgcagtgaggagggggagaggaggggtccgggagggaggaggaggaggaggaggagctggaggaagccctgactggtatccctggccccagtccagtttggagctcagtcttccaccaaaggccgttcagttctcctgggctccagcctcctgcaaggactgcaagagttttcctccgcagctctgagtctccacttttttggtggagaaaggctgcaaaaagaaaaagagacgcagtgagtgggaaaagtatgcatcctattcaaacctaattgaatcgaggagcccagggacacacgccttcaggtttgctcaggggtaagtgtgatttctcttctgtttttccaggtttggggctagaaggaaatgctcttaacctgaagtgatcctttctaggtagcgttagtggctcttacgttcatgctgatcgccagttttctgtacatgttttaggtctctggaagattccgctgatttttctttctcactttatggcaatgggatttccttaaattggttaaggtcatgattgcctaagagtgtgagcacttttccaccgcgtgtctgtggctgctacacgcgccctgtgcattccgggcggcagtgtgtttcggcccatgatttatttaagttactgccgccttctaaaacccattcgggatccgctttgtttgcagaagcgtctttgctgaggactagcatagctccctgccgggcggctccgctgggagatgttctctgagctctctgggtggtgacactaggtcagggtgcaacaacctgcatgggttttctgcccagggccgcccatgggaaggtcctggtggagcacatttgctgctttcacaagattggagtaactctggtgctcaggatcagggccaagtaaagggtcgctcagtcattgccgtcaagctttcgtctttccaggaacctgaagtctctattggagactttgtcccttggggttgcttaaaggagttgcaggggtcagaggagaagaaggaattgggcatttgggcagcatgctgagtgtctaaggcagggcccctggggctgcagggccagcccatgctgcacagaggtgaggccagtgccgagctgggaggccccgagggctgttctctggcccggaggatgcagggtggggctcgggccctctcttgctgaggatggacacgttcgctgacagtggccagcctgtttggggaacctgtttcaaggggcctactatgttggataatgaacgggtattgaagtatgggtggggtcactgggagggactagggagtggttaaagaaaaatctgcttccacaggaagccccaggagccagtttcgaggccggtgcagaccccaggagcaaacccctctgagcacaggggagtctgctgtgctggatggggaggcagggctgtggccccggctgactggcttctctccccacatacagctcaccccggcgaggaccacagggtgctagagctgcagggtgctcagagctcacggggatggtggatgctcaacctgggatcccccagctccccagggtcccattcttaatgctgtaaaaaacaaccgaaatggctttaaaatcaaagttacattgctcctaagcaaaactatattgaaaactgagtgggtggccgttgatgacattactgggacttctgaggtttttgttgggctaaagataatggaagagatttttggtcagaagccactgatgcagtagtttcctggttttcaaaatgagcaaccaggggctctgagatgcggaattccttgcccaggccagggagcgagtgcctgagatggcagtgaaatccttccccattgaaggagagcagacaagccagtgacggaggatcccaaataactcacatctcgttgggaaaactgctttgggctcactaagactctaccaatgaaccgagaaagaagggaggtggaccgtggggcgggggcatcggttccgtgaccggaataccggggctggccgccctgctcaggccacctcctgggggtggagggcgctgaaggaggggacctgtatgctcttctttctgaagtgggcttgtagctgaggatgaaagcctgggtggggaggcgtggcttttacaaagatcaggatgtaggaacagctgcctgtctggacttctttgtttagggggtttcttgctacccagaggtttagttctctcctttcctcactcatggtcgagagaagccaggaagcagacactgagtggagcagagggcttgggaaggaattccatgttggggtgaagtgaggctgtcctggcttttcctatccaggcattggagggtgtggctacagcacctttctgggaggtggctggggaagcctctagaatgttagcccttggccccgctctttccctgcttggcagggagcgtgttccaccccactatagttgtggcccacaggtgaggggacatgtggcaaatgtccaaacctggggtctgaatgatatttttgatacgaggtaggcacctttctgaaaaattgtctttacttcacacttcattttatttctaaagcattcaggactcagcaaattgcactgactttatcatcagtgccttttgtgatttcctatcctagaacttaatacgtccccgatgagaaagtaggaagaagctcctctcttcagtcgattgttgatttatggttccaatgaggctgctcatcctgaccttagtttcaggaacggaacccatagacctggatgcctaaagccagcttgaaacaagaccgccttctttggaagctttggaagctggcagtgactttttgccagcgaggtttcatttgtttccttgctcagagtgttcagacaactggatcaagcgtagtcttcaccagcggttgatatcacctcccacttatatgtgaaattccatgtttaggacttaaaattcaccggcaagtcgtgaatactattgcgtgacacttccttgcaggcgcagtaacagctttagcaaaaatttttatttgaaagttcagttttgtcactgctctttttggaagaagctgaaaatctgctatctcttgggggaaggattgcaggcggtttccatctgacagggatgttgtgtaccaggcagcttttccaccctgacttacgggagcaaacttttcatggtgtcctggctgcagcaagcaggcagtaaaaaacacatcactgctacataaatagctgacgatttgaggagggacctgacatttaaagaaaatcctattagctctagctaagaaaatgaaagccgcaaaccctccaaattttaaagtgggggagctttaaagtttcctactaattcagacagccatgaactagacaagaatggttatcttcattctcccgtttctagatacagcttctctgtttccactgtaaaacttcagtggaattcagtgtaaaaattcagtgcaaagaaaggacaatcctattctttaaataaaacatgttgcttgccccctctaatgtgtggtcatgaatgtcttatttccagggagtattccacaggtcctgattttgcagagatattcccttcaacaattcactttgttaattttgaaaaatataatttttaatacattctggtcttatagtccattttgggaaagagatgaaattttgagggctgggcactgtggctcatctctgtaatcccagcactttgggaggctgaggtgggcggatcgcttgagcccaggagtttgagacaagcctgggcaacatagggagaccttgtctctacaaaagcgttttaaaaaattaaccaggcatggtggcatgtgcctgtaatctcagctacgaggctgagttgggaggatcacttgagcctgggaggttgaggctgcagtgagccgtgactatgccactgcacttcagcgcctgggcgacagaaccagaccctgtttcagaaaaaaaaaaaaaaaaaaagaaaagaaattttgagttagcacgttcatcctggtctgtttttgaaaaggcagtttggttttctttcctctagagggaggtgtatctctgcgagcttcagaaaaatctctgaagtggtgcctggagtctcccagggtggagtttcagggtttgtagtaactcagtgatgaccatctcagcagagcttgcgggcagttttaggactgatatttcaatacatgattgtcattattatatttattgtggctgttcataataacggaagtgtacatacgttagagctttgtttttcttctctgctcaggtgtaagtgtattgagatgaaattgtgccatcaaaggaggcatctttgttcccaaacaattgcattacaagggtattcagcaaataagacattttataggaagcattttacccatatctaattacagaggtttaaatgaacagtcgggtgcttgagaaccaaagtaggtttgcatattcatgccattgcgtatccctgtagaattaccggattttagaactgtaagggtgctcgtgacatgtcctttgatactttcccctaataatggacaatgggttttaacatacttttaaaaattcacacaagctatgattatgaatgtctcgtcttgaatatttattaatacaaatatatattactgactctcagatttatgtctgttcgcttgagataaccagcattaagactctgagggagacaattctagctcagagcaaaacaaacaaacaaacaaacaaacaaaaaaaacaaaaacctaaccctttggttggtctttgtgttctcatgtttacttaagtttaacaagacctattgtgcatcatggccttgagccctgaggttcagggaggggatatatccctaatgctaaatgacgagttgatgggtccagcacaccaacatggcacatgtatacatatgtaacaaacctgcatgttgtgcacatgtaccctaaaacttaaagtataataataataaaataataaaaaaagagaatacattcttggggaatattaaaaaaatgactaagacatagccccctctcttctggttggcaaacatataatttctgtttggctaattgaaatatcaaaaaaactactaccttggtggatggtttctccacgccctttatgcttcagatgaagaaagagagctcagagaggtatgcccagtgacagggccacagagctagtagcagaattgtctgatgtttccaatatgcagacatcttggaatctggacatttcaagggggacaagcctttaagagtgtattttagggtgccatgtggagaaaggtactcttcccattcccagtcttccttggagtagcctcttttaagttgattcagcagaggagtaactgttgcttaaaaaaatctggaaagaaaaaggagagaagaaaaaaacaaatacgaaaagttctgccaaaccttctcccaaaggcaaattgttagtcttgtaggggtctggctgcattcagcatagtatgatcctactgttctcctgaagtttaaactcatgaattacagagaaacatttgagaattgcaagtggccagggaaaagtacaatgggaaatgtttctgtaaaaccccctgtgtgtgctatacattaggttttcaggaacccagagcatcaggaattggtcactggaaggaagagctcatggctcggtttaatttcaaaattaaaaattgaacagcagctggagttgactcagatctcaagggaaaccattccaggaaactggtttttcacttctggaatcttcattagttgattcagcagcccagggccggtacccagagttagcgccaactcagctaaacccacagccggcccggcggtgcaccagggtgctctgtttctaactggggctgcagaaaacccatcattcatcagagcccagggcaacagatggaagagagcagtcgcaggactatggcctgttcgagcaacaggcaaggagccttcttttacacaaaagggaggctgggagagattggccgaccattgctgacagaggcagtaaggaagtagaatttcccaggttactgcaataaatccagcatggatgatattttatcagatgttccaacttgatttttgaaaaggtttctgttttcaagaatgattttatcttctctacttgattataaattagactagaaaacagacaaaatatctaacttttctctttacaaagagagcacctttcagccactttaatcatttacagtggaacaccacagttttggaaaggtcagtagcaccttagttcattgccaagaaggaaaagacaggaataagtgccaagctccaatttggatccagcagcgtcacgtggcaaggagttggaatggagtgggcatttgtgcaatatttcttgaagcattttctaatgcacctttcttctttaatgttgaaatggaactagtctctgcctgatgtttataattagcagtataagtgcagacaaaatcttgtctggctgccgtatatttcagaatgtggaatgtgttttacatttgcatggtggcgtctagcttttcaaatcacaccagatatggaactttctgcctcatggttattatctgcaatgctaggaatatgttttaaagtaattttttcaaatatctgggtaattaatctggagtttcttaattgcctttgtaatgggaaggagacccacctctgaggagcttggcctaagcctggctgcaggtcggcatattcttacaggtgctctcattcacagagggagggcattggtaggggatgtccaggccttctctttctgcattgctttgttataatccacaagttgcagaacaggtgttgctttgttagattttaccaggaagagttgaagatctcgaatccgctactccatatctaacaaggacccccgtaagtgacaaaggaccccagtaggtgacaaaggaggtctagttaccctgcctgatgagaagagttttaaaatgttgctatcacaggatacacattcagtttgagtcaaacagattattgttctagagtattttcatagaatagaaattcaaaggccaggtgtagtggctcatgcctataatcccagcacattgggaggccagggcaggaggatcccttgagcccaagagtttgagaccagcctgggcaatatagtgagatattgtctctaccaaaattcaaaaaaaattagccaggcgtggtggcgcacacctgtagtcctagctacttgggaggctgaggtgggaggattgcttgatctcaggaagttgaagctgcagtaagctctgatcatgccactgcattccaacctggacaacagagctatactctgtctcaaaaaaaaaaaaaaaaaaaagggaaaaaagaaagaaatgtgaaatccaagttgttaaataaacagtaaaaaaacaaaatttgctatatttctttggaggtttcttggagctcttccaaaacattttcttttgaggattctcctttgggtctttcaaacaccaagagcatattaaattccactctcctcctaccctaattgcaggacttaataaatcctttcttagcttcctccctgaggaaaagaacggggactcctttcccaggattcgtgcaaaaagagagagaaagagtgagaaaaagagaaagaaatggggcgctccttcttgcagtctaggaatgggcgtggcaaaggcaagggtggatgagtgcctcaaatttactgaaatttgactttctatttcacagtcagtgtgcacggctctcccactgtggtctttgactatttccactgctcccattttaaacaggacaattaggaactaacagaagtcccagaacttgataggagggacaggctgattttaaaaagcagtgcttggagaaaaccaaataaatgacttcaaaatggaagctctggatttatttgagtctttgttttcaaactatttccttgtgtgcatgcgtgtgtgtctctttcttaaaaaagatttccagacatggaaaatgaaaaaggttttgagtaggctaaatgaaaactaatttacagaattgcaaaatagcttgggaaatcatattcattggaatatgattgaatatgatttcaggttgaagggccatgtagggcaatctttctgatgaaaggtatccttttaaatttcaaagggatagaaactaaacggaaaaaggcacctcaaatcctttttagaatgaggcagagtaaacaaaaagatgaataatcctaaacagaaagatgagaatgaaaatgtgatgaatgtctcttattgaatctgtttcctttaggacacagaatctaggatgaaggaacagaccccttccagcccaaggatctcaagcagccaattctgagtctttttttcatatttgaaagaatgatagtagacagccgacttccattgacatagaatctgtggtgtgtcaccaccaaggaagtctattttttccccaaaaggcatggggagtttccttgagatctgggccaaatctggcacagcctctagggtttcccggggttcttcccatgagctttggaaatgctaacttgggttagggttctggttctatgttgtttttatctatgtagctttgaacaatcactttgccttgctggggtttcaatttctcagctataaaatggagggaaatcagccatcggatggttgggaggagggcgtgaaatcccacccacaagacagaagcccaggaaacgttaccagcactctcctctctccttcctccgggagggtggtgtcggggaatgagcgcggatggctgcctcattccctcttgttgaagagggcgggtggtcatctggtgagatggtgtttgacatcttttaataatctaaatgaaaaagttctccaaaatttgctgccagggaatttcgtttttttataaatggagactccaggacatgacaaacaatagaagagagttaattgcaaacgaaaatatcagcaaatattcaacagctgggctaggagcccacgagccacaagacctgcttcccgcatgatggcaggaaagtgtgtggggccaaaggcgtttttcccacctgggaattcagctcagtcaaaccatatgggttctgaatcatcagtggagcctggataacgcattgtcctacaggcattatctcccgtccttttcagagctggaagggctcctttccttctcttccctcccctcctcttccctcaatatctggatatattctggataaaataattcctgtgcacagtgtatttatcccattactttgtgttccaatgggaagtatctccactgagggggctactcctccaaagattcacatcttgaaaataaaaatctttacatatgattttcaatgaactaaaagttcattttactcagaatggttgaagtaagtgagtgatgtcttagacttcccggattttattttgtaactatttagattgtattgagcactctggaagatgagaaatgtaattttggaattgctccagagtgagcccactcaatgctttatatgtgacagaatcagtggattcaaaggctttcactgtgtgaggtatgggaatgattaagaaaaccattagcaaaacctgctcaaggcataattcacttgtgctctttgtcaatgctccctgcacaggtgtctgcagctcttcccatcccagactcaacagtgaggagacagctctcatcttatcatgtcctattttttccacctggattacaaagccgaatgctttacaaagagcctctataatactcttgtgttctcattcacaaacaaaaataccacttaaaatcatgcctcttgaacatggattaaacatttaaagtaatcgaactggatcttccagaagatttgcattaaaatttttaattgaagcagtgatgcttaaacttttggggggtgaggagtggcacaactgccttttagaatcacatacaaacatggacccttatctccagaaaaaccctcatccatagatgcaattttgcactcaactgtgggaggatcatagactctttgaatctgttgatcccgtattaaaacattgatctggaccagttacaataatacaggttgttttggaaagaacaggccattttcttagaaagaatctagcaggaagcttacctttgctaaaaaaaaattgacgctcaagcttgatagaacgaatcaagaatagcacatataaaatgtacttttatattattctgaagtgtatatcattatttaattgaggtcatacaaaaaattagatattgcaattgctttttttttttatttgaagaaacactcaggaatgggtctaacagactgtagggaagaaaggtagagcttggtggaaaagtctggaaggttcccagggttgcatgggcttgagggattcctagagagtgaaggggcaaagttggggctgtggcacggtgggggtagggtcaacctaagtggagggaggagaacaggcagtccagcctgtcgggggtccctgagccctgctgtgctgcgaccgggctaaagcttgggagcattatcaaaccacagcacaagcactggagactgctcttctacattgtgttaacatatatccatgtccaaaaggcagtgaccattgcaagggaaaaaaaatcgggctgagcttttgcaatactgccgctatcaccactcattgctgtcactttgttgcagaaaaatatctgttctgttgataactggcctcctgagcatcattagaacagcattcctttctcactgttgatgcatttccaagagactgctgtattgacaggtggttctattttagctgctgagatcatggcttcaagttctcagaatctgaatcacagggtacatttgtttcatcacaggtggtactttttgttgactttctttggaaatccaaagccacatgggtcctggtgttcattcccttgtttgtggcttcatctgtctccatctcaccaatttttggcgggtcaggcctagggcccacactgtgttccgtcttcctcatagctgggccgcaagatttggactccagcttctccctctgggcctgacctcaggcaggaggaatttcacggcaaatccacgggactgagcttcaggtttcctttgcacccacttagctcctgtccttgactggcagcctcaatcactctctgtggctctccctgtacctttgctaagtggtccatctggacactagtctgctgctccattcatggcaaagttacatcactcatcagccggacagactctcctctgctatcaatcttcaggtggcaaggctgagaacattagatcatcctcatccctgatttcattagctgtatggggaaaatggaattcctgtgctacacaacagacaaccatgaagacttgcagagcccatgggggcacctgtggagagaggaagattaagatagagatacaaaagctcaggccttgggtggagccgattccaaagctcagaggatactagtcaaggcagaagccatgtttgcaccaggtctgaatgttcatattagattctttcccactttcatgagactctgatcttctttgccaaaccctaacattttgcatgacatatactcttttcttatttctttccaaatcttatttagaagtaagggcaaacattgtgttatttgaatacagcggcatgtagacacactttaggatgtttagttgtactgttttttcctagtagctcttaaactctatcacacctcaaaaaagagatgctgcacttacatcattcctgttaaattgatggctacattttaggggtagttacccatgcttttaaaacctggcaaatgatatttcctgtcctcatttctattttaattgtggtaaaaaccatataacataaaacatactatcttgactatatttaagtgtacagtacagcagtgttaactatacgcaccttgtgctacaacaaatatctataactttttgatcttgcaaaacagaagctctatacctatgggacagtaactacaactgcctccctcctgacagcccatggccaacaccattctaggttctttttctaagactttgactactttaaataccttcacataaatggaattataaagtaatgcatttgtcttttagtgactggcttatttcacttagcataatatcctcaagattcatccatgttgtagtagataaaaggatttcattcttttataaagctgaataatattccttgtatgtggcatgtataagacttagtataatacagtaggccgtgcacagtggctcacgcctgtaatcccagcacttaggaaggctaaggtggaaggatctcttgagcccaggagttcaagaccagcctgggcaacatggcaaaaccctgtctctactaaaaatacaaagcttagctgggtggggtggtgtgtgcctgcagtcccatttactcaggaggctgagaaggaaggattgcttgggcctgggaggttgaggctgcagtgagctgtgatcgtgacactgcactccagtctgggtgacagagggagaccctgtctcaaaaaaaaaaaattacagtataagtggtgtaataacagtgcaaagtcctaggagaactgtaggaatagcagttaatgaatttaacaaatatttattatacacctacaatgatacagacaggcattttgccatactctgtgctcagagtgtggctgagcttcacagtcctggaagactctttgtttatgataaagcagccttggaaatctataatcaatttcataattgcaaaaaattccattgtgtgtgtatatatacatatatatacttaaccaaggaagaaaaaaacctgtgcactaaaaactataaaacactgttgaaatgaattaatttctttattcatctcatctattgatggacttttaagttgtttccatcttttggatattacaaataatgctgaaatgaacatgggtgtgcacatatatctttgagatcctgttttcacttcttttggatatacccaaaagtgggatagatgaattatatgataattctgttttcagttttttgaggaacattcatacgatggaggctagcctttccccactgtgtagctttgttgaagctcaaagatcatatacatgaggttttatttctgggctctctattctgttccattggttcatatgtctgtctttaagtcagcatcatattgatttcattacaccattttgtaatatgttttgaaattataagtgtgaggtctcaagctttgctattttccaccccttcattctgttaatgtggtgtatcacattgattggttttcatacgttgaaacatccttgcattctagaaataagttccacttggttagagtgtataatccttttaatgtgctgttgatttggtcagctagtattgtgttgagaatttttgcatcagtgttcatcagggatattggtctgtatttttcttttcaatattggccttataaaaatgagtttgggggtgttcctttgtctttaatttttttgagaaaagtttgagaaggattagtgttaattcttccttaagtgtttggaagaattttccaggagagacatctggtcctgggttttttgttttttttttatggaaggtttttgattaccgattcaaccccatactaattttaagtctgttcagaattttttttattgcttcatgattcagtcttggtggattgtatatttcaagcaaatatctattttttttctaggttatccagtttcttggtgtgctattttcctcacttcttacagatctcatgtagtcttgtcagtctttccaaagtcttgtataaacaatttcacgtgcctgatttgctctcatttccccttgctttcttcagggaattgccaaattattcctgatgcaggggatataaaaccaatctgtaagcatttggagttttagaattataagatgaaaaaagtcacatttcaaaatctgacatatacttgatacccagaaagatgtttttgattttcattcacactgatgctgaatgcctttacatgctgtaatctgtgaaacagacttctttttaaccttcaaaccctaacagtgaaatgatgatgaaaactcaatctccctagattatatgtatttcagtttcttaagtcaaatggaatttctaatttaactgtagtctacactatatcatttccaatatcaaataattcttcctgaaactcaatataagaaaaaatgacaatattaactagtgtcatgaaagttcatgctgataatgagattgagtctggtccttcccctgggcttctccggggaaatgtcagtcgtctacccattctaattctctcacttggtcacagggaggcagtgagctccaccatcaagggacatgggtcccacttacagttaatggagtccgagagagcagatatttgcaaacccagtgatctgggctcagtggaggcctgggcaggtggagatgcctttggttgctgcttcagaggagtaagagcttagcaaaattagacatggagaggaatagcccatgaaatgtgtttggggaattctgggttaaatcaagtacagcaggtttctttactttatttttcagaactgctatatattaaggtatattgtaactgttccagaaggaggcttggtattcagcactttccaaactgcgttgctcatggaatgcctgtttttccccttagaacatcgaatggaatgggtgttccatgaaatgtgctttgggaaatgctgatgaatgaaacgttgctggagaatggtagttagagttcacttaccatccattccgcgtcaggcatttaccaaacaggctaccacatgctcctcacagagggctggaagagaggcatggctatcattgttctgtgttatagaggaggaaatggaggctttgagcaagtataccacctgcctgaggtagggtatggtggatccaggatccagatttatctgattccaagcaccttgtctttccccaacatctctggctccttttctgattcctaaaaagcccaaattcaggctggtgaacttgattgaaaagttgctatggaatcgtggggttttcatggagaaataaaaatgttcttcttatcctctcatcttatgaaccctcagtgtggcaggtgctattgagcaccaaggtgtctgaatagttgtgcaccttggccacttattctctgcacccccattttttcctgtaagcatgaggatcagcatctacctctaaggataatgtaaagataaataacacacattatgaaaaattatgaaaaactgcaatgatcacatagtagatgctgaataacttttgataacatggcacccaaaacagcggtttaataacatcctagcctacctgtgtcgccaatggccttgttccccagtactgttacccaaacctctgaaaagggaacccctgaccagagagctcctaactggggaacccctggccagtctgggtaagaagagtcactgacatgcacatcattgcaaaatgaaaatgagcttctcgttcaaatgttttaagaattccaagatagcaacatcaaagcatcaaactgagcatggggcccttcagagcacagggtcctgtgggcagccccgtctgtggtctaagaaaaagttaaaggaaaccagaatcctgcattaaggagaggagaaaaaagatgctgtcctggcaaggggacttcagcctagacagaaagaccctagctctctggaggggtcttaagggagaccccagcccccaagctgatctcttagattggagattggagagtgaagaggctgtcacaagatcttgtggtaggaagaaaaggtgttggcaggggaaaggtctgatggcgcacgctactgagctgaagtgaatgtgaacttggctggtggggcatcatgtgtgcggcccccagaggcgcgtgggtatgggagactctgcatcagggcagttagcctccaggtctggcttcacagtcttactaattaaatcaccccaggctcattccactgtgagattggaggttggcatatggcagattttccttggaggaaaagtgctaaatattaatagagaatatggacaaggcttgacatggtcccagctgctgtggttgggttgcatttggtgtaatttgggcaaagcccgttctctccataaactgaaactttcctctgaggttcttttaaacatgacttacaaacttaagctgggtgtcaaaacctgatgccttgtgcctatgagtgcttttactcctgacccatttccattctgctctttgcttaggaatatgctatttccaaattgctgcgtacatcacttagggaggaaaagaaggtttaattgcatagctttttagctgtggccaaagtaatagtcactagattcaaaaattctcatttatatgtttaatcaaaactatctttcataatggataaatttttcattcattagtaatttgaaaaagaaagagaatattttcagattgtggagaaactactatgaatgcctattttctaaaaatgtaattgtgttctttgaactatgtttaagaatgtccagagaggagagtgagcagtgccattacaggtgacctatgttctgctaacaagaagaggtctgaggtccctttagacagagagctctgcctattcacttctcacttacctattctttaccttcctcccaccttcccaccttgcctcctcccttcctccctccctccttccctctctccctccctccctccctctctctctttctttctctctttctttctttccttctctctttctttctttccttctctcctctttgtttttcttctgcttctttctcttcttctccttccttccttccatccttccttccttccctccttccctccctctcgccttcctttctttcccttcctttccttccttcacttcttccttccttcccttctttcacttcttccttccttcccttcccttccttcacttcttccttccttcccttctttcacttcttccttccttcccttcccttaccttccttctcttctcccttcccttcccttctcttcccttcccttctccttccttccttccctccctccctccttccttccttttatatatgcatatatgtgcgcatgtatgtatctgtatagatttttatctatctatctatctatctatctatctatctatctatcatctatctaactgtctatcatccatccttttgctgctggttcaaagaatgaatcagatacaaagtcttcttggaagtctaaaaaggacgtagaaagcatgggattttgagagattttgcataatgagagtcaaaaactgatcattccctttgccctgttttctcttttaggttcatatttggtgcttagacaaattcaaaatgaggaaacatcggcacttgcccttagtggccgtcttttgcctctttctctcaggctttcctacaactcatgcccagcagcagcaagcaggtaagagccagaaacgtccttgattttgtaaaaaggaatatcattctttgattttagatcttagacatcaggcactgacatagagcttagatatgttcttaaggtagctaagccatttattataggatagtcagataggatagttctaggatttataggccttttcagatactctttatccagtgagagatgacctatttttattaaaacttgggtttggtatcttggaattggcttgaaaatgatttgtttttacattggatgtgaacggaaagtttgtatctcaaatgttttaccacctgaagggactttccacatttctggcattggctggtctctgagcacataaagtagggagaagtcaatgattgagagtaaaaactattttccctgaaaaatacaaagatcaccctctctctctaactccagatgcaggaaggcatttttcatctaggatccttgaatctttaagatttctgtttcccaaaacgaattaaaagcatgggttctaattaactctattaagaatttgatttcagagttttagaaaagtgggaaatgcttcatgcattgcaagctggaaaggactcaggtgggtctccctctccttgacccagagagcttggcctctgagggattcttcctccaggccaggttgctcttagatggagggaagtctagtgtcacttcaatggaagaagaacgtgggttggggcatcaggtcagcctgaggtaagtagagtccagcagcaagcctggctcacagctgcagaagggcacctcctggggccactgacagcctgataccctgagctcccacccttgagggagaactgggttcatctggaaatgagatagataatgtttgacatctatggagacttttctggctctgaaaaatatgcagtaactaatagagtacagtttgttcatgctcaaaaaatctggaaaaaataagtcttttcccttctctacatttacacaagtcctcctcgcttaaagaacatgtatttattatatttatttttcacgcaaattacccaaagcattgggggttagtgaatggaaaatagcaatttttacttttccttttttgtcaaggcccggttttgtattccaaactaaagaatgaatttataaaatgatggttggttgtctgtgataagacttccttctggtttaatcaggtgggtcttggggctcaaactgccacagggaatcatacttgagttaaagacagcccaggaaattgtttccccaatctggagcatgctactggcccattcatgatggtctctgagtatggaacttgggctagtgactgggcaccagcagctattgagtgcatgggctcaggtccctggttcccaggtaagtgagtctaccttcctgtattatcagtgaggtgtgaagtgtttagtagcagtatagtgtaaaccaaatttgtttaggaaggctttgcattgataggaagtaattgcttacatagtagaaaaatctaaaccaatgtctttttttaaagatgtcaaaaatggtgcggctgctgatataatatttctagtggattcctcttggaccattggagaggaacatttccaacttgttcgagagtttctatatgatgttgtaaaatccttagctgtgggagaaaatgatttccattttgctctggtccagttcaacggaaacccacataccgagttcctgttaaatacgtatcgtactaaacaagaagtcctttctcatatttccaacatgtcttatattgggggaaccaatcagactggaaaaggattagaatacataatgcaaagccacctcaccaaggctgctggaagccgggccggtgacggagtccctcaggttatcgtagtgttaactgatggacactcgaaggatggccttgctctgccctcagcggaacttaagtctgctgatgttaacgtgtttgcaattggagttgaggatgcagatgaaggagcgttaaaagaaatagcaagtgaaccgctcaatatgcatatgttcaacctagagaattttacctcacttcatgacatagtaggaaacttagtgtcctgtgtgcattcatccgtgagtccagaaagggctggggacacggaaacccttaaagacatcacaggtaatggcaacgccaccaagctacgccctgccctgctgttcttgggagatgagcttggcaactgctggccttaaagcaacagctaggatggcgggtgggccagggaagagatgagtgttcacaggtttaaaaacaaaggtttgatttggaatattcttccatagtcttctccccaagtagggcattcacctacatacaagaagagtctttttttaaacaactaatattttcagtctaaaaaaacccacattctaatattatgatcccacaaaatacctctgccttccttagaaaagaaagcctcagagtggtgaggtgtgcatctgatcaaactcctctatttggtgttgggatctgtttcctttaaggaaagctccctgttggagagtgcgtgaactgagacgggagcgagggcatctgtttttgtgtccagtggactagcagagagcttctctcttctactttacggagttaatttaagagtgttggtagaatcggaattacaagaaacctcagctatgatccagtctagattgattttggaaaaaatttagtcctgaatggttagtgacagccggagctggaggctgtgcatttgggctgtgggtctggtcttcttatttcttctccatgcggtaatcatggctgtgcccacagagactcttctaattctaatggagttgatgagaaccactctggaagtattgagagcacacggacattgcatcgatgtgtcatgtgcagttgcatgtacagagctaattggccgacaggttatttaaccagttaagcctgttagctctccttccagggctaagtgcctaaatggccaatggggaaggaatttgacaagtacaatttcaaactctaccataccacagcaactgtaatgagtgcccagagcttactcatcagcgatgggcagagcagagggacctccccttgttagaaaatgagtccatgcagccatttgatagttggtagcagagaattctgggtggaatgagcaggaaatgagagaggaatccagggggagagttgagctccagaaaggagacacacatgttctctgagatggagggaaggcatgagaaaaggggctgtgtttccaagatattcaggtggataagaggcacattgagagagttcaagttgagttgacatccatcatctcaataaaggagggaagcagtggggcttgggggcttggagggattgaagttatttttgatcagctgctatagggatgtgaagaggggtcacaaaacattcaggaagcaactgctgatttgaagtggcatccagttgctatcagagattacaagtcagtgggtgtctccattagtgtggatccctgcctttctgcagatatctcaggcactcccaggatcaaaggagttcccagaactggaacttgcaaagagggaacaatagagaggacagaagaaaattttctcagtaaggaaatccagagtggtagctagtaaattcctgaaacagcctgccatggtgtcctagctgcatggggagctaatgagagctggaatgggccaggagacctctgaagagccagaggatgagaggccaggtctcggaaggagagtcctggagacagctgagtgtgcaagttggagacgctgctggtgtgtagacagggagacctctgagggccaatcgcggggctggaggagtttccaatggtgctcagtgtggtcctcagatgtgtaggaactatagagagccagccactgcagaaaccagagagggtggtgctcacaaaggttgtccatacagaccttaaagtctggagatgaccacagagtctgcagtgtgaacgcaggctgaacataatgtaactaaatcatgtaggaatgttggagactctcttctgtgtatttagtaggcatgaggaagtggataattctttgaatcaaaaaagaatgagtgggcaaccacatggcataggggaactgatcataggaagcaagatttatgaacagatttttctcctacacttttaaaaatggttaccaccaagatggccactgggacaggaggtaggaggtgaggtgactgatggagagtcagtctcttgtgaatacacatggatggtggggcaggaaaaagagagttgaggcttggaggcacacatcactctacaggaccacatcggagggacagcagaagaattgcaagattgcaatcagaatgctggagcagttgcagagaagcagtaccagatgtcagtttttcataacaaggattcagaaagcaggagctgaagagagatgacccaacatcagcagaaaggaactagctgtcttgagcaggcagaacttgatgaagaagagggtttcagaactagccagctccagggtgtttcagaagtttgttcataaaatggttttcccagtggttactcctgatttcagctttaacggggctggcagtgctgatgcccttacctgtgggtctgcttctccataggaaagagtgagaggcagttcaaacactgcaaagtgttccctgcttccaaatgacaggcctcacccctggcattaccacacaggcatcagtcctgccaaatgacaggaaaagctgggtgtctccaagagcaccccaaaccaaacactcaggttaccaggaaatgacaagagggtatctacaatgaactgcactcctcgctacgatagtctcagtatcattaattccctgatccatcacatttcggaatatcgggataataacaaagacctaccaaaaaatagtgaaaggggctcacgcctataatcccagcactttgggaggctgagacgggaggatcatctgaggtcaggagtttgagaccagcctggtcaacatggtgaaaccccgtctctaccaaaaatacaaaaattagccaggtgtggtggtgggcgtctgtaatcccgggaggctgaggcaggagaatcgcttgaatccaggaggtggaggttgcagtgagccaaatttgtgacactgcactccagtctgggtgacaagagtgaaactctgtctaaaacaaacaaacaaacaaacaaacaaacaaacaaacaaacaaacagtgaaagggaccagtagagaaatggaacatcttttattgacgttttgttatactcacaaaaatagctgagtttgcctttatgtttaaccattatgtaatggacaaacaatgagattaccatagtgaatgctaaatgaaactaccaacatcgtgtgtttccacacagatgataaaacctttgtttttatgccaagaaagcatctctgtcttctagtgtccaagccactagcagcaccagggcagaaaattaatccattcatgtgtcttttctaattaacatcactctgcagttcctcctagtaccacgtcccgctgcatgttccacggcaaaaacataggataataatcttaggaagaacagtacatctctgcttatagttttttggaaagccagttagaagagcattatagagattgctaattagttagggctgcctcttcttactacctgtctgctgggtaacttccccatagagtgttcttgattataaaacacacatatgtgtaaaatatgaacgatcaccactgttgtcaatgaactctactcaaataatcaatctctaatggttgtgtttttaaaaatccctctgtcattctttaaaaaaatgaatatacctgagatataaaacctttattttaaaacaaaagctaaaggtgacagggaggattttggcatcagctttcttttctctgtaaaggatgaagatttttaaaatttgtaaaatatatatacaattttgtgttttacataggaaacaagaatgggaacttgtttttcttaatgaaaggaggcatcacatgagctaagaaaggcattgtgcccacaccagtgagctcgggaaaagagcttccagggatgtcaaaggaaactgtgaattttccttggacactgtaaaacttttctgtagaaaacaccacagaggatgtgatacataaagcatagaagcagaaaaccagacaattttaaagcttttaaattgtgcatagatctgattccttgtaacattaacattggtcattggtccgccttgctgtacacaagcacacatggcccctgtgtgcccttgaggcttcagctctcttgaataacaaagcatgcccttgtatgtcccattattgtgtgtgtaagaggataatgttgttattcagtgatgacaaattatccaacgtgtttctatgactggccactgtagatgttcagtcttttacaagagaatgttcaaggattttccctcagggtccatttatcttatttgcatgactataaatttcaacccaaaagtaagttacaaatggagaagaaatagtgttatcctgcgacttagggatcatttttaaaagcttgactgtattgatcatatttaatccttcttttaaacgtcttgatatgctgaggaagtggcaaatccttccgtgtcctttgaggtcattggtttaggcctgggaaatgttgaggaattttgtggaatttgtggagcctctgtattatgcaatgatgtaggccatttctatggccttctgtgtaattcacaccccctggcaccacactctcttgaagatccttcaggaatcttatattttggctgaacagtggcaaatgctttgggccctaatcaagggcctagtcttatataaaacttttgtgtggcaattactaaaaacacaagatcttaattactgtagcacaacaattatcctactcattgtatcttataagaaggattgtgatagcaatgttgccaggttaatatatttccctatgcaaagaattaatctgcaaatatattgttaggaactttcttgtatattaggaagggaagagggcagttccgaacctggcaatctctgtttcagttcacacaatgagaagagcttgggtaagaatgtaatttcactagagcagaactcttcaattttgtgagacaagctttggatccttttctacagtgagaacaaaaacaattttgttggcacaaggaaacattaattttaaatataaaatgttcactgtcattgaaaagatcagagatcagagtgaatggtcttacctataatattaccatcatttaaaaatgataccctgagtgtagttttctggaatcccagaatataaatagataagctcaagctcacatataatctcttcttgtccctaacacatactcaagttatcaaaaacatcgactagaataattgtgctcctccttgagtttaaatcagccaaatttaaacattcgaactgatgctgtgaaatctctggccctgacttttagatttctcgatccctattcctccctcagggctgctatataaccccgttctcagcatcaggttgggaattctctgtttgccattatgggggagagaagaggtcttggtcagctgtttttctgccctttgtataaccccaggctaattctaatcagggtttattcgatgctcatggtccttctaggtaactagtttaggatgtcataaaaacaaggttggataattatgtcatgaccggtttcatatcactctgcttaacattgttctgcattaagtgactgaatatagaggcaatgacaaaataaatgaacaaaacatcctgcccaatcccagacctgcatttgagttttatgcaactaaacatcatttgagaaaaaagaacaacaaaaatttcatcaaagtattttttacatgaaaactttaaatgtagtttgagttctgattcacgaagttgcatgtacaaggtcattttggtttttaaagaaaagagaagaaacaatagtttctgaaggcatccagcaacatactgggttgaggaatcaccaaatcgtgactctgttttgtagctgtggatttgtataaaaaattattctaatcatttgaggaggcaggagaaatgaccaaaaattagaaatcatctctaaagttttggtaacctactcattgattttccctggtaggtttggtagtggacaattcatgctactacttttccctccaaatttagtggaaatttctagaatatgtacccaagattgtcccctcagaaaagtgaatatgatgtttggaaatttaactatgaggatggcacaaatgaaaaattgctataaatgtcccttttttacaccatgatttctaagaggttgcctcttatccattcagaatgcagaactgaaagagaatttcacattccttcatcaacatgtgttttgtttgcccatatttcgtgtttcttattggtttccaaagaaacatgtcagaacactgaataatgcatgtggtcacttgttctaatgctttcacattttttgcatttctttcttttaaagcacaagactctgctgacattattttccttattgatggatcaaacaacaccggaagtgtcaatttcgcagtcattctcgacttccttgtaaatctccttgagaaactcccaattggaactcagcagatccgagtgggggtggtccagtttagcgatgagcccagaaccatgttctccttggacacctactccaccaaggcccaggttctgggtgcagtgaaagccctcgggtttgctggtggggagttggccaatatcggcctcgcccttgatttcgtggtggagaaccacttcacccgggcagggggcagccgcgtggaggaaggggttccccaggtgctggtcctcataagtgccgggccttctagtgacgagattcgctacggggtggtagcactgaagcaggctagcgtgttctcattcggccttggagcccaggccgcctccagggcagagcttcagcacatagctaccgatgacaacttggtgtttactgtcccggaattccgtagctttggggacctccaggagaaattactgccgtacattgttggcgtggcccaaaggcacattgtcttgaaaccgccaaccattgtcacacaaggtatgtatcctcttctcaccatctgtgtgggagtggggtgttgtgtgtgttggtttacatagacgtaaggtgggtaccagcatgattcgccacgggagaagctgtaagtacccacagtccagtccttccctgatgagctgggtcctggatgtcatgtttgtgatgtcatgtgtgcggaaaaactaaagaccaatgagtgagtgaaagctcttacgagagtatgagttgctgagaaagcgtgcttttaaggctaattcaacaaacctgttgctttgagattattaaacatcaccgtattaactacttataatccagtcttcctaaaaatgggcttgaggggctcattacagttctgagaaagttactccaggactatggcattgagctctaaaagtcagtgttagaagtgtgctcatagacagagtatctttccaaaagcaaagatggagtgagggtgtctcctcaaagtcattttgtgctagggtgctgagagttatacttctgaaggtaagaaataacagtgtaatcacttgatgaaatatttatgaagttttttttttcttgtgcttgtgaagtgtaggagtaattctcctgagtggcaatattaggatacaagctcaaatggagggcctttggcaaaacagccaattggagtggtttaaaaaacaaaaaaaccaaccaagtcacataacaaatatgcacttaacaaacataggaggtatggtgggggcatcaggatgcatagcctcctctaccttttgaactgttttctgagacatcagtcacttttcagacctatcaatttcattacctaggtcaggccaataggatgccatttggtaaatcagggacacagtggcccccaacagtttccagaaacacccaactcacttccagtgttgcttacacactgggatgctctaatgagattagtccttgactataagaccttattcttcattttccttccagagtatgggctcaatgaaaattggtgaatggataccgaggctcctataagactctgattatcatctgcaaccaatcatctaaattttcttgggtgaaataacacattgttacaactcttatttgctaactttataaataaagtctgggtctacaagataaatattgtaataagatactgctttacccattgtatcaattacaattgatcaagggaggttttcctttgataaaggagtgaaaataatttaaaaataaccattttggagaatatgccattgtatgaaattaagagtagaagattttaaagtcttaattaaaaacatcactatctatttatttaaggagctgacctctacttaatagtgccttgctaatcattagttctagttgctgcattcatgtaaaggcaacacaccacatttccttacaagggttacaaaattcacactgagttagattgaacttgcctcaaatgattttaaaccacagcttttgttgtaataaaaattacaggtagaaagctcaggctatggcatctctacttaatctgtgcattggaactgtgaccaggtgatgtagcaagaaaagtatatgtgagtgttgccttctggagaaggctgtgtctggcatttatttaagtttgaaaggtcaattctgtgtggcttagcttttgctgcatacagttttccagcttttcctctcacttgatgggaccataaaattggcccaaatcctccagatgagctaatagagagactagaattttgaaaataatgttctgaatgcaaatggacattgagaagcaatggaaacagtgtacaggactacatgcccggtgcctggagctgctcatgctcattccatcatggtgccgttttgtgactctggcaattaagaaaacaatcaagtgaaaatttatgacctgctgaggtttctctgagcttgcatactattggtgtgcatcccaaagtatagaagcccagagatttccctatgttttgcagacaccgacgatgcaacatggctgtagatgggaaagctggtctctggtcttgggtcttctgtggacctgccatgtgatcctgggcaggtcatgcaacctctctgggtttcgatttcttgaatttatgacaaaggagttgcaccagatgaagatatgtctgtaccaggagaagtttcaactttttaatgaaaatgggcagcacatgacccttgtttcagattttccctagccaagtagagtttcaaccccttgattacaaacatcatgtttaatatcaatgattaacttgtaaatattcaacaaatatccttgactatctggcatgtgccagacactatgccaagcactagagatatggtgctgtttaatgagacagatgtggctgctcgtctgttacaggataatggggaaagagacaataataatataaactagtgaccaggcaaaatattctgagcatgataagttgcattggggcattcaacagggctgtgataggaagactggggaagggaattttagatcaggtggatggaaggccctgagaaggtgtggaaccgaaggcagatgagcatgcggagagcagggggaagagtggtccaggcagaaggaagagcaggaggggtggccctgcaacaagaaggcacttagtcccttcccagaactgtcagaaggcagtgtagctggagcacactggacagggagcctgaggttcagactccctggatgcatggaagctggagaagcagctgctgtagggggatgagaagccacagggagtggagcctgtgggttgggagccaatggcagaggaaggtaggctgtgggttagtggtgggggcaggggctctcctctgagggcttctattttctcagagacagatgaggaggccttggaggcagtggcagagggctgagcagagagcacagccatgagacagtcattctggaggacaggacagccaacttcccaaggaggcatgggaggatggtgggcaggcacaggtctcctgatgggggtctggagttccgagcgtggcatgcaggtaccttgttgtgtggtcttctccaggaatgtccactgcttgggtgatgcatgaggaagactgtgggcctgatggaggctttcaggagagtctgatggaggtgcagggatgaggcatggaggaaaacagagagaggcgtgggaggagggctgaagagggttgtgccatgttggtgaggagtagcaggaccttcaagttcatctcccaacaaggcagtgaagtcaggccctgcagagccacattaaagagataagacagctgtgtttgggttgatatttatgtcaagtggaaggaaatgcgtatgcatccctgacgtggctcacagaagagtcagctgtgagaatcccaaggtttttatcactgggtcagaggagattcatggtgcagcccccagagaaatgaaatgattctgcaaagcctaggtgaattgcgtcagagtcatgaagcaaacataggaattcagttattcttccagttactcaatatttttcagtgtttactatatttggctaagcatggttctaggcatatcatctgtcatgagctcccatgacttgaataaaaatcaaacgtaaatgacctcttacctaatcaaaggggactctgggacagagcctctgggaaccagaggtgcatttcagggttcccagagctgaatccttgttgggtgcaaggagactaggccacttgtttcattagatctagaaggtattccttcccgctggctcatcgggagaacttttagtgatgcagtggtagggggagggaaaacgtgggagggtaggggatgatatttatcttctcccaccccaagagttgtgccattgctggtacttataaagaagaatataacaatctgggccacttggtataggagcaagtagcttctcaggtcattgttatatgagtatttgtctatttttctgtcatgtgtgatatacatagtaaatacatgagtggtagattcatggtatagcatatatggaatttatatgtgtctatatacgtgtatgtgtgtatctatatacatatatattctctctaatggtacaaaggtataagtcttctagagatctacacattagttttatctgcaaagatattttaaatcaaaatgaaggggtagcccagagagacagcatgttctaaattaaatgaaggaaggaaagcccagaatggatgttcataacaatgaccatgaaatattgagaaaaggttcaatgatgttctgcacacattgttacaccagtaggcaactgtgttattgtattaaggacgttggtgcataacatgttacccttctcttagaacatagaccttgtcttgatgctacaggtgagcacccagatgaggcactgctgtcttcatttggcatgtatcagcgattctcaccccaggcatcacgctcccagcttctggtccaaacaactagaaatgaactgcatttcaaaaatgtgttctaggctggatgtggtggctcacccttgtaatcccagcactgtgggaggctgaggcaggtggatcactcaaggtcaggagtttgagaccagcctgaccagcatggtgaaaccccatctctaccaaacaaaacaaaacaaaacaaaaattagccgggcgtggtcgtgcatacctgtaatcccaactactcaggaggctgaggtgggagaatcgcttgaacccaggaagcggaggttgcagtgagctgagatcatgccactgcactccagcctgggtgatagagtgagattctgtcctaaaataaaaataaaaataaaaatatgttctagaaggtagctctgattcttagaaagttcttccttaccttcatcccaaactttgtttcctttgtctgcttttacaaaatcaacttgccatgcaatctatctgatggaatacagtaacagaggactcttttgcaaaacagtccatctcaggtttaatcatttatgttcctctacttcttggaatctctgtcaggtttttgggttaggtgttgtggtcttaacagagttcatggttcttgcaatatgggcagggtgcctgcacatggatacagcagttcacagtcactgtgagacagttatcttattgagatgtttttgctttatggtttgcctttaagttatcactgtcatattacttaggatctttaaaaacaggttttttgttttttttttggagatgaaatctcactctatcacccaggctggagtgcagtggtgcaatcccggcttactggaacctcctccttccaggttcaagtgattctcatgcctcatcctcctgagtagctgggattacaggtgtctgcccccacgctcggctaatttttgtatttttagtagtgatggggtttccccttgttggccaggctggtcttgagctcctgaactcagatgatccacctgcctcagcctcccaaagtgctgggattacaggcgtgagccactgtgcctggccaaaacgcaggtctcttaagtgaaaaatgtttgcggcacttgctggctttgatgctgatttcctttttatacgttttatgttaagtaattctttcgtctgtcaaatgaagacagggaatatagaactgaagagaacagggatgtgcaggctctttcagcttttgcacttgacaatgagcattttgaaatgaagactgtgaggcaaagggttctctgagcagacatcagtggtttctttaattattcaagcaatgacttcactctggccaagttgtgtatttacggcagaagagaacttattgaattttcagtgacagcatacaaaacaggtggctactaaaactaaatttgtttttgtgcaactattttgtaaaaagtactgactgggcagggtggaaggtgagccagctttcctccagcaggtggggaggcaaccataacttatgtgttcattaggacaaattccctttggggtggccctgtggtcacgttggccacagtaaatgagggtgtcctttaaatggagttagctttgttgaaagtcattgttgattgtgcttggtaaggccattctaattgccttataatgttgccacctacagtcattgaagtcaacaagagagacatagtcttcctggtggatggctcatctgcactgggactggccaacttcaatgccatccgagacttcattgctaaagtcatccagaggctggaaatcggacaggatcttatccaggtggcagtggcccagtatgcagacactgtgaggcctgaattttatttcaatacccatccaacaaaaagggaagtcataaccgctgtgcggaaaatgaagcccctggacggctcggccctgtacacgggctctgctctagactttgttcgtaacaacctattcacgagttcagccggctaccgggctgccgaggggattcctaagcttttggtgctgatcacaggtggtaagtccctagatgaaatcagccagcctgcccaggagctgaagagaagcagcataatggcctttgccattgggaacaagggtgccgatcaggctgagctggaagagatcgctttcgactcctccctggtgttcatcccagctgagttccgagccgccccattgcaaggcatgctgcctggcttgctggcacctctcaggaccctctctggaacccctgaaggtatggtggtgatggcttcagacacacaatggggtggtctccaggcagggcctttaagaacaaaacaaaatgaagtgtgtttgtgtttagctaagagacaacaaatgatgaaaacagcagcaacgaacatgatttattccaggtttccttttgcactgggttcaggattgtatggtttacaatgtcatgcaatgaaatttcatataagaaccatatgatttaaaccacaggaccatgggccaccacctgtctttgaagcttctggccgaggaggtcacatctcagttcttatcgcttgtcagatccctgtgttcttctgtttctactggtgatttctgtccagtctcctcctcatcaccaggatgtagctttcctttcctgagttgtccatctacttctaaacagccccagtctgagctgtttagggcacagtgtcctcagcttttaatccctctcttctctctcgttaagggattaccctcaatgggaaagcatattgaatggctaagtgtggagttcaaacctagtggttcttcaaatccctcatttaatatgattgccagtggagagttatttttaaagacattatacagatctatgagctaatgagttgaagaaatacaattcactgcccttaatgaagagaagatgagcatcacagaatgatgctttcccaccttgcagactcgatcactagaggattgcctgatgcaggcatgacccatgctgcctggatgcatgctttctcttcacactccctggtcttctatatccatctctttctctctcttttaaaatttttcttaaaacttttaatccacactttcatagccaaagttcaacttaggatacaattagttgtgaggtctaaattacagtagggcatcagggaagaaataaaaaataaaattttaaaggcacatggtaaatgtgttgggtcaaatacactattttgagaattatactttttattcttgatgtgtataagtttggccaagcctagcaactagtctccttctattttgctgtgtatttacggtcccatcatctcactttgggggaattcccctgttggatgattgcctagcaagactgtgacttcctaataggagaagagtcccagtggagaatgacaaacggggaagtctgaagaagacttcaatatgagaccagcctacttttgctattttttttagccttaaggaactcgttttctcaggttagtgagggctaactgcttctgagctatggatggaagaccctctgtttgtgggtagaggtgagccccagaggatccagccaggcaaacttaaacctggctgggatgagtgatatggactgatgcagcaccttcatagtattcatttttagggaaggagtgtttggtttcaaggattctgatcacttttgttgtctgtaaacattctaactttgatgttgtagctctctttgagccaacttggttttgtaaactcggctaccaatatgtctcacaaacaccagccaccaccagaggaaaatatgcagccatctgccatattttacaagatggacatgctttgccatgctgactttctctgtgttctaaatgttggcatgtgtgcacgtgttgtaggcacacatgataaaactctccgtggttgtgtatgtctcacttttttttctgtgcttcactgcagttcactcaaacaaaagggatatcatctttcttttggatggatcagccaacgttggaaaaaccaatttcccttatgtgcgcgactttgtaatgaacctagttaacagccttgatattggaaatgacaatattcgtgttggtttagtgcaatttagtgacactcctgtaacggagttctctttaaacacataccagaccaagtcagatatccttggtcatctgaggcagctgcagctccagggaggttcgggcctgaacacaggctcagccctaagctatgtctatgccaaccacttcacggaagctggcggcagcaggatccgtgaacacgtgccgcagctcctgcttctgctcacagctgggcagtctgaggactcctatttgcaagctgccaacgccttgacacgcgcgggcatcctgactttttgtgtgggagctagccaggcgaataaggcagagcttgagcagattgcttttaacccaagcctggtgtatctcatggatgatttcagctccctgccagctttgcctcagcagctgattcagcccctaaccacatatgttagtggaggtgtggaggaagtaccactcgctcagccaggtaaacctcccctgttgccgggaactccctctccttcctcagacaccaccctggagggtagtttgccagtctgaactcaagagcactgtggactgtacaaagacaattggctcccttccattgaaatagtttgaatggggacttgagacactgtaccagcaaggctggactctgtctaaagggtgttcacgaaggaaagtctagaacatccagcttatgttctgtccattttgcctcaccctttattcagaaggattttttttcctctaatgactgtgaggattctggagttcgaatccagatttggggatcatggggtggagggagacagagagagatttttcttacatgaatatgccttgggattatttaaacgttgaaattgtatttttacatgatttttaaatgttcaacatctgctgtatctagaaaattatttgttataaaacaaacaaagggtgcatcttcatgcaatggtaaaatggtttctaggggaaggctaacttattattattattgcaaattattatggtggtaagatatggttgtatcagatctaccagtctgctaacatcacacagatgaatggcaagactaaaccaattgaaacctaatcaaaatagttctaagaactgttttaactgagaatgttatttacattacacattgcggtgccatagggcctgtcatctgtgtttcctattgtctcattacaacagattgggaagcattgacaaggagcctgacccacacagcagtaatgggcactattgtgggtcttggcccgtaacctcaaatttaatgatttgatcattcaattacagcagattcatggcaacccagttatctttgagtggttgacccatatcagccccccctttttttttctagagattgagatcaatttttttaagcaaaggtatattaagggccatgttttcaatacttttatttgtaacagtttgaaactgctgtctgttttcctggagcgattgccacctgatgtaagaacacaacccagtggggcttttccctggcttgctttattgaagaagcatgatgctagatgggataggctgttctagttactagctttgcaaatatgcactgatttgaaataggacattttcaagacaagtggtatgaatttgggttttctcttctcttgctggcacagtggtcatcagatgagtttcaccaactcctgttgtcaaatggtgctgggctgaagtcgctttggttcctgttatgctctcgtccctcattgtatcctaatctaccttcattgcagagagcaagcgagacattctgttcctctttgacggctcagccaatcttgtgggccagttccctgttgtccgtgactttctctacaagattatcgatgagctcaatgtgaagccagaggggacccgaattgcggtggctcagtacagcgatgatgtcaaggtggagtcccgttttgatgagcaccagagtaagcctgagatcctgaatcttgtgaagagaatgaagatcaagacgggcaaagccctcaacctgggctacgcgctggactatgcacagaggtacatttttgtgaagtctgctggcagccggatcgaggatggagtgcttcagttcctggtgctgctggtcgcaggaaggtcatctgaccgtgtggatgggccagcaagtaacctgaagcagagtggggttgtgcctttcatcttccaagccaagaacgcagaccctgctgagttagagcagatcgtgctgtctccagcgtttatcctggctgcagagtcgcttcccaagattggagatcttcatccacagatagtgaatctcttaaaatcagtgcacaacggagcaccagcaccaggtatggtagagaaatgctagttgctctgccactcagttctctaatgcatgagttgagggtaggctgctggccactggtccttagatagaagccctccttgagtttacaggaaaggtggaaaattaatcacctgctggtttcagcaggaacaatagaatatgagatgtccctccttactttgattctctagctgctctctcaggagaatgagggtgagtatttttaagggcattagattatttcatagtaagacatgttataaagatttagatatcagtggttaaaatccttttttaaaaacagtttttatggtatgcataataaaagccatatcatatggttacattgtacctaaaacagccttcatcttcatattcacccaatgcctttatattgttataattccttcattacattcattaaaaattaaaggagtagaagaggtagataactttccaccataaactctgcattaaaatcccccaactgctaattgacactgccatgacttttcatttaacccctttaatttagtgataaaaatgcagtgaagagagtaatttcccctgtatgccttttgatgaaaaatgaagactccagagcctctcctttgattactgggcccattggccgttggcttgggatggtaactccgacatctgggttccgtttcctcccattaacccacttgtgacttgcagcaactcaattgaaacctcccatcgataaaatgctagtggttgtgcaggtgctgccatctcatgtctctcctcccatcccaagttttttcttgaatacatctttgaaagctaacaatactcttcaagcattgaaaagttccaaaataaaaggggtccctatattggtgtattagtttcccattgctgttataacaaagtaacacaaatttagtggccaaaaacaaaacaggccgggtgcggtggctcacacctgtaatcccagcactctgggaggccaaggcgggcccattgcctgaggtcaggagttggagaccagcctgaccaacatggtgaaaccctgtctctaccaaaaatacaaaaattagctgggtgtggtggcgggtgcctgtaatcccagctactctggaggctgaggcagaagaatcacttgaacccgggaggcggaggttgcagtgagctgagattgcgccactgcactctagcctgggcgacaagagcgaaattctgtccaccccccgacccctccactgcaaaacaaaaacaaaaacaaaaacaaaaatccttattatctgacagttttgaaggctggaaattggaaaccagtgttgctaagctaaaatcaaggtgtcaacaggctgtgttctttctgcaggttctaagggattcttcatctgctcaccttttccagcctccaggggctgcctgcattccttgcctcctggccccatcctccatcctcattgccagcagcttggcactttctctcctctctgacttctgtttccatccttacatcttctctctaactctgaccctcttaccccctcttataaggacacttgtgattgattacattgggcccacctggctaattccagggtaatccccccatccccaaatccttacctgaatcacatctgcaaagtccttttctcaagttcggggatttggacttggacatccctgtgatgctcttatgcagcccacctcgttgatatgaaattgctgctctgatgtcctgtgtgagttaccaggctgtcctcctcccagtttcaggtgaaaaggacgtggtgtttctgcttgatggctctgagggcgtcaggagcggcttccctctgttgaaagagtttgtccagagagtggtggaaagcctggatgtgggccaggaccgggtccgcgtggccgtggtgcagtacagcgaccggaccaggcccgagttctacctgaattcatacatgaacaagcaggacgtcgtcaacgctgtccgccagctgaccctgctgggagggccgacccccaacaccggggccgccctggagtttgtcctgaggaacatcctggtcagctctgcgggaagcaggataacagaaggtgtgccccagctgctgatcgtcctcacggccgacaggtctggggatgatgtgcggaacccctccgtggtcgtgaagaggggtggggctgtgcccattggcattggcatcgggaacgctgacatcacagagatgcagaccatctccttcatcccggactttgccgtggccattcccacctttcgccagctggggaccgtccaacaggtcatctctgagagggtgacccagctcacccgcgaggagctgagcaggctgcagccggtgttgcagcctctaccgagcccaggtacgcagggaactctttgcatcctcactcagtgtcattgtctggggctacttgtctggactgtgggccacaaggtgttctcaattttgcttttcctgccatgtgaagtgaaaactaaaattacaggaaaatttaggaacccacatgccctttttggcctcgatgggcagaaatggcagaggttcaaggggggagatgctaagattcatgttttggggcaaattaaattctccaaaagggacatatgtgcagcttggaattcaggactccttaactttgcatgaaagcttctgtctagatatccaaagggaggggccgtctaactgataacgcctgttgcgtatcagtcctgcgacccctggtaggtttggtcagcagccttctgtgaggcaggaaggagtctgaccagggacactctgcaagctgggacatagactctgaaatattggtatctccagagccaaggtgtgaagataattttgactttgcttggtgctgagaagtgtcttaactggcaggaaggccacctggctcttatgaccatagtttattctattttctttttcctgttccctctttctaggcctggtacaataaactaaaaaatggtgggagccctggtgctgagaaggaaggaggaaagatatatctacctctcaataaatgtcctccaagggccactctcccgggtcactcgggtggggggggttcacagtggcgaaggaggcagatgcggccttgctccctcatatgcactcacttgcctgctcttccaagaggagagaaaagaaggaaagttggggaggagcggaggaaggagtaaaagcaagtgaaaggaaatcactgcaggatacagtgggtgatgagggaggtgaggatgattatttgggtgcaactgagaggggcttggtttctcctcgctggtgcctggggaagagagcagtgtggcccaccaggtttctgtgggatgttcctgagcatttatgatcaggtaaatttgggcaacagtgggataaacaaagtgaaagaggctttctttcttcctaactaaggcgctttgtgtgtctccaacacaagaaaggaaatgcaacatttccaaaatgtatctgcctgcaggaggcctctgtgatgctgtgtcttggccccagattgccgaggatggactttgggaatattgtcacagtgcgggtgcagcttctgttgtcaggaacgtacatttccacaacgctgtggctctttgcccactcactctcctgcgctccagaacagcctccctctttcccccttctccccattcggaggcttctctcacacctctcctgacccacctgactctcagctggtaatcttgagtcctatttctccaagaaaatgcaagtaaacccaaagagagctgtccccggccacgtcatcccgtggttccttgggtggcctgtctccgcttcctcagctccctttcctctcacctgctcagtggcaccatctgcagttccctttcttgctcttgtgtcaccctttctccactgtgctggatggttccatccatgataaaatgcattgcttcttctctcttaaacaccctctctgatgcgccacttcccctgccagcagcacctgtctcctaaagacttatctatactctaaagttcctttcctcccatcctctctgagcccaccctactttgtcattcacccttgctcctcccccaagtgctccagttgaggtcactccatctgacaaggtccctgtctctggcgaagcccagtggctgaccctcgggtccctgagcagcacctgatgcagtgcaggtcacgtccttcccaagtaccatcctcgctggtgctgatgaggctcttctgattctgcctccgtcgggtttttcatcctttgctccccttctctttgatgtgtaaacactgaaatgcccaggactcccacttcttggacttttaacagtggtgattggtgttaggatcccctgcctgtgaatccatgacaaactgggcggtggctcatgaacgctaagaatttggtgacgatgaaggtgaagccatgctcacatttgtttcgcaggtgttggtggcaagagggacgtggtctttctcatcgatgggtcccaaagtgccgggcctgagttccagtacgttcgcaccctcatagagaggctggttgactacctggacgtgggctttgacaccacccgggtggctgtcatccagttcagcgatgaccccaaggtggagttcctgctgaacgcccattccagcaaggatgaagtgcagaacgcggtgcagcggctgaggcccaagggagggcggcagatcaacgtgggcaatgccctggagtacgtgtccaggaacatcttcaagaggcccctggggagccgcattgaagagggcgtcccgcagttcctggtcctcatctcgtctggaaagtctgacgatgaggtggacgacccggcggtggagctcaagcagtttggcgtggcccctttcacgatcgccaggaacgcagaccaggaggagctggtgaagatctcgctgagccccgaatatgtgttctcggtgagcaccttccgggagctgcccagcctggagcagaaactgctgacgcccatcacgaccctgacctcagagcagatccagaagctcttagccagcactcgctatccacctccaggtgagatgggggcgtcggaggttctccttggagcattttccatatgaaaaataacaggctcaaaggccatggtactcataataaattaaattaaaataaaggttgtatgcccttacctttatggtttttattttgagacagggtctggctctgtcgtccaggctggagtgcagtggcatgatcataactcattttaacctctgccttctgggatccagccaacctcccacttcagcctcctcagtagctaggactacaggttcataccaccacgcccggctaattttttgtattttttgtggagacggggtttcaccatgttggccaggctggtctcaagcccctgagctcaagtgatccacctgctgcggcctcccaaagtgctgggattacaggcctgagacaccgcgcccagcacctttatgttcttcatgcccaccagccagaccccaccaggacacacctgcgactgaacaagttgggtctattgctcatggcatccagggagaatgcataccgtggcaaagcatgagggcatctccataggagggtggccggaaggactggggggacttgagctagtggcaggtcattttgtggaaggcttaaagaaatggaactgtggcctggattggatgttgtcaagacgtggaggtgattctgtagctgtatcttaagtcttacctagaagcaggatggccttggtatagattggtagagaagagcagtcactcttattaaccaggacagggagtgtttttgtcctttttgtggtttgcaccatgtttttctttttgtctgtgttcagatagggttacaatgtggtctcattttcatcttgccccattgtgatcacagagtagccttgtctgttgtgggggtcctgtgagatcatgtgtgctcaacaggagaaccccaaggccatgtgtgctggaccagctccccaatgcgggggctgattctctctttcttaaacagctccatcacaagagctgctcagcttccactatgctgcatttacaccgtaaattgcccaattgtgtatgaggcaaagggcaggttgaaatgtgtggagtagcaacatacaagtttaataaaatagcatctgaggagtacctaaaattctaactaataggaaaatgtggctcatctttctcaggatcttttgattaattttattgttaaaaatgcactaggctgggcgtggtggctcacgcctgtaatcccagcactttgggaggccgaggtgggctgatcatgaggccaggagttcgagaccagcctggtcaatatggtgaaaccccatctctactcaaaatacaaaaattagctgggtgtggtggcacacacctgtagtcccagctactcgggaggctgaggcagatgaatcacttgaacctgggaggcagaggttgcagtgagccgagattgcgccactgcactccagcctgggcgacagagcaagactccatctaaaaaaaaaaaaaaaaattaaaccagttatttaatagaattaaatatttttaaaaatgcgctaatgtaaagaaaatgagtcagggtgggtgggggaagctgggcatggcggctcatgcctataattctagcactttgggaggctgaggcaggaggatcacttgggcccaggagttcaagaccagcctgggcaacacagtgagaccctcatccaaaaaattaaaaaaaaaaattttaatgaaatttaaaaaataaaggcacaggcatggtggttcatgtctgtagttccagctacttggaggataaggagggaggattgcttgagcctgggaggtcaaggctgcagtgagctgtgactgtgcaactgcactccagcctgggagatagaaagagaccatgtctcagaaaaaaaaaaaagaaagaaaaggaaatagaggaataatagtgaaaaataaaaacttcatataaatgctagagatgtgtgagcaaaaaggaaatacgagggcacaaatgcctggggagcattaatgtgaccccttggatatggcactgtgttatacgtaccctgcccccatgggctgagattgcgcagcatgctgggatggtgttgggctcctcaggggtctcacttgctaagtgatggccttggacaaggcgagaacctttggcctcagctgtttctcttcttgtacaacaaagatatagatcccagtggccttggtctcttctggtagcaacagttcatgattctgtagattacggtagcccaagattgatttctaaatgctccttacattttagaaatcagtagtaacccagaccacaatgccaaaatttaaatagagtaaattcagaaagacacgttttggataacttcaaatatttcaaggagcagaaattgttttggtgtaaaaggtccaatttttaacggctaatttcaaaaagcccgagatacaaacaacacaggcatcttgggatataatcttaaggttgattaggattatggtgcaaggtgcacaccaaacctgggtgagggctacttacacactgaatgtttccctttttcttctttgatctgcagcagttgagagtgatgctgcagacattgtctttctgatcgacagctctgagggagttaggccagatggctttgcacatattcgagattttgttagcaggattgttcgaagactcaacatcggccccagtaaagtgagagttggggtcgtgcagttcagcaatgatgtcttcccagaattctatctgaaaacctacagatcccaggccccggtgctggacgccatacggcgcctgaggctcagaggggggtccccactgaacactggcaaggctctcgaatttgtggcaagaaacctctttgttaagtctgcggggagtcgcatagaagacggggtgccccaacacctggtcctggtcctgggtggaaaatcccaggacgatgtgtccaggttcgcccaggtgatccgttcctcgggcattgtgagtttaggggtaggagaccggaacatcgacagaacagagctgcagaccatcaccaatgaccccagactggtcttcacagtgcgagagttcagagagcttcccaacatagaagaaagaatcatgaactcgtttggaccctccgcagccactcctgcacctccaggggtggacacccctcctccttcacggccaggtatgcaccgtgtgacccatgactacagagtgtgacatcaacattttttttttagttaaaaaagtaatcagtagtcatttttaataattttcttctctctgggttgtttcttcagataatattagaaattaaatactggaaaagtagttccattgaaattgcagaaggaagcatattattgatcttccatcactcctgagactaatcatagccccattgaaaggttctgcagtgttgcactgagataattacaaactcattggctctcagaataggatggcatctttgaaatcagccagtccatgccccactgaatgtgactttgaagttggcccatgcctactggccagatgcccaatatagtccaggtcccctcattccttggcctggtgggaccatcagggagcaccttcctggaagacttgcagtcgtccacctcagcttctaccccgtgctcctggttctcgtctttggggctgcaaaagcaaagtggatctctccaccagcccatatttttctttgtccctcctccaagtaatcgccatgtagacatctgaagcaaaccattagggttggttcttcaaaggggagcagtatgcctgtttccctagctcactgctccctaccaggctgcctgtggcacatctcacatccctcacactgtctctcatcctttctcctctctattccagtctcagttgcttaattataatcaagaaattaccctccacaccactgatattcagccagctcctacaaagctctcagaccatcatccaaaggttaaggggcctcttcctattttccaatctgtttctcctagtccttccttgctttgcacctcacacacatctcttcacttccaggaactatttaaaattcttgaccacaaaggaaacttctagtggcatttcctaaaacacttgagatcacaaatgtcaaagccaggtccctattgaattcttgtcacaatgccattttgcacgggataactgaagttctctgtcactgagttttcacagagtgtgacatcaaataatttttctcctttcctttttgtttagaggatttatcattcatcttcttgtatttagcatgtttgggagctgcaaattcaggaactacaggctaaagaggcatggatttgagtgaaggtttcactgtgaataaattattaggaatgtcttatttcagttatttaattttaccttttgtgtatttatgttctgggtctggaaacctaatctctccttattttcactttaatcacttctagagaagaagaaagcagacattgtgttcctgttggatggttccatcaacttcaggagggacagtttccaggaagtgcttcgttttgtgtctgaaatagtggacacagtttatgaagatggcgactccatccaagtggggcttgtccagtacaactctgaccccactgacgaattcttcctgaaggacttctctaccaagaggcagattattgacgccatcaacaaagtggtctacaaagggggaagacacgccaacactaaggtgggccttgagcacctgcgggtaaaccactttgtgcctgaggcaggcagccgcctggaccagcgggtccctcagattgcctttgtgatcacgggaggaaagtcggtggaagatgcacaggatgtgagcctggccctcacccagaggggggtcaaagtgtttgctgttggagtgaggaatatcgactcggaggaggttggaaagatagcgtccaacagcgccacagcgttccgcgtgggcaacgtccaggagctgtccgaactgagcgagcaagttttggaaactttgcatgatgcgatgcatgaaaccctttgccctggtgtaactgatgctgccaaaggtaactcccattatgtgcatattttccatcctttcctgttgacatttgtgcctctttagctgtctggtccctggtgctgacctctggagtccttaggcatttggttgcttcatacatttacttatacccactgggactggtcctgacacccacctcaccactacctagggcgttcttccaagacaagagtagaagtctatcatattttgcttttataagatttacttttctcccctattccttaatccctcaaacaattcagatttattgattcctgtgtctaattatagatttattagatcaagtatttgagatcagaatatttgattttcaagtgcttttaatttaaagcacaaacttggggtgcatctaaacaccagtggtgtatcatcacaccaaagttaattaacaccaccaacaaagctgactttttaaaatagcttactatttggcacctaacagctaccctcatttctctctgtgagaggggtggatagaattgcttctcaaagctcacacacacaggatctcattttgcacttgagtgcgatgccctggtcctctgcctgggttgtccctactgctggtataagtagagttcgtctcctcagccccagctgagaactcatcacctgcatttctcctttccagcttgtaatctggatgtgattctggggtttgatggttctagagaccagaatgtttttgtggcccagaagggcttcgagtccaaggtggacgccatcttgaacagaatcagccagatgcacagggtcagctgcagcggtggccgctcgcccaccgtgcgtgtgtcagtggtggccaacacgccctcgggcccggtggaggcctttgactttgacgagtaccagccagagatgctcgagaagttccggaacatgcgcagccagcacccctacgtcctcacggaggacaccctgaaggtctacctgaacaagttcagacagtcctcgccggacagcgtgaaggtctgtggggccagttggttcaggtgctccctgggaaatttccaaatttttactggaaaggaggaagcccttcccccaagttaaatcctcttcatgtttcactggattgttagtgtctatatggaaaatcccttagttattaactgatctaatgtcatgtactgtcttcctcattttggtagtcttacgtaagctctaaaagaatcctggaaatcagtagtttaacttgaatgagttgaatttgtgattgatttatgtttaattatagtccagtcaggtacgttctccactttcatttctctgtgtgtatgtgtgcatgcatgcatgtgtgtatatacatgcatatatattgtgtagacacacacaccatgtgagtttgctagggatcatcatgaagtactacagcctggcgggcttttggaacagacatttattttctcacagtcttggaggcttgacatcctcgaggtgtcggcagggctgtttctcctgagtcttctctgcttggcttgtaggcaggggtcttctccctgtgtctccacatggctttctctctgtgcatgtctgtgtccaaatctcctcttctaaaaggacatcagtcatactagattaaggttcactctaaagatctcattaaccttaattacctctttaaagaccctatctccaaatacagtcccattcttacggtactggggtttaggacttaacatacaaattttgaggggacacaatttagcccataacacatgcacacatgcacacacgcacacacacccacagacatgcacccacacacatgcacgcacatgcacccatacacatgcacacacatacgcacccacacacatgtacacccacacacccacacatgcacacacacgtgcacacacatgcacacacaatgcacccatacacacacatatgtacccacacacatgcacacacatgcacgcacacatgcatgcacacatatgcatatgattcgcagaaactacatcttagaaatatgagaatgagataaaaattgtttttattgtcattgctgcttgtcttttttaaaataaattaagcactcaaatatactcctccattttaagtgcaatatcaaagtcttgtgaacatgggtaatcattcctcaacttgggccctcagtttccttaagtgtaaaatgaagggcttgagacagcgagtctctcagttttctatcagcagtctgcaacactcctttttagttttcctgggatttgacagctctcttatctgcaggtggtcattcattttactgatggagcagacggagatctggctgatttacacagagcatctgagaacctccgccaagaaggtaggtgccaaggctttctaaatatgagaagtaaaccctggtgaggcggggtgtactgctctgctggagagaaacctctctgctaatgcagcgccccaagggagcagcgttgtcttgggagactcttcctcccagcgttgtggcccttcatcacctgcttggagctgtgggatggagctaacaaaaattccttctgtacttagacagctttactgttgtgttgtggctgttcaggtggtagaatgttcagaaagcatgatgcttttgcaaaagatcatgacgtattgattcatttaacttcatcacataaactaggaattagttactaataaaaatacattgctctatttttggtttgcagttatcacagttcaacatttaataacactacacccaaataatacaaagaaaataatgtaagcaatgacgtaccaaacataaggtgacagccatgcctattatcagatgtgatctttgactattcacttgctttggcgtttggtagcactgactatcagaaagtggatgccattacagaagtgtaatttatcctaagaactttctatttattagcttacttttcccaagcaatggagatgaggctgctattatctgattttggaggtgttagtatttcaatacttcccacagcatactcgtgttacagagggcctgagtttgagaactcatgcatgaatacacttcatggatgccacttcctatatttttagtaataggtttagttattgacataccggaaacaattattcagcagagtccaaagtttgagtatttcaacaattcagagtagccagtaaacttgattaaatatatttaagttaaaagctaaattttacactgaagttttctttaaaaatgtagtcaggaaaaaaggacattgcattttccacatgcctaggtgagctgtattaaatgtgtctttctttgcaggagtccgtgccttgatcctggtgggccttgaacgagtggtcaacttggagcggctaatgcatctggagtttgggcgagggtttatgtatgacaggcccctgaggcttaacttgctggacttggattatgaactagcggagcagcttgtgagttttttttatgtctttatacacagaccagtgtagataccacaccttttggcatttcaagagaatgaagttaattatcagcaggtgaatggaggtggggggggggccttggtagatagttaaatttatttaattcacttgggaactgccttgttgccataacacatgtgaatctggaaatggagatagcaaatcgctggaaatccagcgagctggaaggggatcctgggcgcgctgaggttgtggccttagcattttctctgctcccttagcaacggcctcttttaacaccattgcagggatgcaaaccatcgagattgtccatcctccaattggaaactgtgtcaagagcatctgaaatcttgcatgataaaaacaacatgcaggaaaagaaaggctgtttctgggtggagaagtgctttaattgccctccctagtttccctctgtgtcaatgaagctccctctgaggcttcctcattctccccagggccagcctctctcagctggaggtgtgacctcctgggtttagactggggatggagcttttggaagatgtggggctgagctgcgaactcagagattctttgatggtagcaacagtggactgtggctatgagaatgggaggaatggaccttcctttcttccatacttctttgcagggttagaatcaggatttttttcctagtggaagtaggttgagttagctcacaaatctgggatatgggagaaagggaaagctcttggaagctcgttggaagaaagtgcatgtgcccaccattagtttagcagatggaaatgtatttgggcatgccctttcccacataaggtcaggggccagatgggatgagaatgtagagggtgtctgtgtgacctggagttgagaagcttttggctccgaggccaggaccacttgtgcctgctcccaccatggctgctctggaagcctctttctgggctggtaccatatcccatgactctcaccctggttccaaggaagggtggtcatggatatctgttctggaaccaccttcagtcttggccatctgccatttgcttggctttgcactttggaactggaacatatgtaagttatagttaagatctgatgatggaaacttctagaaataaggtccagcctgcagtgatattgtggataagatctattttactttggttgttctttactttcctattggtgacctcccatctgcaccccgaccgccaggagctgggccctcctgacttcgctggcaatttctatcatatcgtcagtcgtccagcaaatgtcacctggagggacttcatctcacaccgtgaaacccccacacatccgattttgacccttaaagcgcatttatgattttctgctgggcatttcttgagatctgaacatttggtttctcttcctttcggtaggacaacattgccgagaaagcttgctgtggggttccctgcaagtgctctgggcagaggggagaccgcgggcccatcggcagcatcgggccaaaggtacggtggctttacccttgcccacgcctgagatgaggtgtcagaagcccgacattactttggtggggtaatttctctaacagaagagtgtggagatgaaggaggagacgagagaccatttcttatgttagaaggaggagctctgaggggcagacctgcgtgctgttctgctggggcctgttccagtgaagatggttcaggcgggaccctccttttgcacaggataaggggatctgtgctttaacagcttggtccttcatttcataaaataatgttaaaggcagctggcgtccctgacagcagcctggctgcgaatggcagctggaactcatagcatttgctctgagtcagtaggaactaacaggctttcttggcagagcaggagccttagagatcctgatagagagaatcgtgacatggtgtactgaggggaaaagcagtaacagggaaagccatgctgagttttagtgctgctctgccaaatgaagggggaccacagggattcttactgtagagcaaagaagaccacgggattaaacagaggacccgattactttgtttcagggtattcctggagaagacggctaccgaggctatcctggtgatgagggtggacccgtaagtaaaaattgttttagtccctaaaatttcaccccctccttgatccttacccattgggattgcattgtggatttcatcatttgttcagttgctgatggctttccctttgggagaaaaattaatttatacttttcttaacaactttgcctggatgtctaagtacgataattgaagtatgacaaatgtgggcatgaagggtgggatttgttcttactctgtttcagaaggagggattaattggtttctgagccagagggacaccgaatttgcacacccagtatctactagattaagacatgcaagtagagatgggagtgagctgaggggcagggacacagcaggagacctcaccagggctttaggggttaccccgttaagggtagtccctggaggggatgttgctggatcagatcatcagtatccgagggtcttggggatggacagaccccagtagcagggtccatgggagcaatgcccaagacagacacctgtctggggagctttgggaccctagatcaaggtccagccctgggataggggacagaggggctcacgaggaacagtgtggtcaccagggcccagccggcagggctcggctagagaactgggaatcaagcatcacttggaggagctgtcagcccggtgggtcttcccgggattcagcacccacagagacacagtgctgggggccacccacccttgccccacagggcagtgctgtctgcgctgctaccctcccagatctcattcccttcagggaaactgcaggttccaggccaggcctcatgcaggggcccaagaggctccctggctcacgtagcctcgatcggcgttccccatggtgaaatctgctttctgctgcatgctgttcacagtaccctttacgctgctgcaagcccggcagagaaagggtgatgaagggctccagcttgcaaaatgcctttgtctctcacaacagggtgagcgtggtccgcctggtgtgaacggcactcaaggtttccagggctgcccgggccagagaggagtaaaggtgaggcgtgggtgatggggttgctagcgtggggaggggtcaggtgactcgcagtttctccagatgctgccagggagggaggcgctggtccaggcttcttgacctcagcattcagcagcccgtgacctctcattggaaggcagttctgagcagggtgggttcaggagcaggggctgcagctggtggggagcctgagaatggagaaatagtttcctgtggaaacatgaagaagccaggaaaccctcacaaggagagaacatgggccagggcggagggtaggctggtgcccacggccccggccctggaccgtgggagcagtcagggaagggagtggagtgagaggacagcaggtgggttgaaggctggtgaacttgcttctctgtttgctgaagtttgaaggcaggtgctgaagggaagggctgcaaagttacaaagtcagctccttgccctgggttttggggtccacccccgccggcccagggagccaagaccacccaagcattcagttctagttttagttttaaaacatcgcacgtggtggtgagagaggaatccaaaggggtaggactctaatattacattttcagacactgcaacattcaaatggggtggagtgggggaacagcccttggcctcttctgcccgagggaccagccctgcaggaaaagctaatgcttcccctatcgccttgccttctagggctctcggggattcccaggagagaaggtatgcaagcttggttttgttttacaaatggaaaactctcccagtatttctcatttcttcctttgccagaatagctttctatacttacctgtccgccttattccctcttagggcgaagtaggagaaattggactggatggtctggatggtgaagatgtaagtgattttactctaagtccaaactgcttttggttctgaagattccagaaactaacaactcagtctgtgatagaaattgcagcaggtgtgacctttaatccttgtctttggcagggagacaaaggattgcctggttcttctggagagaaagggaatcctggaagaagggtaggtgtatttccacggtggtgctattatggaaagaatatcaacatttcatttagggaatagttattttctttcctcatatacatcaagcccgcttcctccaggcagccttccctgacctcccctgtgagtgcacccattacatcccctctcagctctgacacattacagtacattttcttgtttcgagatcacatcccatagggcagggactgagtttgttttgttataaataaatctccagtgcctggcacaaagtgggtccccaataaatattcatggatttactaaacgaatgaaaaatatgtggaagtgaatttgccttcatggtgaatgagtaaattgtaaacattgttctagttaagatttatgagttgaagaatgtgatttttagggtgagataaaaatggaaacatctagtttttagcatccacttgtgctttttctttagggtgataaaggacctcgaggagagaaaggagaaagaggagatgttgggattcgaggggacccggtaaagatttctttattgacgatttcagacctgagcctggggaagagggttgttgggaaagggggatgaaaggaagaattctacttttgaaattgctttaaaacacgttgataaaatatgtgctttgtctttttcttgcagtttgggggtttggggagatgtgttggttctcttgctaaccagataatcatttgcaagtcctgttatacaaatatctgagaagtttccaaaaatgtggtatcagggcacttcaaatttgcttttggaaaagagaagagtttgcagcttttctcattttgtgtctctgtaaaacgtttaagcaaatgagcagtacaagctagcctcttcttccagtccatcctgcctctgtggccaaggataagcaggagtgagcctggggcatcctcctccctggggaagaacgattgcacctgtttggggctaagagtgctttgctgatcccgtgattgggtttcgtaagacctgcatggatgttacctggatgggttgtggccgaagggcttgtccctcgaagccttgcatgcaggtccttgctaatatttccctgaccatccagtccagtggcagctgctttccttccatatgtggctcatttccctttcccatgttgctttcagggtaacccaggacaagacagccaggagagaggacccaaaggagaaaccggtgacctcggccccatggtaaggtgctgcacattcctagactctccctgtactgagggcaagagaaaggacacacttctcggctcatcagcagccacagaggccaaagacgtggcctttaacactgcaacgtagcctaagattagcagcagagtccccgtgaaggaagtctccgtggggaaccagagtgacccttgccaagtggggcttctcagcagaatctgtgcctcttagatatttacggaaggtgcttgttaagccaaaggcttgtagaggtgggagtgtactgaagtccggtgcatcctgcaaagtgtgcaactgtcctgcagacgggctcttcctctgtgaatcgacccctttccctgcaatgtcttgtgcagcatttcagagctagacattcttctctgcagatgagaatctcatgctaattttccccacaccagggtgtcccagggagagatggagtacctggaggacctggagaaactgggaagaatgtgagtgccattagggctttggggggctctgtgacaattcttagtgccataagatctgcccaacatgacctggtgcatggttagtccacagctctgcagtgagtgaatgtaaaaggatttctgaaacggttgttactccaatctattttcattcttataatttccctggtgcttcatctcttctctctccccaattcttgctctccccaaaaacatactgaacagatacttttaaaaataatatctttgctactttcaaatatcgggccaggtttgatccaactaaatatttaagagacccaaatggaaatcctaatactgggggagggagggaataaggggcaagagggctgagggagttgtggatttgttgtttttgtaattatctgtgggtttttggggggatgctgtaagtgaaataaaaaaactagatttcttctttttctggcgtattgcatcttgcaatttcaagacatttcagaaatgtctgtagcagaatagctccttgtatgcctaatcctcagtcttgttgaataaatgctaaagtcaaagtgatgtgaatgatctttctgaagccaaccaaaagcttccaaggtcctcgggcacagacagcatctgccttgtagctgggagaagaccagtggtgtagaagtttgtaacctctcagaggaaattcaggatgctggtgggtgcctaggggaggtctctgctcagaaatgaacagagcacaaaggctgcaagctggggctgggtgctgggaactgggccctcagccacgccctgaggggcagtggctcgttcggcccggcacttgggccagtagagttcgctggggtgaggggctttcaaaaggagcgactcaccaaaatcaaattgatggactatgggcatcattttgctttgaaaattcagaagaaaatagaaattttgaaaatatcattttaaaatgtttgagcactatttatttatttatttttaataaattgtaaagacctggatcaactgcttggaagtgagcattatttttgaataatgctatataatgaaaaagaagctatataatgaaaaagaagaaatactcatcaaatgttacaatgggctattacaactcagcgtgtgagcagagccaaaacttggtttcatgaaatgacttaaaattgagtagttcatacaattaatttcaattctacacacaaggtagaaactggatttgaattcggtttcagtcacgggctcttgaggactcagttcttccttttgtggtctaatggcctgctatcccttcccttaggaccacagtgccaggctcaggccaagctgaaatgtgtccctcccactgggcttcagcatgcctacatcccctttctagagtctccgcaggcggcctctggcctgagcaatgtatcactgagtgctgctggactctcatggaactctagcatgtctcttttgggaggggccaggccagattgttggtttgtagaggagaacagtgtccccttgtctcaaattttccatggaaggtggccaagatcttccgctgaagcaggtggcattacagcgaataatggcaaactggtcaccgcagatcactgggctggtccattggaagtggagagtgaggttcctaggttgatgtagcagatgactgagccccacaacagagctagtcggtcacagcctctgcaacaccaaccctaactttgcaaagaccgcctgggacattcataaagtcccaccccaaacctttctactgctgaggaaacaattttgaggtggaaattaatggattacttgtgaagtaagcccacatgtttgaactaaaggtcacctctggagcatccaggaagatgttgccaagtcgtgagccctacctaagtacacgagacgtttaggtgcacatgtgtgtgcttcagatattttacttaaccgagtgtgtgttgtgtttggccgggatcacttggagaacctgggactcccttccattataattaatgtatttcatgacttctcagtacagttgggaaggtggaagaaaaatagacaggttgacattcccttttcacattcctcatttgaaactggctgggatcgtgcagccaaaaggagtcattattttgcttggcaggtctgcagtaattctcaaaacttccattgggtgattaacaggagcagcaaggaagcaaaacttcacccggatgagggtggaggaagggtgtctgtgtgtgcgagtttccccagggctgatgaggtgtggtttctggttcttggcacgatgtgggtgcttgggaagattcccctgagtaaccgcagaataagagggtgaagtctgaaagagctctaggccccatgcccagcgtcccatgctccccctcacagtttgtgggactttttcttccacagggtggctttggccgaaggggaccccccggagctaaggtgagcctcatgcagtgccccctggagactctcttcaaacagcccagatgccgcccagcccaggagtgaaaaacactctctcctgtgaacccaaagcttcggagacagataccaatcaatttagaaagttgatttcgccaaggttaaagacatgcccgtgacacagcctcagaaggccctgatgacacctgcccaaggtgttcggggcacagcttggttttacacattttagggagacatgagacatcaatcaatatgtgtgagatgtacattggttcggtccagaaaggtgggacaactcgaggcaggggaggaggcttccaggtcataggtagataagagacaaaaggttgcattcttttgagtctctgattagcctttcactgaatacacagtttaccagaacagtcacctatgccttagttaggcttagtgaaaaacagggcgaaggaagcaattggatatgcctttgtctcccatgagcagagggatgactttcagttctgtctgtcctttgtccacaaggaatttccctgtgggcagaatgtgagggaggtattcagcttaaaaaaaaaaaaatctggccaggacggtggctgatgcctgtaatcccagcactctgggaggctgagacaggcggatcacctgaggttgggagttcgagactagcctgaccaatatggagaaaccccgtctctactaaaaatacaaaatagccaggcgtggtggtgcatgcttgtaagcttgtaattccagctactcaggagcctgaggcaagagaatcacttgaacccgggaggcagaggttgcagtgagccaagatcatgccattgcactccagcctgggcaactagagtgaaactccatctcaaaaaaaaaaaaaaaaattctttgtagctatcttatttaagaatagaatgggaggcagctctgtctgatgcagttcccagcttgacttttccctttggcttagcgattttggggttctgagatttatttttctttcatcctccttgggctgttctggctcccgaggctctgtcagccgtctccttaaacagcctcttctgcagagtctagagaaaatggtgcccagtggggacttggggtccaagtgcaggaaacatgactgaggcagtagtgtcccgggcgggcgcctcttccagaacgtgctcacctatctggccatcagcaacccgcaacttcccggtgtctcggtcctctgctttaggtctaaatgatccctgtttcacaaagctgtccgaggagaggtgaggcaagagtgaggaacaattgtagaagtgcagggagacagctggctcctgtgctcagtgtctcacctggggttaccgctttgatcatctgttacctctggaagagctgagttttccctggttgctttccaagtccctggcccagaaatgactgtagagcaaagagctgacattgacaggaaccatcctgactcctccctgcatcttctcttatttcaaagggcaacaagggcggtcctggccagccgggctttgagggagagcaggggaccagaggtgcacaggtgagtgcttccgtgtgtgactgtgtgccctctgatatttcacaaatcatttaaaaaatgattgggtggcatttatatccggaaagttaaccattttaaagtgaacaatccagtggcatttggtacttccacaatgctgtgcaatcatcacctctatctaggttcaaaacacagtctcgaaggagacctgtacccattagcagtcactccccatcaccctccaccccgagtccctggaaaccactaatctctctctctttatggatttgcccactatggatattttgtataaatggaatcatttactaggcagctttgtgtgtgtggcttgacggagcatcatgttcttgagcttcatccacattgcagcatgtagaagcacttcattcctttacatgatggaaggatactctgttgtgtggctacagcacactttgtttatccactcattggttgatggagatttaggttgttgccatcttctggcaattgtgaatgatgcttctgtgaagattctcctacacgtttttgtctgaatgcttgttgcttgtatacattttaagctcacttgcctattcacgatctggattgaggcagctgctactgcagctaagacaggataattgtgggttttggtggccgtttttggccagcagaagtgaggttccaggccctgtgggatgggcagatgccatgcagaggcttctcatggaaagtcacctcattagcactcacgatggtcttttccttcctcagggcccagctggtcctgctggtcctccagggctgataggagaacaaggcatttctggacctcgggtaagcctgtcctaataccagccccctctctagctgaacagagggcacattgccaagcaggctgagagagtttctcggatgatgctattgtagacagacctccctttagctctcctctttggcaacaaaaaccccagatttaacctcaggccttgcagtgactggctacttcaccccaagaaagtaagagtttccttttttggtgctccatgggcctctaagtctcaattctgctccttccaagtgtccctgggtggaaatcaggggatatgcctcaggatggaatcctggaaaatctaaatctaccaaaatgcttagattctgcaaggtgtttcccctttggtccctggagatagccccttgtgcttatgtattttgtatagtgagtgcctcaagttcacccatgagttcagcacagaagatggcccttaaacttgctgtgactgcagatgttatcttgcaaagcagctatcagcaatgatgagcagagacacactgtcattgctgggctaggatcaggtgtcacggaattacgtattcgggtttccctcatggctgagatgatattgagggaggcatcctatcatttattaccaaaaaatgactaataaactggtaacgagctcaatatgttgctacataaatgtacaaaaatattttatggtggaagcaggcaagaacttgcttagaaagtccttctctagcttgaaagctgataaatacatatctttagacgtttttaaaaaacatttacttaacttgtaattaatcaacaatttaagatggtatagatgcaaagctattcaaatagttatccagtagctccagaaacatttattaatttgcactttttcaccatctcttttatgttatttgtgggttgcgtagactgtaccacattttaagagttaatttcatccatcagtttattcattcacctaacaggctttaacatgcccatatgtaccaggtgctcactgtgagggtgtgaaaagggaggcagaataaagtcacataaaatctgggagcttgccgtcctgtcaggaacctaggatatgtacattaataactgcaacatgcattaatttgtgaaaactggcactgagaggtaatactcatgttttaaatttgtgcatgccatttctgtgcatgtttatatttgagtccgtagccccgtgctcagagctgagtgcttgggatttgcaggtgggacaggttccatgcccctggcgggctctgacttccatgcaggggagagtcaggtttcagagaccaatttgcctggacggttggccacttcactgacacattcctcccctcctgctccagggaagcggaggtgccgctggtgctcctggagaacgaggcagaaccggtccactgggaagaaaggtttgtctttagaaaggtagagctttcctgaggacagggaccagccaggcacacatgcccctctccctctttggtcagtctgtctgtccctcctcttcagtactactggttcccactccagcctcccctgttgatcgcggcttggccagtggaatcattgtcccccaacaatccccaccataattcccaccaccatccctgccaccaaccatctctgctcagagggctggctttctcctggccacagccctccatcagctgccaggttttctgctcctctcttgcttggcttgtgccaatagtgcagcaccctctgagccatcagagcagccgggcagtgcttggtacagtttcagtataatatggaacgagcagtctttaaacatgggcagtgcacgcacagtggctcagctaatcacatttagatcatccaagagccccgaccctgactgtcctggataacagcaagtctgctgtatgaaggctgcctgagaacctcctttctatcagctttgagataaattacaatttgtcataaccagtccgaaaagactgcatgttctctgtaaaagaaatgagttcctgtgaatccacgatggtctctgcctggagagtgttttggggttttatgctgggctcaatgcccaccgccttccgtgccttcttctcccagttgttactctctcttctcatcagcccgtcccccatgccacgctggtgaaaaggacaaacaaaaccctcctggattcttttccaggagtttgcacatgaatgttgcaatttagaaaatcattccaccgaaatctcaaaggtgaagtcagcatgttgcagcacccttacctagagcaaaagcatggcttggcatcacactgtaagccagccccaggccacagggtctcagccatgtttctcatgtctagggtgagcccggagagccaggaccaaaaggaggaatcgggaaccggggccctcgtggggagacggtaaggtcacagcgcgcttggggtcaggctgtcgctgactctttgctggaaggtgcaggaagccaggagagggttccaaataaagatgagccttgcttcttgtattattggggatacggctggaaatactgaaacttgctcatctgcggcaaattaatttaacaagttttattttattggcaggggtagagaggtggggcgggccgtggggagagacattttttcccctgtgtttttcctgatacaagagaatgtagaggctaatgaagcttaaactaccttcatcttaggtcccgcaaatgctttgcaagcataactagatgaagcttttctgcaaagaagtaaatgtcatttgggttaaaatggaattggatttgattaggtctcagtccagatggaaacaatttcttttgaatgagacatcttaggaatagaaattattacctcagtaactcgttttttaaatgctatttaaaaatgccccaaaaactcaccaacaataattttgtgatgtacatttctacgttacaaaagaataaagaaatctacggtccattgtgactttttccaaaaggagtcatggcacctaacactgtataaaaggaccaggttgatctgactgttttaattccaagcatcaaaatatttttctgtctttcatttttgtcttttcaactaactgaagtttaaaaacgaatctgtttgtattacttttaatctcagaagcacagggaaaaaatcagacttcaaaccattgaaggaaatctcttcctgattctgtttctagtaatttgggtcaacagatctctagttgttgatatctgttgaaaactgtaaattaactaagtggcaattcctacatatgttagagatagtaatgtacaattcacacacgttcttctgattcttctgattcataattaatgacgtccagttctgaatgctcctcatgagagagcaacaggaacagatctgagcatgctggggggaggtgttggaaaggagggggtctaggggtgatgacttggaaggaagggaagggatatggggagggggaatatgacctgggcctgagagatggagttcagtgttttggttttgaagtagaatcaaagacttacggatgcatagaatcaaagtaaccatcaagattcctgtcaattctaagattcttggggttgacgagtctttgattctacatccaaacagaatctttaccaaaagcaaccagcagttctttctatgttagtccgccagtgccattttgctacgggagtcctttgagcccaccgcctacagaaatggtcttgttcacacttggaagataggacaggagcaggaagtgtgcctactcctgtaccttagtctgcaaacatttcaggagctcaaggatccacttctcaggggcagcggcagggcagagacggtggttatggtgtgccaggcatggcgacctacagtcacatctctttcccactcttagggagatgacgggagagacggagttggcagtgaaggacgcagaggcaaaaaagtacgtatctgctgaggattatccaagcgtccttgctgccaggaggctccaaggacaacttctgatgtgttgtgttttaaaagaattatttctttaaaaattgtctttgtatttgagtgagtgttttcgtttgatgactcagcagacatttctttctttcaaggtcaatttattttagatgaatttaaattagaaccaagtattaaataatctatttttcctttatagggagaaagaggattccctggatacccaggaccaaaggtaaataatccctggtcggtgaagcatcatcatgattttgggatggctctggtatgtccatggactgagaatcagaatatcttggcattagtcttgggtcagccactcagttaactgggctaccctgagaaagacccttccttccctaaaatactctctcatctgtcaagtggaggtcataatacgtacttgtcctggtgtttatgagatttaaataaaatatgctgcaatcaaagtactctgtaagctgtgaaatgctataacctacatgatagtatcattactgattaattaaattaagaccatctgcaaataccacaaatatagtagtaacccactggaaaagtgaatcaaaactaaccacttggctgcccgggaaaagtgtgacccacacgtctcctggatgtcttaccccacggaccctcagtgagatcttctgttccaaagcttactgtgccacttctcggctttcttcccagggtaacccaggtgaacctgggctaaatggaacaacaggacccaaaggcatcagaggccgaagggtaagtttgcgtgggccttggctgcaggtgaggaatgagaacgtatgtctcaatgtgattaactgctgaggctttgacaattatccttcacttgcaccctggccagggatagcacagggtggaaggaagggaatcctgagccccagaccaatgtcctcagggtgccaccatggctgtggtccatggctctcctcctgtaggtgtattcctcttcctccaactcacctccagggtcgccagcccagctcactccaggcacagcacccacctgcagtctcgaatctcattatgggtgactgggaagtctgtgcagtcactttgggccatgcccacccagacggccaggcaatgggagtgaatgaggcatggcaactgcttctgaagcctctaggcttgcaagcgagccaggccaaggccatgggctcctcagactactggtgctgagattcctcttccttaagctacttttagccctgatagctcttttctttttattctttgtgtgtgtgtgtgtgtgacaaggtctcactctgttgccaaggtctcagtctgtcatctgggcggagtgcagtggtgccatcttggctcactgcaacctccatctcctgggatcaagcgatcctcccacctcagcctcccaaagtgctgggattacatgcatgagacaccacacctggccagattattcttcaatggatgtttactcaccctcttaaaatggcagagtcttcaattagcaaattgtggcctagatctgtgtaaaggttgctaacagttattttcagcctgaaatgtagtttaaaaagaaacataattatcttattaatttgatcagtgaagacagtcaaactagatcatttaatatcccaaagagctttaaaacattggatgattatctacactgaacgcattagctaattcactgtctgttacctattctcctgggagtccttagtaatcatattagtggttcttgggaaagcacctgtcttaccttagcctggcagagaacacaatatacaacacctctatagttggtgggggactcccattggctttgttgaggttgcttgtccctaaacttgaatttaagagacattttagctcccttaaagtgagagatttttcgtggtgatggagtcccttgggttagatcacttttaccgtaccttccaactataggagccttaaattctccactttctgacacagttgaacaatgtttgttctgctccctctagggaaattcgggacctccagggatagttggacagaagggagaccctggctacccaggaccagctgtaagtatttatccagttctgacccggccacctggggctgggtgctttacacgtggtccctgaaaacttcccaccatctgctttgctcacaagaaaatgtgctctctttgtatttgcttggttgtcaaaccgcctctctgacatcatgatgcagcaaagagattttgaattttagagtaacaagaaactttaaaaaaataggtttcatgggatatcctgtcatctagggagtattgtaatttgcctttatagtttcctggcataggtgcatttgaggtttgtgtagaggagaaaccaaagaggggaaatctaaataccttttgcttgcatcttgtagaagcagtgtaattatgccaggccttggtttgacaatgcttcctgtggtctatgaaatccccaagggagctcctgatttgtggttaaatcccactagtcatgctgccaccaggagccaggagggcatcctcccacagcccttccaaacctctttattgctaatacctttgttttcttatttgaatttctccatatattgtccctcaatattgaaattggtgagtttcaaaaaataatggaaaagataattcaggagttggaaaatcattcctagaaggaaaggttcagggcttagtttggttgaattagggaaaagaaagctggtcaggtgggtctgattgctgtctttaagtaggtgaagtgttggggggagcacattaagccagttcctgcagaagaccaagcaggcagaaatagcctcctggaaagacaactaatggcccatgagatgcctgctgggctgtcagggtggtgaggtttaggcatgggacactgagggaagccacgagtcagtccctagagctcctcggggtggaattcagctgggatgctttagacacggagggagccagggcagctcaatgatctctcactgccccttcggcaggggacagcgtatcaagcgtgtgaaagggagctcttttctcaagagaagcagaatctagacccaggttcactcgtgggctttacatggattggtggtgagcttcctggtttcagaacatgagactatttcaaaggccaaatgacctcccagggaaacacatttgctccagaatcttctcttttttgctttgcaagggataagatcaggtttagagggagaggctgtaaacaatcaaggttatccaggggcccctttgtcttgctctgtgtatttctgggggccaaagcctgtttattcgaattccccatctgctgtgcctctcacctttcgttccttggttttacagggtcccaagggcaacaggggcgactccatcgatgtaagttgcatgtgtccagaatgactcattaacctcatgagcctttgatttgctctctttacatattcttttattttcttttaaagcaatgtgccctcatccaaagcatcaaagataaatgccgtaagtacatgattttctgttgtctcacaatgcatatttttacattcgaaattctcacatggtagagtagtctctcaccctttcttctctttgcttcttttctagcttgctgttacggtaagttgattttggtgactttctcctaaggaaaggaagcctcccttttgtagtaagtacagtttgtctttaaccctccaccctctactttccacagggcccctggagtgccccgtcttcccaacagaactagcctttgctttagacacctctgagggagtcaaccaagacactttcggccggatgcgagatgtggtcttgagtattgtgaatgacctgaccattgctgagagcaactgcccacggggggcccgggtggctgtggtcacctacaacaacgaggtgaccacggagatccggtttgctgactccaagaggaagtcggtcctcctggacaagattaagaaccttcaggtggctctgacatccaaacagcagagtctggagactgccatgtcgtttgtggccaggaacacatttaagcgtgtgaggaacggattcctaatgaggaaagtggctgttttcttcagcaacacacccacaagagcatccccacagctcagagaggctgtgctcaagctctcagatgcggggatcacccccttgttccttacaaggcaggaagaccggcagctcatcaacgctttgcaggtctgtgctctgtgcgtgctgttggcatctccctttcttctggggctctgagaaggttctcagacacgtccatgctcctttgtggcttcatgtcccatagctcctaaaacgtccccaatgaggccatctgcctgagaacttctcttgtgaggtctccaggacaacctcgtggctccagcactacagggacgcctacatgcttgtagcactgcccccaggtccctcctcacatgttgacagctcttgccggttagtgatgctagtgttggtgacactctctatctactaacaaggtggtgtgacttgtttgctttattcatgaggacctggacgtttgcatccttcctgtctcctcccaagatggccccctgtgcacactctgagctgtgtcttactgtgtactgggcatttgcttcccataactggctggtgaggtttgtatcatcagtctcacctcatggataggaagatcctgctgttagtgaggtgctcgtgagaggctaggaccctagtccattagactctgaaacccatgtgctgatgatacccattccagtctccactctgtcccaatcggccctgaaggtgaatatccagggtggccctggaggcctgtagtctctcagtgaggtccccaaaactatgccgactcagcacccccaatctacaccacaccactgtgcaaagctttcttcagtgaggccccaagggtcagcccacggagaggccaagtgtcgcttgtaattctattaaataactggtttaattgtgtgttttttttttttttttttttttttttttttttttttttttttttttttttttttttttttttgagacagagtcttgctctgtcacccaggctggagtgcaatggcgtgatctcggctcactgcaacctccaccttccagttttaagtgattctcctgcttcagcctcctgagtagctgggattacaggcactcgccaccatgcctggctaatttttgtatttttctttcttttttttttttttagtagagacgggggtttcaccatattggtcagactggtctcgaactcctgaccacgtgatctgcctgcctcggcctcccaaagtgctggggttacaggcgtaagccaccgcacccagacaactagtttaattcttacatcaattaatatttattcagtgcagttctggcgatactgttcaagacagatgggtgatgggtaggaaggagtccacccgggagtcaggaggccttggcctggttccacactccccccacccatttaaagtaatgtgcacgccacttagcgtccctgcgtctcagatttttcacctgtaaattgagactggggcaggatgattgctaatgtctttccttccacattggatattctatgcttttaccacagcctgtgtcggcgaaagacattgggtcatcactgccattcctcagggcttgttctgccgaacacaggatgatttgtgcatagagcgctgggcttgggaattcagtgttgaagttgggctaccggccatgtgctcttgatggggggattcattcacataagtctgtccttgtgtgggctgagggacccagaaccacgtgagtttcttagcatggtttcaacgagatcaaaaaattgttcattcattaattatttgctcattcattcattcaaactagctatttgttaaatgaataattactaatcgtgtgccaggtacggcgatagacaggactctttgcacccactgggagtgattttgttacttgctttaaccacacctgagagggtggggaagggatggagctcccatattgttgctaaaaataacgataagattaagttcctactatttgccagaggatacaccagttactaacatttattatctaatttaaccctccaaatgacaccattaggaaggtattaccccccattttacagctgaaaaaaactgaaacccatttgaacgggatatgaactccagctcaccctagtagaataaaacctatgtctttctattatactcagagcctaaccccacccccaaatgagaagatattcccaatactgccctattgggaagttaatctattttattgatgtagctttgatttactcctctgccatattttcagatattactgatcatgtacgcccctaccaaaattgttcttttgtttaaaccagatcaataacacagcagtggggcatgcgcttgtcctgcctgcagggagagacctcacagacttcctggagaatgtcctcacgtgtcatgtttgcttgggtaagctgtttctctaacaggaagatctgctcagctgcaattgcaaaacataatatccatgggagagtgagagaataatgatgatctgtaaaaagagcttgagttcaattgattcacaaagcctcgtatttaccagagtaaatactactgcagcagtttctatattaaaaatggacctcccaaaacagagcttctctttgatggcggataattcattttataggtaacaaaggaggaggcagtttctgcttaagttttgacattagaatctagaatgaaaacattggcactagtgactttctagaacatatttcttcaaagagtggcagagaagtaatataatttttcatttcttttaaaaatgccagcacatggtatgctacaaagattttaggttagtgatttgtttcatctactaagtattaggtgatagaaactgaaatctggccataatcaaatcaaggcaagatataaattggttttggttgtgatgttttttttttttttttttttttttttttagacagagtcttgctcttgttgcccaggctggagtgcagtggcacaatcttggctcactgcaacctctgcttcctgggttcaagcgattctcctgcctcagcctccagagtagcctagattacaggcatgcgccatcaggcccagctaatttttgtatttttagtagagacagggtttcaccatgttggccaggatgatctcgatctcttgacctcgtgatccacctgcctcggcctcccaaagtgctgggattacaggcgtgagccaccgcttccggcccgcttttgatcttatgtgatcattttaatcgcccaagtctcccagcagattgatgagctgtgtatcctgctgtgggtgtcacagaacaaataggctgccatgcttctttctagacatctgcaacatcgacccatcctgtggatttggcagttggaggccttccttcagggacaggagagcggcagggagcgatgtggacatcgacatggctttcatcttagacagcgctgagaccaccaccctgttccagttcaatgagatgaagaagtacatagcgtacctggtcagacaactggacatgagcccagatcccaaggcctcccagcacttcgccagagtggcagttgtgcagcacgcgccctctgagtccgtggacaatgccagcatgccacctgtgaaggtggaattctccctgactgactatggctccaaggagaagctggtggacttcctcagcaggggaatgacacagttgcagggaaccagggccttaggcagtgccattgaatacaccatagagaatgtctttgaaagtgccccaaacccacgggacctgaaaattgtggtcctgatgctgacgggcgaggtgccggagcagcagctggaggaggcccagagagtcatcctgcaggccaaatgcaagggctacttcttcgtggtcctgggcattggcaggaaggtgaacatcaaggaggtatacaccttcgccagtgagccaaacgacgtcttcttcaaattagtggacaagtccaccgagctcaacgaggagcctttgatgcgcttcgggaggctgttgccatccttcgtcagcagtaagtcctgcgtggcacagcatgtgccctggcctggctttatgctcgggccaggagaagtgtaggaacagtcatggaaaagacaaccgatgtgttgacaggaactgtttcattcattgaacagacatatattgacacctgccatatgccacaaatgcttttaggagccagagtaagcagggaacatgcagacagtatccttgttctcattgattcctttattccaccacatttgaccaagcgccacctagtcataaggcactcttggtgtccttaacagtttacaaatgggtgggcaaatggatcaaatgcacatttattacgcatgacataataggctggcatgtcgcgagagaagtgatttctgttaggggcaccggggaaagcttctagaaagagttgctttgatcggggcttagccaccagccccgtgcttggataccactgggtctttgctcatggggctccccctccctggaatgctctccaccgcacttcagcagcaaacccatattcatcttcaaagttcaattccaatggcttctgctcgccgtggaagctgctgctcccaaggcctgctcatggttaatccggacaccctatttagggcatctattacctggcctgttgatcatttatttgtgggtctgtggtcccctagactgctctttgaggaggtgcagcctattatagtttccagagcctgtgtacagtgtgcagcccagggtcagtacaggcaaggcttggaacagatgagggggatttataaagtataaataaacatgtatatgctaaatgtttattatttaaggcaatgttgaggtctatgaaaacagtattcacatttgtgaaggtctggcccccaaaagattcaaagaaaaatgtgaagcaaaggtaatcccccaggttcacccacaggtcactgttcctgtcttccaaagattaaaaacaaaagctttgttcaacaaagcattgagaaaatctgaaaagcagttgcattataatctgatgtccaagagtctagaacttgttgaactctccacttgatttttcttctatccctgtcttctctctcatgttggataaatatatctttaacttaatcacccaaatattgccaaatagaacatattggcttaccatgttttatggatccaatgccatcatactttatgtttaaaatcactggacatagtttgtctgatatagttaattcaacaataattatgggctaaataaatgttatgtgattcatttaacttgttgacagattaattttaattttcatgttattagcatgcggttcaattgttttctttgttttttttctttaggtgaaaatgctttttacttgtccccagatatcaggaaacagtgtgattggttccaaggggaccaacccacaaagaaccttgtgaagtttggtcacaaacaagtgtaagtgattataattattgtcttaaaaattgtagcgctgcagggaatgcacaggtcctccaaccacctcctgactttatgggatgaggaccttgaaatccagaaaatgtgacttcccaaaggtaatgtgggtcatgcttctcaaataatctgttttatcagttagcttttgccatgtaacaagctacccaaaacttagtggcttaaaacaacaaccacctatttattttcttacttaatttatttagagacagagtcttgctgtgttgcccaggctggactgcagttgtgcaatcttggctcactgtaacctctgcctcctggattcaagcaattctcatgcttcagcctcccgagtagctgggactacaggtgcatgcagccatgcctggctaatttttgtatttttttttcagtagagatggggtttcgccatgttgtccagccttgtctagaactcctgaactcaaatgatctgcctgcctcagcctcccaaagtgctgggattataagcatgagccactgggcctggccaacaaccacttatttaatttgcaattctgtgggttagcaatttttgtttgggctcaactgggtggttcttctgttttctccttggatcccttatgtttgtggtcagctgcttgtcagctatagagctgctggtctagagtggtctcagatgggctggctcatctctgctccatgtggtctctcattctcagcaggctagcttgggtttgttcaccaggtgacctggcagggttccctgagagaagacaagtgtgcaaggcctcttgtgacctaggttagaactggcacactgttacttctgccacgttctattgaccaaagcatgtccaaaggctaacctagatttaagaatggaaaactaggcttgatggaaggacttgccacattacattgaaagggcatgggcagagagaaggtagataattgagaccatagttccaaacaatttaccgtatctggtgtgaaatgattacgtaaaagaaggattggatacatcaaaaaatagactccatgtcttcttaaaattattaatgctgtgataacatgtaatgatggtaataataggaagtcatgtgcatgttctatgaagactgacgggaggggtgggagtgggcaggactgtggcacccatgccgatgctgctgcctggcccatgtgccgtgtttcatgccctgctccatctcgggtgccaaccctaggagcaaagagggcagtgggggcatgtaacagagggctagctggggtgatgtggctgcaagaactgagcccctgcagcgtgtcagcaatgtgtgctccttaagagaatgtcacagtgtgtcatgctttggagggaagtgcagattctgcagattctgaacttcgtacacagatgagatgtgaacgcaaatgatccttgaaaaatgactatctggcttacgactagctgactctcaagatggggaaagagagcccatctcttcctactgcagacccttctgtctatcaccacttaagtccttcagctctttcttttgacctcagaaggagtggctttaaatctcagcatagcaagaatgaatatcattgctaaggccactaggacccttatcgtggcactggatgcttcatttagctttgtagcctccatttttctaggctctaatgattcgtattttttctctgaaaccttccctgaaattggctcaacctttttatctttaggaaaacagaatgaatgaagtaacctagtatttgaagtcttatgatattaacttgaaaatatattaatacttcctaggacaagtagcaagatatgactataaaataatatattttcttctaagatcaagaaagctatgaagtgtgggtccttgttgttatgtctgtttgattaggctgctattctctctagatattggtaatagatcaagaaattgtaaaaaaaaatacacatacacaaaaattaagagaaataaaaaatatatatactcccagtaataagccctgggagcaaaatagtacatgctaactttataattttccagctcaacatagcatttgattgagtggatattttcttataatgtaagtagctaactactgatttcatttaatttttggtgtatgttttggttggttaattgctataatgagaacattgttggatattattcattattgtctcttattttctctctgcctttattttagaaattgaaagatgtttttgtagaacaatataagcttcatttttaatggttctatttttcaatatgctgttccatatctttttttagggaggcacagatccttaaaagaaggaatttaatatatgcactgctatacataatctataaaaactattgcatgcattttgctaaaacaaatttaatgtagctcatggggttatgtctttatttattttagatagcaggtaaaagtagaggtaatatttaatttgtcttaacagaaatgttccgaataacgttacttcaagtcctacatccaacccagtgacgacaacgaagccggtgactacgacgaagccggtgaccaccacaacaaagcctgtaaccaccacaacaaagcctgtgactattataaatcagccatctgtgaagccagccgctgcaaagccggcccctgcgaaacctgtggctgccaagcctgtggccacaaagatggccactgttagacccccagtggcggtgaagccagcaacggcagcgaagcctgtagcagcaaagccagcagctgtaagaccccccgctgctgctgctgcaaaaccagtggcgaccaagcctgaggtccctaggccacaggcagccaaaccagctgccaccaagccagccaccactaagcccatgggtaagaaagcccttgctagggctgccatcttgtgacatcctcatttcctgctccagggtgtgttcctcaaagcctgcatgtaacacactcagaatacagtccttgatctgggcttgtacacctggatgatgtattttaagaggtgttggttagggattccagcctcccactccccatcctgtgccctcaatcctgtcttgcgatagggatgggaagctctcattctctctggaatgtcagtgggggcacagttcacctcacctgaaaattgagttgtcttaaactaaagggaaaagtttccgtgttgaaataaggttttagctcctatttagggagtgagagagacagaaagaaaaacgctgcagttggttcttaggcagcaaggcagatgtttctgggctggtgtatggagccggactcgcctaccttagaacatgccttgaaaaggtctgggggagccctttgcaactgcaaactttgtctctgcctcatacccacagaaaaggggccctaagctgtgtgctgtggcaatactgggtgttcagtccagcagcttgaaaagtcagagcctggaccatcagtcattccccaaggctcaaatctatgctcatgctgaccatgagaaaaatattgaaagcaatggcaaaaaccacaatgactctgcaccaacttaatatatttcagactgaattagatacaaaaggtagatggctttaatgagaccaagagtatgttattttatcattttcctaaagaagatactggaagacactaccgaatgtcacaagctgtaaaggaaggctcatgataaaatggaaattatcttcatttgatgaacagtatgagagagaaagcagaattcctttaaaagaatttcatgtcataccctaaaattttatgacttaatatattttaaattatggggctcattttgtagcaaacacaacttaggattagtatgctgcatttccaaagtatcttcttaacaggcgagatttttaatagaaaaaaaagttgatgaataatgagatttttcattactgtgaatttcacatttcatgtatgctgatagattataagagcaatgttttttaggggcttgaacaagaaattagttccccgcctcagctaaatttcaagtcaatttgtctgttaacacatccctttcagatttcctctctcgctcatgcactacagtcatggaggattttattttttatcttcacgctctgatctatctttcagttaagatgtcccgtgaagtccaggtgtttgagataacagagaacagcgccaaactccactgggagagggctgagccccccggtccttatttttatgacctcaccgtcacctcagcccatgatcagtccctggttctgaagcagaacctcacggtcacggaccgcgtcattggaggcctgctcgctgggcagacataccatgtggctgtggtctgctacctgaggtctcaggtcagagccacctaccacggaagtttcagtacaagtaagtacatgatcagtacaagtcggtacctgatttctatgtagagtatcaaataggacacaaaggagacacttacttattgaatctattctgaaataaccacaaattcaaaaaacaacaacagcaacaacaacaaaacaactcagcctgggtgctttggtggcagcctaagcttataaaacacagaatggaaatgggattccatgtgggatgcagtcctgccctctgggtcctgggctactttttggaggaagccagatccacgtcgcctgagcacagccctttccaacattgcacccgggaaagatggccacgtctcccggtgagggctcctggttgcccaccaccccgtccaggtttccatgttcaggaaaacaccagccagtcactggctccttagggagtaatggaggtgtccctgaagtctcaccgccccgggggtggaggatgtcgatagctgagtctccctgccctgatctcaccatagttgggctctgcccttggctggctgttgtccccaggggcccccccatttcactgaggcctgcacttgagtgctgtcacagcttttcttaattattcatggtcccctctctcatctttctaaattcttctgggttcccccctcccattcttcttgacccccactgctccaggaatgtgaagggaaggctcctcttttcttcaggccaatgctattcagatcaaggaaccagcttgaggaaagggaattcccaccagtgccatggattaggcccatagagatatgagtccaaagacccagtcaaccctagggctctattttcctggacagcagcagaagaggctgtctgggaagtgagaggatttgttcagaagttcagggatcccctcccgtcgcttattagctcatggatccaacttgtagcccacagcataagtcgtggatgtagaggtgtcttggatctgtgtctttcaatcaccactccccaacataagacattaatcacagcaggcaaccttatatcagtcactaaggattcccaagccctcctgtttctgatttacctacgagttgcatatatttttcttttatagagaaatctcagcccccacctccacagccagcaaggtcagcttctagttcaaccatcaatctaatggtgagcacagaaccattggctctcactgaaacaggtgagttgtgaaactattaggtccattaatggcactaagaaaatacccatcttgattccaatttaacttcctgggttctaagtcttagcccaggcatgacttctatgggggaaaaggtccacgtcagctctgtgcagcccaacatcatcttattctgcataatcccaggtgtaaatggagtcttactttacctgtgatcagactcagtgaaaatttgatgggaggtgcttttggggctatcactagaattcacgtatccattagacatttctcctgtgcctcatactgggactcgagttgatttgtggtctgtgatgctgtgaagattggcgtttcatttactcagtgatttaatctaataaaaaaactgcttagaagaacacaagacaaatttggctggaatccatgaaatgcatgggtttggatctgacccatggggtgttctggtccggacatcctaagcacacaccccagcttagtgtgtgagtctgtgatactgtctctcatgtgcttgaaccccagagtgtgtgcatagtctatgctaagttagtgactggttaggtgtaattcaggaactgacagctgttacttgcttttgttcttgggcagtgaaactctgagagacctggaatctctcattcagcagaatgtggacttggcttgttcatcggtgagaaactgattattaaaatagttgataggctttgcttaagagtgttcagcaaagaatgatggtactaacataaaaaatggaaatgccatgggaatttagatataatactgttttatacacctgaagcaaaagctttctgctaactaggggacaattcattattttttggtgtatcgtctactgtcaggaggaggaaagcatttctcttcacaatgctcatttctgtaattgattttaaaggtgtttgttgagtgagcctgttaggcgaccccaccatggtgcttgagctcaaagagaagccacaaagaacacagtagattttccccaaaggtgtgggtcaggacagattcaactctaacttcaaagttgctgaaatctgtgtatgtcatttctcactcattggttaacttctccctgaatacagtgtgggaaatagaaaaattttagccaatttagtgcttcattgagagaaaaagacttggagtaaactagagatcagagatcaataatgagtaaactagacagcaagatttggggatgtttttgattctcttatgtgtggtccaaaagggacaagattgtataaacagtgcctaattcatataaacaacaatgtctttcagcaagggtctggctgggctgttttgtttttcttttcatatatatatatatatatatatatatatatatatatatatatatatatgtagagagagagagagagatggggggagagagttgtgaggttcagaattaagaaggtgcttttgatccagacctttaacactgagatcgcctgtctacctgtgataaagagaaaagagcttttgaaattggggcttgtgtttctttcaaggctgcaagtagttgatacagatgaatctaaataaaacctttctccttcatactaattggggcataaccctcagacccaggatgtgaatgtcctctcaccatttcatgtgtgtgtgtctgtgtatgtatgtgtgtacacatgcatatgtgtgttttccttcccagggtgaagacataaattacctttttttttttttaaaaaaagaacaaggccctgcataattgatctctgatctcttaaacttaatgacttcatagtaacaaacaagcacttaacctgccttggcctgatgaatatatgttggtgtacacacagttatggcatttttgagagctctttttgaattactaggttggtgcgaaagcaattgcagttttgccactgacagtaatggcaacaactggaattactttcgcaccgacctaataaatgggacatttacttaaaaatgtctaaaattcaaaatggataaccagaattaggagaggaatccttatcctccccacccctaccaacctctctccctcccctcctcaccttctcctataattgtcattttaactatttcccctggggtggggggaaaattttttaatggtttttatatatttggatataggaaaaggagtgacaatgaaccactctttattaaataactaaaaaaagataataactgcatgcttactcagtagttgcatgtatattttgcatccaaattccaatgaccacgatatgcattatttctccaaatatacattttctagaccattcaggcaaaatgaagttttaaaaatatattttttatatttacatgtgtccattttcattcctcttactttctgcagcatccattaattagaaacatgtttacagagatgggtccctttcttagtattaaatagtagatgctactgtttgcttttttacttctgtgaataaaagatgctgtcttaagaatctgtatttttcatagtttatcatgttagattctgggaacctggtgacctgtgtttgaatctgtgaaggaatttgtaggtagaaacactctgaaatgaaaaggttcctagtcctgggcacctaaggcaggggaagaggagaggaccagtgttaccattggttttcgtttgcatatgttaatgtttgcccattttgacagtcacattgaatagatgcttgtttatcaggaatgtgagtcaggcatgtaatgcgagggcagtctggttggggcattttttgtcctccataagatctggccctgtttggtatgtggcagggagactctcgcctttgagatgaaggttgattctgttaacaggccttgattccattaatatacctagggcatcgttagcaaccactcaggattccagctttacaatattacatgatttgattttcagtggttaatatttgtatttttttaaataaaaccaaatgaacccccacaaaaacatctcactccactttttgctttgctcggcatctaaaagaattatgctccagccacttttctgtcacacatctgctgcctgtaaatggcagtgagcagcagtggatctttcattcgttaccgtggcctcctgaaagcatgggtgtgctgggcctttctgccacctgctttgtcgctgctgattttgacagtgctacgtagttgctaattttggtttcaggcttttgttaccacctccctcttctcccttctcatttttagctaaggaagctttggatagatattttctatgcatattactattaaagctaagactgtctagaatttctaaacaacaacaacaacaacaaaaatctaacttaaaatttactttttgcagtattgcaaaatgaatcctaaattattggcttaatcacctgtgttaaagaagtttcaatgcagaaactagacaaaacaactaacaaaatcaccatgtcctttattatttattcttgaaattagcaatctgtagaactgatcacattttgtccgagtagacatgactgggccaattgtatagccctgaaggaaccatcattttgtgtttactaacgttttacttattgattctaagatgcacaattttcttctcattgggacacttctgaaactgaaatgtgacttagaattgacaatatatcatggtttattggtagcattttgtgttacttagtggaacataaaataatggtgcatcataaaattaagagctcttatattggatacaatacagtatttggttggccatgttccatgtgaatatatatcatcaattagcataaaatggtatatttgggggaaatacctgactttatgttaataataatttaaagaacaaactaatcccacagctgaagtaagttaaatagctacagggatttaggaaatggtcctctccaggctgtctgttgttcatcgctgtgtgaggatgttttctggttagttgtcatgtgtgggttatgatgagcccaaaggagtgttttttatcttgaagtcttaaaaaatagaagtctgttggtcaagatctgaaagagtaaaatttaaccacagctacattttaaaataaagttaaaaattggccgggtgtgatggctcatgcctataatccctgcactttgggaggctgaggcaggaggatcacttgaggtcaggagttcgagaccagcctggccaacatggtgaaaccctgtctctactaaaaatgcaaaaattagccaagcatgatggctcatgcctgtaatccagctactgaggaggctgaggcaggagagtcacttgaacctgggaggcagaggttgcagtgagctgagatcatacctcttcattccagcctgggcaacagagtgagactcagtatctaaataagtaaataaattaagtaagttaaaaatttggtaagtttccttggtaccctttgaactgaccaatgctcaaaatgtagacggcggaaagtgttttcattcaggcaaatcatacctgcatccaaggtatggaagtactttatactgtaacaacaatgccgagtgagaaggtgattgaattttcttgttttggggaccattaaactgatgaggaacatgttgatgattgcagcataaacacctctcagtctgtcttccttcagtttgctcaaggaagtacttacatcgtgatttggaaatcaatatgtttgggaaatgtcaaagctgatgcctttaaaaatgcattgaaacactatgggaatatcaaactatgaaaaagacaagattttccaatcaatatgttttccactttgaagaatacatatattttttgctgattataaagttaacagatatgcattgtcaagcattcaggaggtacagagaaatatattacacgattctcattgtgacagcattgctggcttttgatgaaaaccaatagtgacccgatgcatagccttcctatttttttctatgaatattattgcttgtgggaaggtgcatgcatcgcacatgcacatccactcctgcacatcattattacaaaaatggactgtggggcttagggtgccttgcgccccagtgtttttgaatggttgtttttaggatgttctaggtaggcacctgtggcttctgggaacaggtgggattcccagaacagggttttaacctaacattgtgcttgcctccatttcctctcttctatttggttactttcctgaagcccagtgaccaatagtaaggaagtttcagcagacagtggtctgagtcaggcagcctttcccctctctgttttccaagcaaacttagttacattggtattctaggttaggaagccggggaaggttgtggataattttcagtccccattgtcttttaggctcccactaggttctcaataataaagaagagcaaattaaggaagactcagccatgcgctcctctcacataaagagaaggctctagcttcctacaggttatacctggggggcagactgatttcagagggaaaagatgaacaactattgcatccaaagacgtgtcgttctagggaaaagtccaggttaagttcaacgagggccagccatctcccttggtactccaggacatttaaatacttttttttttttttgctttaaaacagttgctttaacatatgcactcatagctgagtagagtccagccaaaacgacatgtctcagaagtcaagattatgtggagtttgcattagaagccttcttaagaacataaaatcctccgttttcatgcttcagaagtagagaagtacaggtttttgtctttgaatagtgccgggttctcacctcactaatatatttctcttggttttccaaatatcttcttgtccacagtaacagtgtccttattttccactagtaaatcttacagggtctcagtagtgactctcactgaaataagggcagaaaacaccagtgccgtggtgtggaactggagggctagggtggagggccaaggaagctggagaagccaatcagacggggagtggagtgtgctgctgtgaggccactcatgggctgggtgtccgtggctctgggcagacctctcgtgactggttcagcagagcccaggggactgggaattgaacagctaaacacagatggtcaggactgaagtgcacttgaaacaaataaaatagagcaaatagggtccattggccaacgctctgggaaggaaggaagaatagggagatcatttgacgccggcctcacgctaacagggaagccaccagtaaatgaggaataaattttgatggttaaattaccttgccttgtcagttctctccaggaccttccttgacagccaggcattttccttcagttattggcatatttgagagaaagaaggttgtttttgtaaattgtcttcattttattctgacttcctggagtcttcaaaggctctcgtggggaccactggctttctgggccctgagagcgtctgcaactaggaggtgttgtaactgtggagccaccagccaccagcctggaatttgggtgacagcagcaaccaggaaatgttttagaccaattctgagcctcagtcctgtgcacctttgagtctggtccatcgtgggtgatccaagctatgattatccactgaagacttaggttttccttgtcctttttggtatctatctgaagcacagatgctcaccacctccgcagctgtgagcagcctgcctcgctggggacaaaggagatggagaagcatctctttgtaggggagagctggataattccagcctgttagctactcacaggaacatgcagaattattggctccagggagttttggagaaagaaggtttacgttttcaaacttacagataacagttgacatcaatgcttctctttcccagaacaatctggagtttgccagaaaactctgtaaacaggagtcgtgctgtgtgtgaactgtaaactcttctctccaggcgtcgaggggacctttgctttactttgcagctgggctacatcagacgtgtgcattggaaacataaacttccttaactgggaaaagaatgcttctctgtcttcaaaatagttctgctatgtgacatttttgccatcatgaattttacatcagtgctagctctttgttttacgtgtttcatttggcaggtcacaaaggctcttggctaccacacatacgtgcatacacacacacacacacacacacacacactcataaaggattttcttttctgctttacctttaattttcagtctacttggcttgtaatgaaaggtagagccttatttttgaactatatcccaacagaatcgaatttccattttgccaagaattataaaaccctgaggttttaaaattcagtttcttttctggggatttaacatggaaggacttggagggcaaatggcccagtgattggaaaggggaaaaacaattcatttcatttaaaattattcaataaccattgccagcatttgggattctgagtgctgtttatgaagccctttcattgatataatttcatctatctctcacaaggctgtaagcaattcctatgtccatatggcagtgaggaaatggagatttgagcaggttaagggagttttcacctggaagctcttcttttttttccttctgccacagtagggtcatcagactgtcagccccagcactgggagccgagtaacacgcatgttctcattaatatccttttctcatgtttttattaaagatatatgcaagttgccgaaagacgaaggaacttgcagggatttcatattaaaatggtactatgatccaaacaccaaaagctgtgcaagattctggtatggaggttgtggtggaaacgaaaacaaatttggatcacagaaagaatgtgaaaaggtttgcgctcctggtaagtgattcttccttgtgtttatggcttctgcaaataagagattcaggtcaataagtcaccttgaaaaatattagaagtgcaatgattatgatacatgtgaaaaagaagataaagtgtatcctcagataaggaagacgttcaaatacaacccatgaaatgtctttttgaattcctattttgggtttctaaaaacatattgtcccttgtcattcttcagaaatgttactaagttgctgttatttgtaaaatattgcaccaaaaatgattcctgggaagataatataatgaacaactacagataacgccaaagataaacaacccccacaaatttatcttttaaatagttttgcttcctataaataacaatgttgtcactggggccatccagtatctccattatattgtgcagttcaactggtaataaaataaacactttgaacagagcctggggtcagtgccagaatggggagagttcagttcgtataaaggcctggtagatggtgcagggcaaaagaatgggatcagatttcccagacatccctgggccccggggccccaggccaagaacgtcacagagggcctttgatggtactgagtagaaaagtgggacaggtgatggaaaccagaggctgcgggactgtgtcatgataatgacagtgcccttttgggtcagtaatgtggcttttcctctcttctctcggctcctcacctcaccccacccaccccctctctcgacgctcagtgctcgccaaacccggagtcatcagtgtgatgggaacctaagcgtgggtggccaacatcatatacctcttgaagaagaaggagtcagccatcgccaacttgtctctgtagaagctccgggtgtagattcccttgcactgtatcatttcatgctttgatttacactcgaactcgggagggaacatcctgctgcatgacctatcagtatggtgctaatgtgtctgtggaccctcgctctctgtctccaggcagttctctcgaatactttgaatgttgtgtaacagttagccactgctggtgtttatgtgaacattcctatcaatccaaattccctctggagtttcatgttatgcctgttgcaggcaaatgtaaagtctagaaaataatgcaaatgtcacggctactctatatacttttgcttggttcattttttttcccttttagttaagcatgactttagatgggaagcctgtgtatcgtggagaaacaagagaccaactttttcattccctgcccccaatttcccagactagatttcaagctaattttctttttctgaagcctctaacaaatgatctagttcagaaggaagcaaaatcccttaatctatgtgcaccgttgggaccaatgccttaattaaagaatttaaaaaagttgtaatagagaatatttttggcattcctctaatgttgtgtgttttttttttgtgtgtgctggagggaggggatttaattttaattttaaaatgtttaggaaatttatacaaagaaactttttaataaagtatattgaaagtttcctgggtgtgacgtt

SEQ ID NO: 80 - DNA, 18344 bp, Homo sapiens
agcagacgggagtttctcctcggggtcggagcaggaggcacgcggagtgtgaggccacgcatgagcggacgctaaccccctccccagccacaaagagtctacatgtctagggtctagacatgttcagctttgtggacctccggctcctgctcctcttagcggccaccgccctcctgacgcacggccaagaggaaggccaagtcgagggccaagacgaagacagtaagtcccaaacttttgggagtgcaaggatactctatatcgcgccttgcgcttggtcccgggggccgcggcttaaaacgagacgtggatgatccggagactcgggaatggaagggagatgatgagggctcttcctcggcgccctgagacaggagggagctcaccctggggcgaggttggggttgaacgcgccccgggagcgggaggtgagggtggagcgcggcgtgagttggtgcaagagagaatcccgagcgcgcaaccggggaagtggggatctgggtgcagagtgaggaaagcacgtcgaagatgggatgggggcgccgagcggggcatttgaagcccaagatgtagaagcaatcaggaaggccgtgggatgattcataaggaaagattgccctctctgcgggctagagtgttgctggggccgtgggggtgctgggcagccgcggagggggtgcggagcgtgggcgggtggaggatgagaaactttggcgcggactcggcggggcggggtccttgcgccccctgctgaccgatgctgagcactgcgtctcccggtccaacgcttactggggcaggagccggagcgggaagacccgggttattgctgggtgcggacccccacctctagatctggaaagtaaagccagggatggggcagcccaagcctcttaaagaggtagtcgggccggtgaggtcggccccgccccggccccattgcttagcgttgcccgacacctagtggccgtctggggagccgctagcgcggtgggagtggttagctaacttctggactatttgcggactttttggttctttggctaaaagtgacctggaggcattggctggctttgggggactggggatggccccgagagcgggcttttaagatgtctaggtgctggaggttagggtgtctcctaattttgaggtacatttcaagtcttgggggggcctcccttccaatcagccgctcccattctcctagccccgcccccgccaccccacctgcccagggaatgggggcgggatgagggctggacctcccttctctcctccctcgccctcctcctgtctctaccacgcaagccactccccacgagcctgccctcccgatggggcccctcctattctccccccgccctccccctctcaccctgtggtttttatttcacttggcttcagcgccaatgggctgaggttggagttggaagccaccgcggactaaagctttgtttaaattcctgagaactggaaagagttacagcctccctggccaggcgcctcggcgctgtcacccgcgctgatgaggagcaggcgagcttttaaggatttgaggaaagaagaacggggggaggggcgggaagtgaaaaatccaagtgtgcctcttagacccgggggaaaggtggttaagctgggggttgcagtcactactgacaacgcccctcttccgcctgtcccagtcccaccaatcacctgcgtacagaacggcctcaggtaccatgaccgagacgtgtggaaacccgagccctgccggatctgcgtctgcgacaacggcaaggtgttgtgcgatgacgtgatctgtgacgagaccaagaactgccccggcgccgaagtccccgagggcgagtgctgtcccgtctgccccgacggctcaggtgcggctgcgctcggggcctggggcctggggcctggggcctggggcctggggctggggctgggggtggtcggcgctcgctggccctccgtgctggaggcctctgccgacgggagcagcattagcaaaccttggctctaacgcgcgtctcttcgtcccctagagtcacccaccgaccaagaaaccaccggcgtcgaggtaatctcctgccctcgaattttgcccctgcgcggcccgtgactcctcacagtcctcccttctctaacctggcctcttgtttcttctcccccaatcccacagggacccaagggagacactggcccccgaggcccaagggtaagcgttgcactctgggctgtggggggctgcaggtgggcatggctctcggccccacgctcaccccggccccgccctctccccctgcagggacccgcaggcccccctggccgagatggcatccctggacagcctggacttcccggaccccccggaccccccggacctcccggaccccctggcctcggaggagtaagtggagaggccttgtgtgtccactctcccctgttttgtttttgttttttggcagatgacataattttatactttgaaataatttcaaacttacagaaaagttgcaagaatcctacaggaaactctcacatacccttcacagtttgtgacatgtgctttattagtctctgtttatgtatatgtatctttttttttctgaactgtttgagcaagttgctaacatcaggctcttttgcgcctaaatacttaggtgtgtttttcctaaaaacaagagcattctcttaactgacctacacaatgattaaattcactctctaatgtgcagtccgtattcaaagttcaccgatgtcccgataatgtcctttatagattccaccccccaccaccccaatctgggatccagtccaggattatgtattgcgtttaatcatcatgtctctagtttccacaaatgtagaacgttcctcagactttctttgtctttagtggcactgggagttttgatgagtccagttgttttgcagactgtccctcaatttgggattgtctcattagattagatgcagggatgcatctttgcaggaatgtcttaaaagcaatgttattcttctcagcacatcacaccaggaagtgcatgatgtcagtttcttccatcctcagtgccgtcttctgcctttcaattcactgtcctcactctgacttctcttgtttgttctagaactttgctccccagctgtcttatggctatgatgagaaatcaaccggaggaatttccgtgcctggccccatggtgagccagcagggggagcatggatgacagaagagagaatgggtatccagaggaggtgggcataggcggctggtatagacagcttgggaggtccagatcacctttgggacctcagagtccagaaaggatgcaggacgactgggtggtcccaacaggcatgaatgactacatccacatgctttcctacagagggatcaccatgacccccctttcttctccctctatagggtccctctggtcctcgtggtctccctggcccccctggtgcacctgtgagtatccaggacgtcttcatatgcctccttgggctttggtcttttggagggaagactgggatgagggcaggagagatgctcagagatctcttggtaagattggagaaggttgacagggacttgtcttctaacccatctttttccttcttctcaagggtccccaaggcttccaaggtccccctggtgagcctggcgagcctggagcttcagtaagcactctctatacagattcatactccttctacaaacacacagactctcctatagaagaactcccaggcctggggtcttccttacctcttcccttcaatcccagccttccccttctttttttcttatccatattctaaccacctcttctatcttttctagggtcccatgggtccccgaggtcccccaggtccccctggaaagaatggagatgatgtaagtatccccagcaagaagataccatctgaccccatggcctccatgggttgggtcctgcaatttccactccaccacatttgggaacgatactcagaggaaggagggcaagtcctctctgatgcacggactgccctggaacaatgatcttttcgcttagtgagatgattccatgtccccaacaaagtgactgttctcctcaccccagccaccttagagcaatccccaaccccatccctttggggaaattggtgcgcagatggtgaaattaaaatgctggtgacagaagtagacagaaattcctttagaggcactcagatttcaccaaacgaaggtttcactgtagatttaaactgagctctagattcaaagataagattctgggcccccaaacctgacctgcaacaatccaaagaagactgagaccttctccacttttccagcccctaggcggtggtggggaggcagaggcatgatggtcttttctctccctctcagggggaagctggaaaacctggtcgtcctggtgagcgtgggcctcctgggcctcaggtgagcagggggctgtggctgaacctgggcttcactgcacttgggcttcatttaggagctgggtccacagtgatgtgttctaatggcccttccttgtcttcttcatctctctccagggtgctcgaggattgcccggaacagctggcctccctggaatgaagggacacagagtgagtcacctttgagtcatttaagctccccaagtccctagcatacccccatccagtcccaacctcttccccaaaagatactgagttgcatcatggtgggtggcagctacagaagtcccaagggacagagagtggacatccaaaagcacctccctccatgggaaagcagtcccgattaaacgattgggtgagatctagagccagttggggtttagtctagctcagaaacaaagggatggcggtgatgacctcccaaggctctttctcagatctaggtggatgtcaaggctgttccaccccctccacaggttcttaccttctacctctttcctgctttagggtttcagtggtttggatggtgccaagggagatgctggtcctgctggtcctaaggtaagaggctgtctgaacatcatggtcctccacatccccagagtcccaccatgaatgaatttctcactcattattctctgatctacagggtgagcctggcagccctggtgaaaatggagctcctggtcagatggtgagtgtgcccagttccagagggcagggatggggcaggaggcaggggcaagatggaggcctgggggaacaaggctgtctcccatctcatctgacttctcttggtttggttgtcagggcccccgtggcctgcctggtgagagaggtcgccctggagcccctggccctgctgtaagtactcctggccccttgggggatccctgagctctggaaggggctccccaggaactctagggactggccagtgctcagtggacttaacggggcttcccctctctcctgcagggtgctcgtggaaatgatggtgctactggtgctgccgggccccctgtgagtgtggcctgtaggcctcagggcctgggagtggggaggggtctcagtatctgctcttggggctgacaatgggagcaggttatgttggtctgaaccccaggacttcctctgtcccagggtgtgacttgcagctgccatctcttccttctcgctgacatctccatttcattcacagggtcccaccggccccgctggtcctcctggcttccctggtgctgttggtgctaaggtgagaccccccactctcctctaagcatgaccctcatgggccaaggggttcatgtctccctgttccccaaaccaaagggacccagagtggcaagagagcagcccgttcactaacacctttgtcctgggttctccgtctctgatcttagagtcctgatcattgctctcctgtccctgtctccccttcctcctgccatcccgagaggcaaggttgggtttcccagggtggcttctgatatgtcctttcttctgattcagggtgaagctggtccccaagggccccgaggctctgaaggtccccagggtgtgcgtggtgagcctggcccccctggccctgctggtgctgctggccctgctgtaagtgtccccgactcagtgtcccctttgccactttctaacctcagagtccttgcctgttgctgacactcctttctctgtgccacagggaaaccctggtgctgatggacagcctggtgctaaaggtgccaatgtaagtatcctgccaggcttcagtcccactcctgccgcctgcagcctgcctgcccctttccctctgctcctaggctcacgccctggctgtctgcctcccacagggtgctcctggtattgctggtgctcctggcttccctggtgcccgaggcccctctggaccccagggccccggcggccctcctggtcccaagggtaacagcgtgagtaccaaactctcccttctgcccaccccatgcactggctccagtgcggctctcatctggggagcaggaagacgcaggccaactgagcgcccccgactctcagctcatcctcttctccccccttgcagggtgaacctggtgctcctggcagcaaaggagacactggtgctaagggagagcctgtaagtctccccgccatccttcttgcagcccagcccaccctgccctaggagccccctgagggaaatccagaaaggaagaggagcccctagtcttctgggggagtccctgccacacccccaggaacccctgacactggaggcccagcctcagccggctctgaggctggcacaggatggcccctcaccacaggccgcctcctcctctcggccctctccagggccctgttggtgttcaaggaccccctggccctgctggagaggaaggaaagcgaggagctcgaggtgaacccggacccactggcctgcccggaccccctggcgagcgtgtaagtgtccctgcccgccccctcccgctccaccctcattgcctggctggtgcctgtgtgtcgcggagttcactggcctcctctcctcctgcagggtggacctggtagccgtggtttccctggcgcagatggtgttgctggtcccaaggtaacctctccttgcggccggggggctgaccctgccgctccctgggcatcttcttcctcttttggcccgtggcaaagagccacaaacttgagaccctaactgttcctgtgacttcccccaaccagggtcccgctggtgaacgtggttctcctggccctgctggccccaaaggatctcctggtgaagctggtcgtcccggtgaagctggtctgcctggtgccaaggtgaggccccaggctttcagcctggcttggccaggccctgaccatcccgtgtagggtctgggatgaggcgttctggatcaggcccaagggtctgccctctggagtcctcccccacctccatcatgcttctccccaagtcccactcatacctctctgcctccctagggtctgactggaagccctggcagccctggtcctgatggcaaaactggcccccctgtaagtatcactccccctgaaccccctgccattgtcctgtctgcctccctgctgtcctcactgctgctttcgtgcctcccatccttagggtcccgccggtcaagatggtcgccccggacccccaggcccacctggtgcccgtggtcaggctggtgtgatgggattccctggacctaaaggtgctgctgtgagtattaagtgaggatccatgaagagccagggacaaacacacctgagacttgaaggagtcctgggctctgggctcagctgtgccgctgacctgccgtgtggccactcactctcactttctggacctcagcctccctatctgtaaaatgaaagacttctcggcggggcacggtggctcatgcctgtaatcccagcactttgggaggccaaggcgggcagaccatgaggtcaggagtttgagaccagtcgggccaacatagtgaaaccacgtctctactaaaaatacaaaagattagctgggtgtggtggtgtgcacctgtaaccccagctagtcaggaggctgaggcaggagaattgcatgaacccgggaggtggaggttgcagtgagctgagatcacgccattgcactccagcctgggcaacagtgcgagattccatctcaaaaaaaaaaaaaaagaagaaagaaagaaagaaaaaatgaaacacttctccaggctccatgaccactgctctgtcctggaaataagtgttgttggtggccctccaccccgacacgtggggataggacaggcctttgatatgataggcacccccagtcttggtggattctttgaggtccaaaaggagatagcagagaagatgaaagccctttgcagtgcaggccacagcgggcatctaacagggaaaaggcagaggagcctggaagggcatcttgggaggagtgggctcagaaagggcccagcaagaagcacctgcaggggcattccccgggggccaaacagtcttttgaaaagaaagtcccttaaaaagtcccactcagagtaaatgagaggccccaggaggccctggcttctcacttcagccccctcaaccctaactccctttctccacagggagagcccggcaaggctggagagcgaggtgttcccggaccccctggcgctgtcgtaagtatctcctttccatccctacctccttcccattgctgccccggcactttctcctccctgcaggaggggtgctagaggccacggtcctcagctgctcggggcctcctaaccctgagttcccctttgctctctccctgcagggtcctgctggcaaagatggagaggctggagctcagggaccccctggccctgctgtgagtgtccctgatggggagatctggggagcagaaaaggggagacaccctcagcccctcgtctcctcggcctccccgtgactgtagtgttctctctgtgcagggtcccgctggcgagagaggtgaacaaggccctgctggctcccccggattccaggtgaggcctcatggctgtcaggatgctgggaggtaggggtaggaaacacctctttggtctcttccagattctaaaccttccctcccttcttcccccatttcccacctacagggtctccctggtcctgctggtcctccaggtgaagcaggcaaacctggtgaacaggtaagagggagcagccggccagaggggtgggagatgcagggaatccagagggacaggcccccgctcctagctaatcagacagccatcaactagagggattgaggttagacgccggaaagaacttcctcccatgaagggagcagcacagagggaagtgggggctgcatgattgctagtctgggtgacttcttttaagagctgctggaatatgctgtgactttccctcaacccttctattgataaatcttggtccatagtttggggaggggggaagcctttgacacatccctaggaggaagagaggggctgtttgggataatctcaattcagtgctgagaaggggttcctctctaatcacggccagaccccaggaggaaggaccgtgctttccagcagagtggccccaggtgggttttgctcactgtctgttcctctctccctccccctcagggtgttcctggagaccttggcgcccctggcccctctggagcaagagtaagtaggcctctctcgctgcatccgtcaaggtgcgtcgtacttggccctatctccagagcagccttcacatgccctgtccttcccttctagggcgagagaggtttccctggcgagcgtggtgtgcaaggtccccctggtcctgctggtccccgaggggccaacggtgctcccggcaacgatggtgctaaggtgagggcagcgtggaaggggctctggcaagtggcccagggaccaggtctcacccctcctgcagcaggggatggcgggccatgaccaaagccatggagatagggtgtggggtggggggaaaagaccagggcaggggcccacacacagcctggagtctgggctgtgagtcttttcatcttttctcaaggcttgtcgttggccttggaaacaagcctgggagataccaagcggggcttagggctgtgacccactcttggggccccaggcctcactccagtcttcttggttgtcacatagggtgatgctggtgcccctggagctcccggtagccagggcgcccctggccttcagggaatgcctggtgaacgtggtgcagctggtcttccagggcctaagggtgacagagtaagttcaaccttccccctcccctgagccctacatggctcccatctctgcctgctttgaatctctcagcatctctccttctctctgggatctgtccctcttctcgctaatcctcccttcttcccctttcccctctggcctttttgctgatgaatcctctccctgtggtccaggcccatctatccccatgggttaccatggtgatgagaggtgggggcatctccttggtggaggctcccttattcatcccgctacacaagtcaggggcctcttaacctcagttccacctgagtctccaggcaggcaccctttttcctgaaagaatctttgagtccttggcccaggtggaggcagggcagagctgcagagggcctctcaggaaacccagacacaagcagaacactataggtcacctccttgccccacactggaaatctcaagcttatccatgtctttagggtgatgctggtcccaaaggtgctgatggctctcctggcaaagatggcgtccgtggtctgactggccccattggtcctcctggccctgctggtgcccctggtgacaaggtgaggtggccgcctccccaccttctgccctaacacatagcctcctcagcaggcctgggcacggttccgtggggttgcgttgggagagcaggtcctgccaaactgagctgtcaacctgggaacctggagggaccagaaggaggggaggctctcctggggtcatctactaggagtattcaggggaggccctgaccctgagcctcttgtcccttgctctcagggtgaaagtggtcccagcggccctgctggtcccactggagctcgtggtgcccccgtaagtacagaagacctgttaagaccccatacttggcccttccctcccttcacacagcacccctggccctgtctgtgccttcaccccttgcctctcccctcaccgcatccccgccttccctcctgtcagcgcatctctccaatctgactccttttcttctagggagaccgtggtgagcctggtccccccggccctgctggctttgctggcccccctgtgagtaccaagacccccatcatttttcatcaccgactgggacctgggacctcgagggacggaatgaggacaaaggcgtcagccatcctcaggggagaagggtggagacgggattgtttcccacccaagcatcttcctgcctccattactgctcctcccccaggtagtggaaactcctgcctccttccctccattcaccgccctgcttcctcccccagggtgctgacggccaacctggtgctaaaggcgaacctggtgatgctggtgctaaaggcgatgctggtccccctggccctgccggacccgctggaccccctggccccattgtgagtggcttggccctctgtgcccacgaggctggtgggctgggacccaggacgggtccaggcttgatgcctctgtgctctcctacagggtaatgttggtgctcctggagccaaaggtgctcgcggcagcgctggtccccctgtgagtatcacccgcctctctgttgagcctctcccctctccccaggcagcggtggcaggtgagggcagctgggtcggatgagttggctgttctccctctgactgttcctatgttctctccttccagggtgctactggtttccctggtgctgctggccgagtcggtcctcctggcccctctgtaagtctctgcagcagagtccactgctctaggttgggggtgctgggtgggggctgccagaaggatggtggggctgactgaggacccaatgatgcaccagagccccctggagtctgacagcccctcctatcctcatccagggaaatgctggaccccctggccctcctggtcctgctggcaaagaaggcggcaaaggtccccgtggtgagactggccctgctggacgtcctggtgaagttggtccccctggtccccctggccctgctggcgagaaaggatcccctggtgctgatggtcctgctgtaagtgccagctcagatctctgcagctccggaggtgtgcagagctggggaggggtccctgtgctgctctctggcacctcacccctgtttgcctcccaaagggtgctcctggtactcccgggcctcaaggtattgctggacagcgtggtgtggtcggcctgcctggtcagagaggagagagaggcttccctggtcttcctggcccctctgtaagtgcccccctcaccttggggggccctgagaaaaaccatcacaggacttggagtggggcggagccaaggagaacagatttggtagagatgactccagcggactcaagggtcctcccagaccctatctctggcctgactctttcttctcccttagggtgaacctggcaaacaaggtccctctggagcaagtggtgaacgtggtccccctggtcccatgggcccccctggattggctggaccccctggtgaatctggacgtgaggtgagcagtccccagcccccatgccagtaccctcagcatggccattgtggccttgcctaagccctcttccccggctgactctcacttctctctctctctctctgcagggggctcctggtgccgaaggttcccctggacgagacggttctcctggcgccaaggtaagatggcaacactccatgaccacagccttgtctgctgcttccctgccccatcctggcccttcacccggggctgacccatattcccctgctctccccgccagggtgaccgtggtgagaccggccccgctggaccccctggtgctcctggtgctcctggtgcccctggccccgttggccctgctggcaagagtggtgatcgtggtgagactgtaagtagctgggctccagttccctgtacctggtcaggccagggactcttcaggcctccttagaggcctggggatgggtgtcggacttcacccaggcagggggaggaaaggagatcctgcaagatgtcagggccttaatccaaaaaactgagttaaagctcagccccaagtcccctctcccagacaggaccgcctctcccatgagttggccccagctcccgtgaagattgcagtggggaggtttccctgggagttgggagagatggccacagtgggaagcagctgaggagagagagatccagcagaggggaggcctcatcctgcagccccagcctcagccttccctggccaagagctcatgctttccttgctctccccagggtcctgctggtcccaccggtcctgtcggccctgttggcgcccgtggccccgccgtaagtaccctgctgtgtcccccatgcctttagaactctacagatgcagacagtgccccactcgatgccaatggaacttccgcctgacagtttgtccctttctctcttctagggaccccaaggcccccgtggtgacaagggtgagacaggcgaacagggcgacagaggcataaagggtcaccgtggcttctctggcctccagggtccccctggccctcctgtaagtatgctcagcccctccccagtccccatgctgtgctgtgggataggagggggagcttcgcctcagtttccccctctggatagtcattctttcccctccctagtggggactggggtctgaagatttgtgggcatgtccaagtagcttctgagagggtgaggggtacacagagagggattatgggagaggtctctgcctatggacaccctcgggctagatttccagaataatgaaggggcatgggttgcccacactgcccttgtctctccagccaggccctcaggctacatttgacgctcactgggcctgaactgccttttttatctgtccttcagggctctcctggtgaacaaggtccctctggagcctctggtcctgctggtccccgagtaagtcatgccttctctctcctcttcctgagccccaagcccaggctcacctcggggacccttgccagggacccaggcaccctttgcctctctggagaagggttcagggacagggagtgggcaaagagaggaagaatcctgaacaaacaatctgatctagctttggcctctctgctccccaatccgtcctcccctggctcagcggctgggaggagctatggcatgtcctatggaaagaggctgaggctggctctatgagccgtggggccagagccagcagggagggtggtgggcctctcctccagagctggggttgttcgggcttctggcagcctttctcaaaccatttcccccactccagggtccccctggctctgctggtgctcctggcaaagatggactcaacggtctccctggccccattgggccccctggtcctcgcggtcgcactggtgatgctggtcctgttgtatgtagcccctcatcccctctgctcatggccctccagcccccaaagcacttggatgccggtaatccccactctcttccctctctgtgcagggtccccccggccctcctggacctcctggtccccctggtcctcccagcgctggtttcgacttcagcttcctgccccagccacctcaagagaaggctcacgatggtggccgctactaccgggctgatgatgccaatgtggttcgtgaccgtgacctcgaggtggacaccaccctcaagagcctgagccagcagatcgagaacatccggagcccagagggcagccgcaagaaccccgcccgcacctgccgtgacctcaagatgtgccactctgactggaagagtggtgagggcctgccctagcctctccctccctcctactcctgccatgccagggtccccatgcccatatgtgcccctaccatatggtgctggctgctccctttccctgactccatcttgccctgccctaccacaggagagtactggattgaccccaaccaaggctgcaacctggatgccatcaaagtcttctgcaacatggagactggtgagacctgcgtgtaccccactcagcccagtgtggcccagaagaactggtacatcagcaagaaccccaaggacaagaggcatgtctggttcggcgagagcatgaccgatggattccaggtgcgtgagctggacctcagagccagtgttaggagatgggctagcccagtgctcagaagggacatgaagtcctggagtaggtctctgctaagggtgatggacagagctgggctgggaggcaggggtctcaggtccctgatagtggttcagacacaggctgccgatgggcaggtggtgcctcctctcgatataacggtgcattgggcagctctctgaggaccctggacagggaggccaggcaggactagaggttcccgcatagcggctcactcttccctctctcccctcccctgcagttcgagtatggcggccagggctccgaccctgccgatgtggccatccagctgaccttcctgcgcctgatgtccaccgaggcctcccagaacatcacctaccactgcaagaacagcgtggcctacatggaccagcagactggcaacctcaagaaggccctgctcctccagggctccaacgagatcgagatccgcgccgagggcaacagccgcttcacctacagcgtcactgtcgatggctgcacggtgagtgcccagaatccccaggcagggccccacctctccggccttgggctttttggccaggccatagtgccctctctccatcactcccacgtggtaatgccccctcccgttgtctccgccccaccccagagtcacaccggagcctggggcaagacagtgattgaatacaaaaccaccaagacctcccgcctgcccatcatcgatgtggcccccttggacgttggtgccccagaccaggaattcggcttcgacgttggccctgtctgcttcctgtaaactccctccatcccaacctggctccctcccacccaaccaactttccccccaacccggaaacagacaagcaacccaaactgaaccccctcaaaagccaaaaaatgggagacaatttcacatggactttggaaaatatttttttcctttgcattcatctctcaaacttagtttttatctttgaccaaccgaacatgaccaaaaaccaaaagtgcattcaaccttaccaaaaaaaaaaaaaaaaaaagaataaataaataactttttaaaaaaggaagcttggtccacttgcttgaagacccatgcgggggtaagtccctttctgcccgttgggcttatgaaaccccaatgctgccctttctgctcctttctccacaccccccttggggcctcccctccactccttcccaaatctgtctccccagaagacacaggaaacaatgtattgtctgcccagcaatcaaaggcaatgctcaaacacccaagtggcccccaccctcagcccgctcctgcccgcccagcacccccaggccctgggggacctggggttctcagactgccaaagaagccttgccatctggcgctcccatggctcttgcaacatctccccttcgtttttgagggggtcatgccgggggagccaccagcccctcactgggttcggaggagagtcaggaagggccacgacaaagcagaaacatcggatttggggaacgcgtgtcaatcccttgtgccgcagggctgggcgggagagactgttctgttccttgtgtaactgtgttgctgaaagactacctcgttcttgtcttgatgtgtcaccggggcaactgcctgggggcggggatgggggcagggtggaagcggctccccattttataccaaaggtgctacatctatgtgatgggtggggtggggagggaatcactggtgctatagaaattgagatgcccccccaggccagcaaatgttcctttttgttcaaagtctatttttattccttgatatttttctttttttttttttttttttgtggatggggacttgtgaatttttctaaaggtgctatttaacatgggaggagagcgtgtgcggctccagcccagcccgctgctcactttccaccctctctccacctgcctctggcttctcaggcctctgctctccgacctctctcctctgaaaccctcctccacagctgcagcccatcctcccggctccctcctagtctgtcctgcgtcctctgtccccgggtttcagagacaacttcccaaagcacaaagcagtttttccccctaggggtgggaggaagcaaaagactctgtacctattttgtatgtgtataataatttgagatgtttttaattattttgattgctggaataaagcatgtggaaatgacccaaacataatccgcagtggcctcctaatttccttctttggagttgggggaggggtagacatggggaaggggctttggggtgatgggcttgccttccattcctgccctttccctccccactattctcttctagatccctccataaccccactcccctttctctcacccttcttataccgcaaacctttctacttcctctttcattttctattcttgcaatttccttgcaccttttccaaatcctcttctcccctgcaataccatacaggcaatccacgtgcacaacacacacacacactcttcacatctggggttgtccaaacctcatacccactccccttcaagcccatccactctccaccccctggatgccctgcacttggtggcggtgggatgctcatggatactgggagggtgaggggagtggaacccgtgaggaggacctgggggcctctccttgaactgacatgaagggtcatctggcctctgctcccttctcacccacgctgacctcctgccgaaggagcaacgcaacaggagaggggtctgctgagcctggcgagggtctgggagggaccaggaggaaggcgtgctccctgctcgctgtcctggccctgggggagtgagggagacagacacctgggagagctgtggggaaggcactcgcaccgtgctcttgggaaggaaggagacctggccctgctcaccacggactgggtgcctcgacctcctgaatccccagaacacaacccccctgggctggggtggtctggggaaccatcgtgcccccgcctcccgcctactcctttttaagctt

SEQ ID NO: 81 - DNA, 153899 bp, Homo sapiens
gcagggagatttggacgctccggcctgggaggtgcgtcagatccgagctcgccatccagtttcctctccactagtccccccagttggagatctgtaagtagtagttgtcattctgggggcagattgcagggcaggggggtgttaaaagtcctatagggtattctataggggctggggtgcacttaggggtccctgttgtcaacctcgtaagggccatggtgggggcagagttgtgatttggatctctctctgccttatcgtcttagattatcctagactttccccaaacagcatttcttaagattgccagtgagaagtaccattttgggggtgcttattaacgatatcaatgcctggacccaactccatttcccaactctagaatccccagaaaaactgccttaaaaaaaaaaaaattagtcccgagtgattcttgttaagaggctaatccaggagatatgctcccttggaaatctcagaggtccggtgcagacaatcaaggcatctcacttttattctaggcaccaaaaaatttacagctgaacttcactgaaaagtcacttgctatcacacagaagggcaaagtgaggctccttgtggatttgaccgtattgcacagttgtgttgataatgcattaaatcagttaaaaacacatgggcataggcttagcagaaaggagtgttgttgttttttttttttaatcagtttaggggaggttcttctatgttgagaacccctgggagataaggctggttgtgatctagtttgttacagcccactttttcctcttctccaaattaaaaaaaaaaaaaacaactcacccaggttgaccccaaagggcccccagatacccaggtgggctccaaagtctccatttgcttccacgatctgcaggtgcgttaggtaagattacactagaatttcccgcagagccacctgtgtcaatgccactctcgtgcccaaccaaatgggtaaaacgagagaaagtgtggctactgcctgttgtaagttttcttccagcacagggtctggtagggattttgccacttgagaaaaggtaccatccaaagccatgcttgtcaagaagtaaaagaaaatatttagaaacccaaggtgggagtgtttagttgcagtatgaagaactgagagattaaatggtgaactgtccgtccggggtttggcaaaaagaatgcaggctattaataaactgctttgcatagttttttgtttctttgatttactcaacgatactattttagaattgttcagagacggaacttgacgctgaactgaaagtcattaggtggcagggtgtgaaataagatagagaattttgtttgaaggaaattgatgttttccctttgagatagctaccgttgatggaacacttcagtgccacatgctgttgcaacatttaacttaatttatctcatttaatctttgcaacaacttcataagaaaggctttatgatgcctgtttagtatacaaggcagctgaggctcagagaggtaaagtgtcacacagccagcaagtggtagaacccattcccgggtcagtttgagtccaagttcatacccttgaccccactatctttcttctttaccatggacacaaacttgttggggtcaggtttctggtgggactaaatgcttccaacaaagtaaatgtttatcaccgtgtcctttgaagaaaacataaactgactttttgcacatttaaaataaaaggcactgtttgtcccctgattgagggggtgacctagctgaaaccagtgaccctaggtgggctgccatgccgagagtccagaacgtgaactagctgggtcttttccgagaagccgccaggcttgccttgtaaacaccatgtttttttattatcatgtccgaaatagatgtgttattccgtacaaggtatctgttatggatttgttatcattacttttccgtgggagggcagagattgaggcaaacatgcccatttatggaagcgttttccatgaggccatccccggccccctcgtcagttacccagccttgcaccgcagcccggttggtcctggccctggggatttgtctaccatgtccctcacccattgaagaactagtggagaaaccctaaggagaagagatttgggaggaaagtgggattcttttttcctaccccctcttattcagaggtttgatttttttgggtggggggtgggagggaattgtctcctttccacaggtcttgaatccaaacaggtgggtcttccacgttaggcacaagcgtgtaattccaagagcagatatatagtagatttttcttgaaaaccaagttcaatattcaatccagtagaatcatagaaggccataagcaaatttaaaaatcatctcccgcacctccccaaacctcactttctcatccgggaaatggggctaatgagaataactcatgttttttgggcacttttgcctggcgagatgctaaacgctttgtggacattatcttacgtcttcataacaaccctttagagtagatactgttattctaactggctttattttacacatatggagtctgaataacttgcttaagatagctcagctaaccagtaaggaaaagaagattctacaaatctaggtctttctaactccagagtttcacagattaccctcatgggaggatttgatgagctaatgtgtatgaagggtttagcacagtgcctggcccctggtaagcttcagtgatggttatttatagcaaacacaaccagagagttcaagatgtttgctcagtatggcatggctcatctttggcagaaccgggaagcctaaactatgtggccgttaaaggagaagcttctcttaattttcttccctttgatctcataaacctcgtttctatttgggctgaaagtggtgattagaatctttaatatattaagctaccattccttacctggattgggaatgttacaaattccaattacatttgtttagggttttgtttgtttgtttttgagacagagtcttgctctgtcgcccaggctggagtgcagtggtgcgatcttggctcactgcaacctccgcctcctaggttcaggcacttctccagcctcagcctcctgagtagagagtagctgggtttataggcgcccaccaccatgcctggctaattttttgtatttttagtagagatggggtttcaccatattggccaggctggtctcgaaccgctgacctcaagtgattcgcctggcttggtctcccaaagtgctcagattacaggcgtgagccaccgcgcctggcttatttagggtcttgatggcatactttaagggatggcctttttgctctctaggtcttctccttccactcctgacctttcaacttttaaccctggccacacaatggaggaaagactgaatttagagaaaggcaggcaagaatttgaaagaaaccttgtatgtgatccaaggacagaggaagaagctgctcacagtggctgaaaggggaggtcggacatctgtgacttgtatcagggtttcaggggctaaggaggaacaacctcatcaaagttgctaggaaagggccatagaggccaggtatggcaggtcatacctgtaatcccagcaatttgggaggctgaggtggggggatggcttgaagtcaggagtttgagaccagagtgggcaacatagcgaggcaccatctctacaaaaaaatttttaaaatgagctgggcatggtggcatgcatctgtagtcctagttattcaggaggttgagtgaggcaggaggattgcttgagcccaggagttcaaggctgccgtgggccctgattgcatcactgttctctagcctgggcaacagagtgagactctgtctcaaaaaaaaggtgaggggcatagaactttactgtaccaggctgaaaaatacaaggcccagagagggcaagtgacttgcctagcatcacccagcgagttttgggcagagctgagacttgtaactcgaagacctaaggatcttccacaggctaatgaatagcttgtttgtgctcaagggatgaagcagtgagttgttaggacaggactgtgaatagggctgacatattcagatgtgtcaaacatcgctaatgccatctctgagtaaattaggcttcaaacagatcgggattctaatcctggttccccaacttttgcaagggagggccttgcatttacctttcaagaccccgataggcttagcaggaaaatgggaataatagataatgccactctttcatccttggactttttgtctaattatatgaatttatctgtaggataaattcccagaaatgcgcttgctgagttaaagggcatgcgtatctaaaattaatagatattgcaaatgactggctaaagacattgcagaccaggtgcagtggctcacgcctgtaatcccagcactttgggaggccgcagcaggtgggtcacctgaggtcaggagttcaagaccagcctggccaacatggtctctgctaaaccctatctctactaaaaatacaaaaattatctgggcatggtcgtgggcacctgtaatcccagctactcgggaggctgaggcacgagaatcgcttgagcctcagaggcagaggttgcattgagccgagatcacaccactgcactccagcctgggcaaagagtgagactcggtctcaaaaaaaaaaaaaaaaaggcattgcaaattgcaacttgttgcagtcacatatgacagcagtccccatcctcttggcaccagagactggtttcgtggaagacaatattttccagggtggagtggggaggatggttttgggatgaaactgtcccacctcatcatcaggcattggttagattctcataaggaacgtacaacctagatcccttgcaggtggagttggcaatagggtttgtgcttctgtgaaaatctaatgctgcttatctgacaggaggcggagcttaggcagtgatggtcactcacccaccgtcccctcctgctatgtggcctggttcctaacaggccattgactgatactgcagcacaagggttggggacccctgacataggagactatacatttattttaagctgtggtatgccagaattgtaaaatataaaacacagtggggcttttagggccagaaataatcagttcttgctcgcttccagaagcatccttcacaggggctaccgtaactcttgccaaccaagttctcttggttgggaggaaaaaatagtgttatgcattaagagaacttctttctggagttacttgaaaccattggtattcagatgattaggcagatgtcacaaggcaataagaatgtgacaggttcaccattcactttttttcctgtaaaagtgaagtagggctttcttgggaacaagcccttgggaggtggggggatgtgaatggtgaggggagggtagaaatggtggagtagggtcaggggcaagaaagggactttctgctaagaattaatcgggtgtccatttactcttagcagaaaactaggattagattctggattgtactcctgactccaaattttacaagtgggggtcttgcatttaccttccaggacctcggtcatcttagcaggaaaatagcaatagcaggtgatgccaccttacagagcgcttaggagacagtgagatggtctatataggaagctgtctggcctgatacctgatgaatacaaggggcccaataaatacagtggctgttatgaataatagatctaaactgcctttttggtactactggggacctgccaagcaggtgcatttagagtgcccagtgcctctccctgcgacacatttgatgcctccctacacctggaccaggccttgagcgaggatttccactgcagaggtccttccagctggcgaattgtgttgcagatcaggttcagagaacttctgttttgcctgtgtggcattcattcattcgtttatttgaaatagagatgggatctcactgtgctgcccaggctagtctagagctcctaattcaagcaatcctcttggcttggcctcccatagttcttggattacaggtgtgaaccactgtatccagccctttatgacatttagaatatgagcaatttttcttttttcttttttttctttttgagatggagtctcactctgtcacccaggctagagtgcagtggcatgatcttggctcactgcaacctctacctcccaggctcaagcgatcttcccacctcagcctcccgagtagctgggactaccggcatgtgctgccatgcctggctaatttttgtattttctgtagagatggggtttcaccatgttgcgcaggctggtgtcaaactcctaagctcaagcgaactgcctgccttggcctcccagtgttgggattacagacgtgagccacagtgctgaaccctgcatggtatttagaatataagcaatactctaacatctggtctgggtcactctgtattacttacctgatctccaaaaacatttgggtttttgtctctggtccaaaatctttagccaatggcttggcagtaaaatcctgagggaagctgttgaccaggtgaggtgatgtgcaaatcctatactctctgggctctgggatatttaatttactatttatttatttattttcaagacagagttttgctcttgtcgcccaggctggagtgcagtgatgggatctcagctcactgcaccctccacctcctgggttcaagcgattctccttcctcagcctcctgagtagctggtattacaggcgcccaccaccacacctggctattttttgtatttttagtagagacggggtttcaccatgttggccaggctggtcttgaactactgacctcaggttatccgcctgcctcggcctcccgaagtactgggattacaggcatcagccaccatgcccggcctaatttactttttattaatgctgaagcagagagggcaagatcttttgcccctgagttcttctgggaaaaatgaaactgatggtaaaacaaactaaagcaacctgacattctcagttggtccagtttcagccctttgactgggagtcacagacgggtcccataaaatggtagagctgggccagcctaccattgatttattttccctaaatgaaaaatacaaggcccagagagggcaagtgacttgtccagagtcacccagcaggtttggggcaaagctgagactcgttacttgacatcctaaggtcttccagaggctaatgattagcttgtttgtgctcaaaaaatgaagcagcctgggcgcggtggctcatgcttgtaatcctagcactttgggaggctgaggcaggcagatcgcttgagctcaggagtttgagaccagcctgggccacaaagtgagacccctgtctctacaaaaaaatgcaagaattaaaaaattagctgggtgttctggtgcgtgcctgtgatcccagctacttgggaggctgaggtgggagaatggcttgagcctgggaggcagagtttgcagaaagcagagatcgcgccacttcactctagcctgggcaacagagccagaccctgtctcaaaaaaaaagaatgaagcagttgttggtcaggacaggactgtaaacaaggctgacacactcagatgtgtcaaacatcgctaatgccaaaggtgacagagtcatttgttttcatccaaacattcgagaaagttggacgaggtgactcacgcctgtcatcctagagctttgggaagccaaggcaggaggatcatttgagatcaggagtttgagaccagcctaggcaaaatagcaagacccccatctctacaaaaaataagccgggcatagtggcccacacctgaggtgggaggatcccttgagcccatgagtttgagcctgcagtaagctatgattgcaccactgcactccaccctgggcatatagtgagacccttcccccaaccaaaaacattgagagcagctcttgatgagtgaactgtacttcgtggtcagcagttctgggtagtaatttcagagatgtcctttcagcccttggagctgatgcaggaccttaaacatgagcgatggtggaggagggagggttgggaaggtgcatcaaggtagatgaagagtgtccctggggttgggccaactggcggtccgtctctggtccagtgtgttcaccttgcccccgtctgatcttctgcagttggtattccgagttgagtttgactaagtgagagctgctctcagctttaactgcctttcccaagacagcccttgtttttattctaaagctgtggttctcaactggaagcagttttgccaccccaggggacatctagcagtgtctggagacatttttgattgtcatgagtggaggaaggggtgctactggcatcaggtgggcagagaccagggatgctgcggaacatcccacaatgcacggaagagctcccctcacgacacagaatgacgcagcccaagagtcacagtgcagagtttgtggccagctgcggtggctcacgcctgtaatcccagcactttggggggccaaggtgggaggattgcttgaggcctggagttcaagaccagcctggccaatatggtgaaacctcatctctactaaaaatacaaaaattagccaggcatggtagcgcatgcctgtagtcccagctacttgggaggctgaggcacgagaatcacttgaacccagaaacgtggaggttgcagtgagctgagattgcgtcactgcactccagcctgggtaacagagcgagactctgtgtcaaaaaaaaaaaaaaaaaaaaaagacttagcaactattattactagtattagtattattaatttgtcaggctcactgaattttctcaaaaatttggcaaatttttaggaaaacattctcaaaacatttggcaaatctgtggctaaatgttgttttggggacccaaggctcgtaggagcaaaacagctttcaggtttccggatctgccagagactcaagtgtcctgttgtgtgttttgtgtctcaatgagggaaaggggaatatgtagcaccttccagatggatttgaccttgactgcgccactgtttgaagagcttctcaacctccgcagctccaccccagcccagatatttcagggaattagggttccaaggggcatgctatggaaaacaccattctagcatgagtcgaagcttctcatcccccatcttgctgtcttttgaccaaagcagattttgcacgtcgtaactgtcagagacatcaaagccagagggaatccagcctgctccaagctctccttttttgtacagagactgaatctttgcacttgatcttgtttgtgtttttaagtctgaggttagacagggtcccaggcaatggaggcgtgcgtgtccttttatttttctgttgtagcttttgctattttttctgacttttaaggcaactcatccacatggcaattaggaagagcccacttagggctgggcacagcggctcatgcctgtaatcccagcactttgggagaccgaggcaggcagatcacttgaggtcaggagttcaagacctcagcctggacaacatggtgaaaccccgtctctacaaagaatacaggaaaatagctgggcatggtggcaggtgcctgtggtcccaactatttgggaggctggggtgggaggatcacttgagcctgggaggcggaggttgccgtgagctgaggtcatgccactgcactccagcctgggcgacagagcaagaccctgtctcagaaaaaaaaaaaaaaaaaaaagaagtccactttacttgtcatagtgcttagaacaaatgaaacactctcctagccctcttgggatgtaattggctaccatctgcacaaactcttcattattgcacaagaatatcaatatacttaatgctactgaactgtgtttaagtggccgaggtggtgaatgttagctgtattttaccacaattaaagataagagggaaggaaaatgaagtgtactttacaaccaaaaaagtacgcttgatgtgcaaaaaagtgtgcagcttgatgaattttcaagaggatatattttttatagatgggggtctcactctgtcacccaggctgcagtgcagtggcatgatcatggctcactgcatccccgacctcctgagcttaagtgatcctcccacctcagcctcctgagtagctgggactgcaggtgcacactatcacaaccggttaatttttgtatgtttgctagagacaaggtttcaccatgttgaccaggccggtctcagcctcctgggctcaggttatcctcctacctcagtcttccacacaggtaattaaaaaacattttttcttagagatgggtcttgctgtgttggccaggctggtctcaaactcctgggctcaagtggtcctcccatcttggcttctcaaagtgctgggattacaggcgtgagccatgtcacctggcccaacagtttgatgaattttcagaaagtgaacactcatagggctggcattcagatgaagatctagaggtcaaccctcacaagcccccctcacgttctgtccttgcaatcattgcacaccggagactcattcattccttatctgagttctatcaccgtagattaattctgcctggttttggacctcagttcaatagtcacagaacctgtgctttttgtgaccaccttcttttgctcaaggatgtgttgtgagatgtccttttttgtggtgtggagctgtagtttacttcacctgattcgagtcctattttgggtgtttgtaatgtgtcaggtactgtgccaggtgccttacaggattgattcctttatgggcatctgacaagcccacccaccttatgtgaaaggcagaaccaaatagactccagaatgagacccaggtttgggtcccagctctgacacttctttttttttgagatggaggctgactctgtcgccaaggctggagtgtagtggtatgatgtcggcttacggcaacctccacctcccgggttcaagtgattctcctgactcagcctcccaagtagctggggctacaggcacgtaccaccaatcctggctaatttttaatttttgtatttttagtagagacagggtttcacaatgttggccaagctggtctcaaactcctgacctcaagttatcctcccacctcagcctcccaaagttctgggattataggcatgagccatcacactcggcctacttgtgatcaatcttacttcatcttcacaccctcccatttctcttacgcatcctccagtttctctctctctctctccttctttttctctctctctctctcacacacacacacacgatctgctgcgacaccttaagaaacaagagattatcagggaatgattgaatattttgccgcatttcctattttgctgcctgtttaaactaaccttggttatactattaaaagaagacgcgtcgtatcaagccacttctgtgactatggctgtccagaaataaacataattaaaacatccaacagtagtaaatgctattggttaggaatgagcgaagtggcttagagtcaccggaagtgagaaagggtatagaaacagaaggtacttggtgtagatcaggggtgtcctatcttttggcttccctgggccaccccagaaaaagaagaattgtcttgggccacacgtaaaatacactagcactaatgatagctgatgagctaaaaaaaaaaaaaaaaatcgcgaaaaaatatcatactgttttaagaaagtttatgaatttgtatcgggccacattcaaagccgtcctgggccccatgcagcctgtgggctgcaggttagacaagcttggtgtagagagtttcatctaaacttcatggcagctctgcagggcacccgttaggtccccagtattaatatacagtaaatctgagtctcagatctacgtaagtcacccagaagcacgcattctgcagtggcagagtcacgtttgaattagcatctgattgcaaagtctgggtgtctttacatgactacaggttatcttacctctcaagaggaggcaaccaatcaaatgttgccagcaccaatgaacttgtactttatttaggctcagaaagatcttttaggctaatgaaaatgccctatatttatgaaatgttctcgttctctgtggctttctcttttttgagacagggtctcaccctgacacccaggctggagtgcagtgatgtaatcatagctcactgcagcctcaaactcctgggctcaagcaaccctcctgcctcagcctcctagtagctgggactacaagcacgcatcatcatgcctggctgatattttttttaagggatggggtcttgctataatgcccagtctggtctcgaactcctgggctcaagcaatcctcctgccttggcctcccaaaatatgggattatacatgtgggctactgccagcctcttttctttcaattattttttaatctatgggttcccctcctttttgtttgtattttatttgttaaagaaagagagtactggccgagcgtggtggctcacacctgtaatgtcagcactttgagaggccaaggccggtagatcacctgaggtcaggagtttgagaccagcctggacaatatggtgaaaccccgtctctactaaaaatacaaaaatcagccaggcgtggtggcatgcacctgtaatcctagctcctcgggaggctgaggcaggagaatcacttgaacctaggaggtggaggttgcagtgagccaagatcccgccattgcactctagctgggcgacagagcatagtctctcacctttgggagtttactgcattgtttagcatgctctcctgtgccttgcattttccatagacaggcgtcagatctggaggcttcatcaccttcatcccccatctccatccccttttcttttgagcaagaatatgtcattagtggtaacggcacttcctgtagtggcccatctgcaggcatgtaatgtttataatgtctagtcagctctctctttttgtgatgttagggttaattagtagatttaggtgatggcaggcggacccatcccttaaaaattccacaagagctcttcatctgatatagtcagtcttgtggtggggaccctagaccagcatcatcatcatcacccggaagctggttaggaatgcatattcttgggccccatcccagtcctactgactcagaagctaatgcaccaggaaatgtgagccccattggcctaatggttttagcaattactggtagaacttgccaacttgccaagaccctttctttcttcctttctttctttttttttttttgagacggagtctcactctgtcgtccaggctggagtgcagcggcgcatctccactcacccactcactgcaagctccgcctcccaggttcacaccattctcctgcctcagcctccagagtagctgggactacacgcggccgccaccacgcccggctaatttttttttttttttttagtagagacagggttttgccgtgttagccaggatggtctcgatctcttgacttcgtgatctgcccgcctcagcctcccaaagtgctgggattacaggtgtgagccactgtgcccggcctcttccttcctttcttctttctttccttccttccttccttggcaaagtcttgctctgttgtccaggctggagtacagtggcatgatctcggctcattgcaacctccacctttggagttcaagtaattctcctgcctcagcctcctgagtagctggaattacaggcacatgccactatgcccagctaatttttgtattttttagtagagacagggttttcccatgttgaccaggctggcctcaaactcttgacctcaggtggtccgcccacctgggcctctcaaagtgctgggattacaggtgtgaaccaccgtgcccagcttgagacccactattagctttataaacagttacatcctagttttattgttctgcatgtattcgctggaattcttccatgtagaagggagtcttttttaagatagggtaactggagtcaggggcaggacactgttggtcttactatgagctaagccaaattcaataacaattttaaaatgcagaaaggaggattgttaaacttaggacaatacatgttgtctaccagatctttatttctctttctggatatctgaagtgattattcagatttagatgggatttcctcatttctctgcccttttttttttttttttttttttttttttggatgaagtcttgctctgttgcctgggccagagtgcagtggcaccatctcagctcactgcaacctctgcttcctgggttcaagcaattctcgtgcctcagcctcccgagtagctaggattacaggtgcctgccaccaagcccagctaatatttttgtgtttttagtagagatcaggtttcgccacgttggccagctggtcttgaactccggacctcaagcaatcctcctacctcagccccaacaaagtgctaggattacaggtgtgagccaccgcacctagccgccacttttttttcatcagctacgatatcaggtctcccagcagaaaatctctgagcaaatcaacttccaggtttgtttttcgtttttttgagactgagtttcgctcttactgcccaggctggagtgcggtgagaggcacaatcttggctcactgcaacctccacctcccgggttcaagtgattctcctgcctcagcctcccgagtagctgggattgtaggcgcatgctaccacgcccagcaacttttcgtatttttagtagagatggggtttcacatgttggccaggctggtctcgaactcctgacctcaggtgttccaccggccttggcctcccaaagtgctgggattacaggcatgagccactgcacccagcagcaggttcttaaaattagttttttaattattattttcagccctgaaaggaaaaaaataggtattggaatatctgccactcccattctgtcttgcaaaatctgcatcacccaaaaggttgggtttcaggagttggctgctcagctctagggatccaggagtgggacatgggtctttattctgtcgctgtgggatttggggcccaagcgtggggattatcagtgaattcaaaggagttgtgaattccctgctgaaggagggatgtcaaccacgcatagatcctggtggccatatgtcctcacttagccagcaactcagttctttggagcccagcagcaagaggtagaaggggctgtaagccagtgtttccaggacagcccctgcagctatggtcagagagtcaggaacggggggccggacaggcctatagagtgtgttgtctctgtccctctcctcataaacacatctggataacgacagataacgtgaatctaccatccatgggcttcccatgtagacaggacatttaatgacctaatcttccatcaagagagacttccccttcttaatttagttaccctaaggaacaatttgtatagaaaacgcagaatcaagattttcacatttccaccccactttctgtacccatttaaaaaataatgcatttggggctgggcacagtggctcatgcctgtaatcccttcactttgagagcccgaggctggtggatcacttgaggtcaggagtttgagaccagcctggccaacttggcgaagccccgtctctactaaaaatacaaaaattagctgggtgtgatggtgcacgcctgtaatcctagttactcgggaagctaaggcaggagaatcgcttgaacccagaggcagaggttgcagtgagccaagattgcaccactgccctccagcatagacaacagagcaagactccatctcaaacaacaacaacaaaaatcattttgaacaaatgcatttaaatatatttgtctttccaccctttttggggtgttagggtgatggacatataattatttttcttattgatattcacactgtctcgtatttgaccagatagaaccctagtataatattttggtatgcagttttctagacttttagaaatgtacacacaaacatataaaatgaagacaaatactttatgacaaatattttaatcagctttattgaggtataatctatataaagtaaaactcaccgatttaaaacaaattcaagtttttttaagtgtacagcttgagtgagttttttcaacttaaaaaatttatttcttaattgacaaataatcatacatgttcatggggtccataatgatttttttagttgtttggttggatggttttgagacagggtctcgctctgtggcccaggctggagtgcagtggcatgattacaactcactgcagccttgacctcctgggctctagccatcttcccgtcttagcctcctgagtagctggaaccgtaggcatgcaccaccgtgccaggctaatttttaatttttttacagagacaggggcttcttatgttgcccaggttggtcttgaactcctggcctcaagggatcctcctgtctcagcttcccacagtgctgggattacaggtgtgagccactgagtccagctcttagtaatgttttgatattaatacatataatgtgtggggagataagatcaggataattagcatatccatcatctcaagcatttgccattacttttattttgctacttcctatataatgacatttatcatctctttgtgttgggaacattcaatgtccttcttctagctcttggaaacgatgtaatattttattgttcactttactcatcctatagtggatagaacattcttaatgagttttgacaaatgtatacagtcttgtaagcaccaccatgaccacagggaatacttttatcaccccgaaaggtggtgcctcttacctcttatgtacctcttctgtgcctcttactaatccattcctttccttgccactggcaactcttttttttaatttttttgagacagcgtctcactctgtcactcaggctggagtgcaatggtgcagtctcggctcactgcagcctctgcctcccaggttcaagtgattctcctgcctcagctttttgagtaactgggattacaggtgtgcaccaccatgcccggctaatttttgtatttttagtagagatggggttttaccacattgggcaggctggtttcaaactcctgacctcaagtgatcccccctgccttggcctcccaaagtgctgggattacaggtgtgagccaccgtgcatggcctcctctggcaactcttgattgcctgtcaccatagatatgccttttctattttgccattactttttttttttttcgagacagagtctcgctctgtcgccgaggctggagtgcagtggcgcgatctcagctcactgcaacctccgcctcctgggttcaagcaatcctcttgcctcagcctcctgagtagctgggactacaggtgtgtgccaccacactccattaatatttgtatttttagtagagacaggggtctcaccatgttgcccaggctggtcttgaactcctgacctcaggtgatccactcacctcagcctcccaaggtgctgagattacaggcgtgagccaccgcgcccggccgccattaccttctatctcaataaccacacttacgtttgcaccagcctaatagtttttcgtattgaaggagtaatagagcgtgtggcctttctgatttgtttcactgagcatgatgcttttgagactcatttattttattgcataatttctttccttttactgagtttccagttatataccttgggttgtttgtttgtttttaaggcagagtctcactctgtcacccaggctggagtgcagtggcttgatcttggctcactgcaatcttgacctcccaggctcaggtgattctcccacctcagcctcccaagtagctgagactacaggtgtgcgctaccatgcctggctaattttttgtattttttgtagagacaaggttttgccatgttgcttaggctggtctccaactcctgggctcaaggaatctgggtaattctatgtttaatcgtatgaggactcttattttgcagcgcacagttagacttgaccatcttcccatattagcacgtgtacacttacttccggcttcttcttctttttttttttttttttttgagatggagtctggctctgtcacccaggctggagtgcagtggcactatcttggctcactgcaacctctgcctcctgggtttgagcaattctgcctgagcctcccaagtggctgggattacaggtgcacaccatcacacctggctaatttttgtattttcagtagagacggggtttcaccatgttggccaggctggtcttgaactcctggcctcaagtgatttgcccacctcggcctcccacagtgttgggtttacaggtgtgagccaccttgtccagccctacttcctgcctcctgagcactgggtagtatttcacagtgtggaaatagcatggcttatgtatccagctgtatgttggtggacatttgggttgtctgacttttggtattttaggcgatgacacacatccctttctgaagggcctttgggtggtctctgttctttgaccacatacacaatactgcaggtctttgtacttggtgggatgtctctgcagaccgagttcctagacagggcaaggtgagtggttggtctgtcttccgggcttggttgtggtctgattctgaccctgttaccttattccacaggggaccaacaaggcaccatggcgcagaagggccaactcagtgacgatgagaagttcctctttgtggacaaaaacttcatcaacagcccagtggcccaggctgactgggccgccaagagactcgtctgggtcccctcggagaagcagggcttcgaggcagccagcattaaggaggagaagggggatgaggtggttgtggagctggtggagaatggcaagaaggtcacggttgggaaagatgacatccagaagatgaacccacccaagttctccaaggtggaggacatggcggagctgacgtgcctcaacgaagcctccgtgctacacaacctgagggagcggtacttctcagggctaatatatgtgagtattgcaggcagccaggtacctactcctggcctcataaggaaagtaggcattagaaatgtgttgggagggctgggcacagtggctcatgcctgtactcccagcactttgggaggccgaggtgggcagatcacctgaggtcagaagttcgagaccacgctggccaacatgatgaaatgccgtctctactaaaaatacaaaaagtagccaagggtggtggtgcgcatctgtaatcccagctactggggaggctggggcagaggaattgcttgaatccaggaggtggaggtgcagtgagccaagactgtaccactgcactccagcctgggtgacagaataagactctgtctcaaaaaaaaaaaaaaaggaaatgggaggctgaaggtttgatcgagggagattgcaagatgaggtggaatcattccaaggtgggttcacatctcagcccttgaagaggttatttcctctctcgaagccttggttttcctatccgtaaaatgggaataatcaccctcattacagacaggaggtgtgacaatcccatgtcatcacatgtgccaagtgccaagacgtatgataaactctcaacagatttcattggcatcgttctctgtccttccttcctcttgaaagtaaagaagagctcataaccactttggaaaggctggtttgtcttggcagccaggtgggtaggagacatgaggatgtggctaggttttagggaggccttccttgtcacagaggggaatgttcaggttggtcgtaggactattttaggtagacttgcagaacagagtggactagagatggcacaatatggtagccactggccactcgtggctaactaaatttagatttaaattaattaaaagaaacattagaccaggtttggcgactcatgcctgtaatcccagcacgctgggaggccaaggcgggtagatcacttgaggtcaggagtttgagaccagcctggccaacgtgatgaaaccctgtctctactaaaaatgccaaaattagccaggcatggtagtgcacatctgtaatcccagctacttgagaggctgaggcaggagaattgcttgaacccgggaggcagaggttgcagtgagccgagatggtgccgttgcactccagcctgggcaataagagcgaaactccatctcaaaaaaaaaaaaaaaaaaaaaagaaacattaaaaaatttattagctgggtgcgtgggctcacacctgtaatcccagcactttgggaggccaaggtgggtggatcacctgaggtcaggagttctagacaagcctggccaacatggtaaaaccccgtctctactaaaaatacaaaaattagctgggcatgatggtgtgcgcctgtaatcccagctacttgggaggccgaggcaggagaatcgcttgaacctgggagatggaggttgcagtgagccaaaatcgcgttattgtactccagcttgggcaataagagcaaaacttcatctctaaataaatacataagtaaaagacaataaaaaataacaaatttatttcttttgttgtgttggccctaggtcaagtagtcaatagccacctgtggctagtggctggtgtactgggtagcataagtgcagaatgttcccattatcatagaaagttctgttggactgcttggactagatgattggggcttggagtgtgatgttgtggggcacgggtcgccagactgatgtgcagaggtcacccaacccggcctatgtctatgtcttctctctgaaaggccttgctcaccctcgagcaggttacctcatgcctctgaagctttgtttccttttctgtaaaatggatgcaagaatagtgccagcctcttgggagccgggcatagtggctcatgcctgtaatcccagcactttgagaaactgaggcaggtggctcacttgagcccaggagtttgagaccagcctgggcaacacaacgagaccccatctctgcaaaaataaattagccaggtgcagtggtgcgtactcataatcccagctactcagggaggctgaggcaggaggatcacttgagcccaggagttcaaggctgcagtgagctatgattgtgccactgcactctagcctgggtgacagagcaagaccttgtctgtttcaaaaaaaaaaaaaaaaaaaaatagtaccagcttcatggagtgggttactctaaatagaaagcacttaatacacttcctgctacatgttaagtgcaggcactgaaaatgttaagtgttactagattggtttttgctgtggtcatgatcacttttgattttactagtaagatgttcttcttccatcacttggcatccttgtgtctctttggttctggtctgtacattttgccaaatgaaaattacaaaaagccccttgtcatctctaaaaatgtcctgcacatttttttcctaattaggaaactaagacacgttcactatggaacacttggagagttcagaaagcatagtgaacacaaaacagaaaaattagtccttaaccagagatgcggtgcattctttgtctctttgtgagcatggtatctgtttacatatttaaaagcctattgggcacacagtttagtgacttgctcttttttccatttggaaatgctcagtgttgacttgtgtaatatatctcaggaagccccaaagataccccttgtaaggggtagtatagaatctgtcatggggataggccatttttccactgttcttatagatatttcagaaggagttagagtggctttttaaagagccaaatggtaagagtgagcaacttagcaactcataacttttttttttttttttgagatgggggcttactctgtctttgaggctggagtgcagtggttctatcgtagctcagtacagcttccaagtcctggattcaaacgatcctctcacctcagcctcctgagtagctgtggaccacaggtgtgcaccaccacacctggctaattaaaaaaaaaaaaaaaaacttctgtagagactgggatctcactatattgcccaggctggtctcaaactcctggcctcaagccatctcctgccttgacttttcacggcgctgggattacgggtgtgagccactgtgcctggccgtaactattaaatatgtcctccaatccaagtgctgtacattgacacattgtattttatttaacacagcatcccctgagttaaaaatgtttgccccttttagggaaggaagctgaggtgcagtgttgcaaaatgtatctttactttcttaagtaggggaagtctcttgtctgtggcactgtttgtatggaaaaattattgatctggggctgtttgtatggtggacattttctttttctttctttcttcttttttttttttttgagatggaatttcacttttgttgctcaggctggagtgaagtggagcgatcttggctcattgcaacctccacctcccgggttgaagtgattctcctgcttcagcctcccgagtagctgggattgcagggatgtgccaccatgcctggctgatttttgtatttttagtagagacgggtttcaccatgttggctaggctggtctccaactcctgacctcaggtgatccacttgcctcggcctcccaaagtgctaggatcacaggcctgaaccaccacgcccagccagtatgttggatatttctaaagaggcccgtctgtagggagctagagggaaaattggactctttggggcccaggtctttcatctaagacgtatcatcaccatctagggagtttcaggacaggcctgtgtattcatctcacctgctgtcctcaaatagaaatcagaaaaaaaaagggcatatgaaggtcctgagacccaaaatatcttctgacagcagattaaaaataaatgaatcaaagcttcaaattcctgctatgcttctctggacagattagattaaaatcctttcagccttgtgatgatggtcccgctcttctcttgttcctttctggtcagtttaattgcttaatagaaaccgtcgtccatgacggagaagataaagaaggaaaggggttggggtgggggagcacagtaacttactctcccagcccataatagcagcatgcatgagtcttgttaataggcgggtagtgaggtgataccaggtccgtggtctggcatgcatgactttgccctctgtgatgaagataaactttctcctccgttctgcaaggctcgcctcaaacgatgtgcccttgagaaggttctggcagacctcttgtgctcttggatctagaagagtctatagaagccagaggagctttcctcctaatcttagagatgcaggttctgggctcagcaatgtccagcagtctacctaaactgctgaagaccgtttgtggcatacctggcggggagcatggctttgacgcctggtcctaagggtcccttggtcttctgaatgctgtcttttggctgagttcgtctgcctcgagttagttagttcgttcctcccttccttccttccttccttccttcctccctccctccctccctctctctttcttcctttctttctctgtctttctgtcttcttttttctttcttcttttttctttttctttcttttgagatggggtcttactctgttgcccaggctggagtacagtggcatgatctcagctcactgcaacctctgcctcctggaactcaagggatcctatctcagtctccttagtagctgggactacaggcatgtagcacgatgcccagctaatttttttgtgtttttggtagaggtggggtcacaccgtattgcccaaacagatctcgaactcctgagctcaagcaatcttcaccacttcggcctcccaaagtgttaggattacaggcatgatattgtgccactgcactccagcctgggtgacagagtgagactacatctcaaaaaaaaaaaaaaaaaaaaaaaaaaaaaaaaaaaaagatgaggttgctgaagctcagatgtgcttagtcccaccactggaaggtgggcagagctgggattcagacaaggtctgtgtgagtccagggccagggtgactacctatgattagtagcaaagggctcttggggtaataggcttagagcaggaggtgatggtcgtgggctggagcaggaggggacagtgccagaggccttgttagctttgaggtagacaagctttaagtgcagagcaagaaggaattgaaccttttattatgattccttgagcacctaactaggtgctagactaatgattacaacctgctaacacagaggagtgatttttgtttttaaattgagttaacttaatatatcaaaaaaagaaatctgtttctggcattgctcgaaaaagcagaggacctgacactgcagaatgcagagtgcgagtagcagtccctgtgagatgggctttttgctctgcttttccgcagacctcaccactccctgtcgtctcccaggccatggtaaccattgaccgtggcacctcttttgttcactcacacacgccctgcttcactcatgccttacctgctttgtctctgtagacagtgggaccctccaccctataccaaacctctggggttgggaaaatcatgatccagagccaaggtggatgggcccccctgctcattggaactccaagcccaagtccctgaaccatgaaccccaaaggacatttttccagttctggttctgcttctggaatgcccagggggtcaggagaagccctccttccaaactttagcaggtgacaatttttccgccttagagacctggcccagcaatcttagcctactctggaagcagtgtccacccggggacacaaggaacaagcagattgtgaacagaggcctcctgggtgccagccactgcactggtccctagagggtagaaagacactgtaactggaagctgccctttgtcaagccccaagcattagcccttctgatctttttttttttttaacatggagtctcgctctgtcacgcaggctggagagcagtggtgtgatcctggctcactgcaacctccatttcctgagttcaagcgattcttgtgcctcagcctcccagtagctgggattacaggcacatgccaccacgcccagctaatttttgtatttttagtagagaagtggtttcaccatgttggccaggttggtcttgaactcctgaactcagatgatcctcccacctccgcctcccaacgtgctgggattacaggcatgagccactgcacccagccttctgatctttcaagtcattattgcttcaaagaacctcctccagtaatacaaggataatctatgcaaagacctcaggagaatatttaaaaataagtatgtatcacaaaaagcagccctcttccctggaggcaaacatgattcacaggttcatgtatgtacacacacacacacacacacacacacacacacaccccaaacataagaaaaagtcactccttgtatgttttgcagtatgattttttttccacttaaccctaccttatagttttttctgtctgttcataactatctagtcagacttcaaatatgtttttgaataggtaagacatgcaaatatgaaataaaatagtgtataagggaatatagaacttcccccttcgttcctatttctcgcccttccagttccccttcttagagacactgtggttgctggttacatatgtagccctccagtcatgttatttatttatttatattatttttcgagatggagtctcactctctcacccagactggagtgaagtggcatgatcttggctcactgcaacagccccctcccaggttcaagcaattctcctccctcagcctcccaagtagctgagactacaggcgtgtactaccacacccagctgatttttgtatttttagtagagagggggttttgccatgttggccaggctggtctcgatctcctgacctcaggtgatccacctgcctcggcctgccaaggtgctgggattacaggcttaagccactgtgcccagcctattgctttttttgtgataaagtctcactctgtcacccaggctggagtgcaatggtgcgatctcggctcctgcaacctatgccttctggattcaagcgatcatcccgccccagcctcctgagtagctgggattacaggtgtgcatcaccacacccagataatttttgtattttttgtaaagatgggtttttgccatgttagccaggctggtcttgaactcctgacctcaagtgatccacccacctcagcctcccaaagtgctacaattacaggtgtgagctgctccatccagcctccagtgatgttttatacacatgcagccacatagagagcccctcctgcacccctccaaaatggcagcacaggccccggctgttgtgcgtctcaatctttgcatctaactgtgtattttggccattcatccatggtagtagagagagggccactgcacagtcttctgctatagggatgaaccataatgattaagcctgtctgctattgacaggtatttaggttgtttctagtctttttgctcttaaaagcaaggctgcagcaaaagcacgtgcttggtggaccacgtctgtctctaggttgggtatttagaaagccgtgatattgcactgcagcttcataaagaagccgtgattatccatcactttactgaggaagctcaggggtaggtctgtatgcacaagtcaggcaggtgataaggcaaagccaacactctgcccaggcctgtgtgtctttttttttttgagaccaagtctcgctgtatcacccaggctggagtggagtggcacaatctcagctcactgcaacctctgccacctgagttcaagcagttctcctgcctcagcttcccgagtagctgggattacaggcacgcgccaccacaccttgctaatttttgtatttttagtagagatgaggtttcactgtgttggccgggctggtctcgaactcttgacctcaggtgatccacccaccttggcctcccaaagtgccgggattacaggtgtgagccactgcgcccggccatccctgtgtgtctgaaagccagtgttccttccacttccctcccttccctccctgttcctcatttctgctgcaggccccgggagcaccccctgctcagggctctgtggctgaccatataaagcgtcagagaaaaactggagctgcttcctaatacggtcacaagagggaaatcctgggcctgcagctgggacttgctggtggcacagggcccatgagatgccggctgggacacaggaggctgggatgttgaaacctctgaatttaaccagctggagaggggctcgtggggccagagaggcagaaacacagccaactatggttgggctgggtcgaggtgaaggagaagtggctgaataatgtgggaggaagagcccgatgctgaagccccacgaccctgccgtgagatgtgcggctgcctgcaccagtcttaccttcactccatcgtcataccctggcttgcttagaaagcttttacagaactcagcagagattcagatctacctggaagtatggattaagtgcttgttgtgtgcacggcactgggagagatgtcccaaacaaagaggatggaagtcatattcctctttcagaagctagtgatggagttgaaaaggcagtgtggtccttccttctttttaaaaattcattttattctttttttttttttctttgagacagtctcactttgtcacccaggctggagtgtggtggcatgatctcggctcacataacctctgcctccttggttcaggtgactctcctgcctcagactcctgagtagctgggattacaggcatgcgccaccacacccagctaatttttgtatttttagtaaagacggggttttgccatgttagccaggctgttctcaaactcctgacctcaagtgatctgacctcctcgatttcccaaagtgctggcattaaaggtgtgagccaccatgcccggcctcttccttctttttaaaaattccttttattcttttcttttctctatctctcatctctctttcttcctttctttcttactttccttccttccttccttcttttttttttttttttagagtctcactctgttgcccaggctggagtgcagcaccatgatctcagctcactataacctccacctcctgggttcaagtgattctcctacctcggcctcccgactagctgggattacaggcgcctgccatcatgcctggctaatttttgtatttttagtagagacggggttttgccatgttggccaggctggtctcgaactcctgacctcaagtgatctgacctccttggccacccgaagtgctgggattacagctgactgagtgtctaccctgtccctggcactgtgcggggtgcaggagatacagtagtgtgtgggtcacagtccaggaggtaacatttaggcagagctctaaaagaggagagggaaccagctgtgggaagatgaggggaaaagtgttccaagtggagagaacagcatattgaaggctctaaggtggcaagacttccctctcgtgaaatgaagggagcatagtaagagtcactaaataacattgattgagcacctactacataccagccgccatgctaaatgcttttcgagcattatctcgcagcacatctatgaagggcttgttcgtatgcctccctgttttgtagatgaggataagtgagactcagagaggttaagggacttgcccagggtcacacagcgaagaagtagcaaagtgaaggttcaaattcaagtaccccatacccagttctgagcccttagccactgccctttactgcctccaggtcaagggcttgagtgaggacaggttgggctgtaaatgatacctacattcaaaaggggcgtggcagtggacatggccccagaggagctggagatggagtcgaggcctgaaggagggtggggcttgattgacctttgttcaggtgaccacagactgggctcttctctttgggaggcttgtcctggggacaggggacactgattgaacaggaaatagcccctggcctggctcagtgtagtccactgagtacctactgccgccgtgcaaggcccccaggtcacggaggtgaagtcaggctgtccctgctcccaggaagctgtatcattaatttattcccctggcatgcatttagcaagcatttagttagcacctattctataccaaggcctgtgctgggactgaagaggagaaagggggttccccggactcaaggcacttgcagctggtgtttgcaggatgggtgggagggtcctgggtgatggaatggggaagaggggtgtccaggcaggcagccccccactcccagccccaccaggctggatgttgctcctgggccccgcttacctctaacccttgctttgcttctccatttcggtccgatggagccgcttataccaagctgcttatagttcacccccacggaccccgtgtcctgtttttctgcccatgtccctgctttgtcttgagctggttaacaccttgttgtcctttaagactcagtgcagggaatacctccccacctggaggtttccctgaccacccccaatgtgggttagggccttcccttccttgttcctatcattctctgttcttacgacgtgttttaatgtacttgtctccccctctgatttaagttctttaagggcaggagctatcattgatttctttatctccagcctctgacacagatgtggtatatagtaggtgctcagtaaatggttgatggctatttagacaggcatatgttgactcattcattctccttttaggggatggtgagaacctccgtctccatcaatcctgtttccttttttttttttttttttttttttttgagatgggttctccctctgtcacccaggctggagtgcaatggcaccaccttggctcactacaacctccctccacctcccaggttcaagtgattctcctgcctcagcctgccgagtagctgggactacaggcatgtgccaccatgccctgctaattttttgtatttttggtagaaacagggtctcactgtgttgcctaggttggtcttgaactcctgagtgtgagcaatctgccctccttggtctcccaaagtactgggatcataggtgtgaaccactgcgcccaacaatcctgtaccttcaaagaatattcctctgcagcacccccagacattacataccattgtccctgagtggactgagccctggaaggaccttcccactctctctttttctttctttttcttttttgagacaaggtctcaccgtgtcacacaggctggagtgcatggcacaatcacggcttactgcaacctcaacctcccaggcttaagcaaacctcccacctcagcctcccaagtggctgggactacaggtgaatgccaccatgcccagctaatttttaaatttcttatagagatgggggtctcactgtgctgcccaagctggtctcagacttctgggctcaagcaatcttcctgccttgacctcccaaagtgctgggattacagttgtgagccaccacacccagccagactttcccactctctaattggctccagcccttgactaaaaggcccttgagggctgggatcctgtgtttttttaatgttctaatgtagtcccagcaccttttgcatggcatctgggacgtacagaatgaatgaatgaatgaatgaatgaatgaatgaatgaacgaacgatcagtagtttctgtttctgttggatgggcctaggctggatagcataatggaccatgctcatacctgggggcgggccaggctgggcttggtgctgccaggatcttctttggtgacctcggtcaagtcacttaaccctctgttgcttggttcaccctagctgtaactgagagatggatctgtggttctccctaagtcacttgcagggaagaggatacgctttatggccatcagagtcttgggcagtactgatgtttatcgtttggggaaagcagttcctgtgagacgggttggagcctgtctcctgaactgtgacctcaaccatgggaaaatctagtatccagtaaggaaaaatcatgacaatagtgccttaccacgtacagcatggcgggactcgccttgtgccttgactcctccgtccctgatctgattattttcagatgctcctattcacccagtaggagaggactgctattttttaaatggtaaagtgcatatgacataaaatttaccattttaaacattttaaagaaaacagtgccattaagtgcattcacaatgttgtacagctatcaatttcaagacagggtcttgctctgtcacccaggggctagagtgcaatggtacaatcatagctcactattaccttgagctcctgggatcaagcaatcctcctgactcagcctcccaagtagctgggactacaggtgatcaccaccatggccagctattttttttttttttttttttttgtagagagggggtccggctgttgttgcctgagctggtctcaaacacttagcctgaagcaatcctcccaccttggcctcccaaagtgctgggattacaggcatgagccactacacttggccccagagcatttttatagcctcaaaaggaaaccttatacccatgagcagttcctcctcatttcccacctctttccagcctctgggaaccacaagtctgttttctgtctccatggctttgcctactctagacacttcacataaatgagatgatagagtacgtgacttttcgtgcctggcttctttcactaggcatattttcaagcttcatccacattggagagctcatgtcagtgttggtctctgttttgcagatggggaaggtattaatgatcaggagcaggcgctgtggggtaaacaggagttctagttcccaacttccctccagctgtgtaacctggtgacaacctcaccatgcctcactttgccctcctgtcaaacaggcggtggggaaatcactgttactgagtagttgtgaagatgccacgaggagatgcctctgccatcttctagagactgagtcactggggtttcttcttagatatggacattgggaggtcccagaaagagatcagagggtggtgggaggagagagagcttggaggattattaccttttcctccctccctcctggaccacagttttggcagctgtgtttctgtatgactgcggatccctctggacagcccctttttaggggtgtgtggctttctatgcctccaatgttcagttaacgacattccctctctggctgagtgcggtggttcccacctgtaatcccagcactttgggaggctgagactggcgcatcacctcagctcaggagttcgagaccagcctgggcaatatggtgaaaccctgtctctacaaaaaacaaaataaaaattacctgggcatggttgtgcacacctgtggtaccacctacttgggaggctgaggcgagaggatcacttaagcccagaaactcaaggttgtagtgagccaagatcaccccactacactgcagcctgggcgacagagcaagaccctgtctcaaaaaaaaaaaaaagtaaacaacattctcttctgttcttgctcttcagacttaactgctcccgtcactggttgggtttctttaattctgcacacatatctgtaaacactttctttattaaatgttcctgagttaatatcttaagcacactgttcattttctgtgccacctgttaaatgatgagcatttaatatgattgtcagcatccaaaaaagatcctgcgtagtgcttagttcggtgcccaacacatagtaagtgctcaatgaacggtggctgttatttaagccagtgaggtccggggaggtaaagtggcaggtcggaggagtggagctgagatttgaacccagagctcttcaaaactccacagtttggccaggtgcaatggctcacaactataatcccagtgctttgggaggctgaaatgagagaattgcttgagcccaggaatttgagaccagcctgagcaacacagtgaaacccatgtctctacagaaaatataaacatcagccaggcctggtggcgcccgcctgtagtcctggctactcaggaggctgaggtaggaggatcacctgagtccagaaaggtcaaggtttcagtgagtcacgttcacaccaccgcactccagcctaggtgacagagtgagaccccatctcaaaacaaacacaaaaccccccacagttgcaaaataaaacataggcagcttggaaacccactctcgccctttctcctcttcccacgtacctggaatatcagtgaggcccagggtttccactaagactccaagctccagtttccccatctctaacatgagaatattgagtgcttctgtgcaatctgtctaccctggaggaggtctggaagtaagctgggttctctgtctgcagacgtactctggcctcttctgcgtggtggtcaacccctataaacacctgcccatctactcggagaagatcgtcgacatgtacaagggcaagaagaggcacgagatgccgcctcacatctacgccatcgcagacacggcctaccggagcatgcttcaaggtgagtgaactcagggctgcacggggccagctccagggagcccctcctgtcctgcttgtctgcagttcttgccaggaatgtggagtttggcaggcactgcgagggaccaggagttactgtggctgaaaaagggaaaaagcaaaaggaacatctgtgtttgcagcctgggagggtgagggagagccaagagcttgggcaaatacgggcatgggcccgctccagctccagctccggggctcgctgcccaaggtccccgtcgggccagctgtctgcaaaggatggaaagagggtggggaacagccctggggctgagccattgtggtctgtgttgacacctacctgtccctcaacccctgtgggactgtgggtaaatatcttttcctcttcagcctcagtttcctcatttgtcaaaaggggtgatagtctctatcttgtagcttcttgtgaagattgttaatgctggtttttccaaacttaagacttgtgcctattactttcatgtttatacgttattatttttactattgttttattatttttgagacagggtctcactttctcgcccaggctgaagtgcagtggtgccatctcggctccctgcaacctccgcctcctgggctcaagcaattctcctgcctcagcctcccaagtagctgggactataggtgtggactgtcatgtcaagctaattttaaaaaggtgggtttttttgttttgtttttgttttgttttgttttgtttttggaagtgacaggatcttgctatactggttggtctcaaactcttggcctcaggcgatcctcccactttggcctcccaaagttctgggattataggcatgagccactgcacccaggccttctcaccttctatttagaacactttggagcccctgaaatagccacccccaagtcaaacagagggactaggcagttaatgcaaacaagtgtaccaggtcaggcgaagagtacaagaaactcgaaaactcacaccccctctgaaagggcaccaacaggtgggaacccagggatctgagttgggagttgagaggagcccaattctggaagttcttgaggccggaatccaggtgtgcctgagagatgccacgaccccgcccccaagatagagggactcaggtataagtgccccaactttctgacagtgagccagactccacaggtaggaccagaatcttggcccttctaggcagggcctgccattacctccaaagaccagcaggtggagccttgcaaaggcaatcttggagctgtaatctcaggttgtaaagtgatggctcctggagtcaggtatctgtcttttttttttttttgagacggagtctcgctctgtcgcccaggccggactgcggactgcagtggcgcaatctcggctcactgcaagctccgcttcccgggttcacgccattctcctgcctcagcctcccgagtagctgggactacaggcgcccgccaccgcgcccggctaattttttgtatttttagtagagacggggtttcaccttgttagccaggatggtctcgatctcctgacctcatgatccacccgcctcggcctcccaaagtgctgggattacaggcataagccaccatacccagcaattcctggttcttttctggagctgaggtcccactaagcacattttaatctaaataccaaaaagaaagaaaattctgttagcaaaggagaaggagggggagcgacagatgggtaagcatttctacagtgctctgaaaaaatttatttgtaacttgaaaaagtctttaatattgtatattcattctagaaaaacttaaacatatatttaagtaaaagagaacttgctggcacctatgattctatcatccaaaactcatcaccattaacattttgttacgtgacctttcattacactaactgaactaaatggcatgaaatgaaggaaatttttactatctgaagataattcgttccagaaaaagatcacttaaaacagagaccaaagtttcactgtagatagtatgtgtgtggaggagggaaagagagtgggcaaaatatttgactgagcttgaaaaatgacattgcaggccaggcacagtggctcacgcctgtaatcctggcactttgggaagcccagatgggtggattgctcgaggtcatgagttcgagaccagcctgggcaatatggcgaaaccctgtctctacaaaaaatacaaaaattactttggtgtggtagcacatacctgtagtcccacttcttgggaggctgaggtgggaggatcgcttgagaccaggaagtggaggttgcagtgagccgagatcacgccactgcattccagcctgggtgagagagccagaccttgtctcaaaagaaaagaaaagaaaaccaacattgcaaattataaaaataggttaatttcagcttacatgtaataagaattttattttaattacaagtaggtgctaatttgtagattcagtataaaatgaattaagagtgggtgtggggtttttttctgtaactttttctgggctgagggatgaaatcatgtgagcataaaacgacatcttcatgtcatgcttgacttctgcagcccgagctaaaaaggatcattcttacagatttatttgatgggtcaccagttttcctaagggcttcttttacttctttagtgtttaagtctctcaaagcccctgtggtcttagcgttcattcagctgtgaattgccctgaatctttttctttcttttgtctttctttctttctttttttttttttttttccggatggagtttccctcttggtgcccaggttggagtgcaatggtgtgatctcagctcactgcaacctccacctcctgggttcaagcgattctactgcctcagcctcccaagtaactgggattataggcatgtgccaccacacccggctaattttgtatttttagtagagatggggtttcaccatgttacccaggatggtctcgatctcctgacattgtgatctgcccgcctcagcctcccatagtgctgggattacaggcatgcaccatcacaccaggctaattttgtatttttagtagagatggggctttaccatgttggtcagactggtcttgaactcctggcctcaggtgatcctcccacctcggcctcccaaagtggtgggattacaggtgtgcaccaccacacttggcccctgaatcttttttttggcctttccaaggccactgactttgccagtcactgcaccttgttttccagaactgccactttgttttgtgttcatatcatgatggtggctattgatacccaataattggcaaggtgaagccactgaatcgtcggagaaggaggtttcggtggagtttgatcgctcttgtagtcattgaagaatacttttgtgttgtggggacttttgctttcctagaccagcagtccccaacctttttgacaccagggaccagtttcatagaagtcagtttttccatggaccgcaggggagagatggttcgggatgattcgagcgcattacatttattgtgcactttatttctatgattacattgtcatatataatgaaatcattatacaactcaccatcatgtagaatcagtgggagccctgagcttgttttcctgcaactagacggtcccatctgggggtgatgggagacagtgacagatcatcaggcattagattctcataaggagcacacagcctggatccctcttatgtgcagttcacagtagggttggtggttctataagagtctaatgccgcctctgatctgagaggaagcagagctcaggcagtaattggagtgatagggagtggctgtaaatacagatgaagcccactactcacctcctgctgtgcagtaccagtcggtggtttgagatgcctgcgctagaccacctcttaactgtgaggcaatgttgtaattgacaaggacaccctgtgttcatatatttgattcctcatggtctctaggttttaacacaaaattgcatagtcagctctcttgaaactacttagaaatgctcacttgacacatagtaagctccaataggaaatgactatcatgattgagcacagcagcatgtcttcagtcctagcactttgggaggccaaggcaggaggatcacttgaggccaggagttagagaccagcctggccaacatagtgagctcttgtctctacaaaaaaataattagctggccacagtgcgtgagtctgtagtcctagctactctggaggctgaggcaggaggatggcttgagcccaggacttcaagaatgcagtgtgctatgatcgtgctatggtactccagccttggcaacagagtaagaccctgtcacgaaagaaagaaagaaaatgaaaaccgtgaatatgcacatccataaaagataaactctttacttaatttaaatgttaaccaacacctgctatgccctcgtctattttggcatgacctggtgctttctggcaaatcattgatggcggactccaaaaataaaaagaatcgggcacggtggctaacgcctgtaatcccagcactttgggaggccaaggtggggggatcatgagatcaggagatcgagaccatcctggctaacgtggtgaatctccgtctctactaaaaatacaaaaaaaactagccaggcacagtggcaggcgcctgtagtcccagctactcagggggtgctgaggcaggagaatggtgtgaacccaagaggcggagcttgcagtgagccgagatcacgccactgcactctagcctgggcaacaaagcgagactccatctcaaaataaataaataaataaaaaataaaaagaatgtcaaaaataatggagaaaaatttaagcttgggaagaattccgttcacctgcttaattttttctccattcccaagtaggaaattggtttttgtgaagaaacacgtaggcccagtgtgttgactccattgataaatggcacgatctcattctgttaagtcactgggctgcgatccacactaagcttaccatgaaggtggagagagaaagctagcacatgtggcttcttccttgagttcttcatggaaaagatggggtgtgaaaaggcgggattgaggagggatgggtaacacacatgcactgaatataagatgaagcattgcagttgtgtcacatagacagtaagttcctgaggacctataaactccatccttcttgcatgtgcatcattgtatctccagcacattttctggtgcctggcacatagtagctgctcagtatttgttgaatcaatgaattattagagttatttatagaaaagaacctaccagggtcaggatggatggggtgggttatttgagagaggtggggctttataagcctcgaagaatggtttgctaaggtgagagaagggggcagggatggctttctagccaagaataataaaagcataaatgtaggggtgagaatgggtatgatgagtgtggcaggagctggtttagaggggttgactagtatactgtggcagggagctcagagccagagctcagccctttgctgcctcacaggagttgggaaaatgggagggactttctaagagatacttcacaacatggcaccctcccaagtggaagccaagccccttgagggtatgggaagagaagctgatatttaaaatatgtatcttatatctgcatatgcataaattatgtcatgtttattttttaaattctccccccctttttttttgaggcagagtctcgccctgccacccaggctggagtgcagcagcacgatctcagctcagtggtatgatttctgctcactgcaacctctgtctcctgggttcaagcaattcttgtgcctcagcctcctgagtagctgggactacaggcacacaccaccatgcctggctaatttttgtatttttagtagagatggggttttgccatgttggccaggctggtttcaaactcctgacctcaggtgatctgcccgcctcaacctcccaaagtgctgagattacaggcatgagccactgcgcccggccgtggtttgtttttggaaagatgttacatacaaattcaaaaggtgaacttctcccttcaacccttgtgcattagacccttagcttccctcccaagagacaattatggtttctagtgtatgaggttttctcctagagatatttttgcaagtataagcaaataggtatctattttcttccctaagatttccctacaaatactagcattccatatatatacagtcctatattttgccagaggatgttacatatcagtgcatgtaggaattccttgttcccttttttaaaaaattggtttttatttttgttaaaagtattcatgcagacggcttagagtcaagtaatttttgaaggcttattaagaaaaatagccatcctctgctacttctcaactcctttaattgattttttttttttttggtatttaccaccatatctctgaaaacaacacttgatcattgtgctgctatcttaattttgttttcaattttaggtatcatctattgactttcctccatgaaagatgaaatttagctcattcaccctctggatttgcccctatttcctcgttccaacacacatgcctcatatcagagtcccagtataattttatcttagttttgacaaactcagtgttcagagtttccattattatgactatgtaatgctatctagagtttacattattatgattatgtagatgttattcaaagctgagctttgcactgctttgtgactatttttcttctttctgtatgacttttctttttcctggagttagcaattgccttttttttccccaatcttgttttccatgtatttaaccaccaattctgccccaaaatctctttctaaatgtgttaatctccttttaatatgtccagacatgtattggatatcatattgatatcatctccttgaatgtgatctctactatagccttctgatctgccctggctttctctatagctagtaactgtcatataggatctttttcaccatccttgaaattccccttagtgctttcatagtggattccttgtttcccagttttcatgtcttcctctttcttgctttactctcctgcttaaatcaagcactttgtccagtagcttcccaagaaagaatgtacgtgatcttgaggcattgagaacttccatatctgagaggcttgatgcttctctaacacttaaaggatagtttagttgggtttaaaatttcaggcaagaaagttgttttcagaaagttataaataactttttttgcctgagctttttaaggcatttgtgttgttgccttctagtttcagttttgagaagatgaaacccaatctgattcgtatgtgtgtatgtttgtgagtgtgtgtgtgtgtgattatattcaccttcctggctgggaatattcttgatcctttgtacatgaccagtttttgtttttcctccttctctagaagcttttagactgtctttgtacccctattcaggatgatgggacttgctatgagtccatttttatttgttatcctggacacttagtggcccaattaatctataaacgtgtgtccacaaattctgggaaatgttgcaaattatttcattgatgctgtctttctccctgtgttctctgtttctttttcttagaagtctttttatttccataatggaattcctagaccaatcctataatttaaatctctttcttttgtcattttcatcactttaatgtttttaatggtattttctgggcacttacctcaacttttttccctaacccttccattgcgttttaaatttctggtatatattttattaaattccaaaaattctattttatttttaaatgtttctttcatatgacattctttttctgtggttgcaatatcctgtttctcagaggatatttaatgcagagtctatttcctccaagatacatattttcctaattgttttaacttctgtctgtcatattagtggatttcttcagatgtcttgggattcttggctatccattcatcttggatgctttagtacacaggataccaaattgttgatggaagctcagtgcttataggatgggcttgctgatgtgcttggctataatatgaaagcactgggctaccccattaggacacttctgtttcgtctttcagtcttttgttcatgggctaatctgattcttcagagaaggtttgtagaaaaatcttctgcctggaggttaaagatttgtctagcatcattttgagggtctagttgaaaagaagctgagggtttcaaaatgtgcagtgaaatttgtacattataccttccttctttcagtatggttcctggtgtccccccaggacggagaccctctgtttaaccctcaccagagactaaacccaccaccttctgtggggtgtgagaagggcagtcacttggcttcagggagtgtagaagatatgggaggggtctaacagtgccttatatttgacccagtccttatgtttttgtctcctccttgatcttttcttccagaggcccctggcattgccagtttctgaggtttggggcagaaatggggaattcggtgttgaaattaggtcgtttcccacctttcctcactgctcacctagacttttttcttggtacctttttttttttttttttttttttttttttttgagatggagtttcactctcgttgtccaggctggagtgcaatggcatgatcttggctcactgcaacctccacctcccgggttcaagtgattctcctgcctcagcctcccaagtagctgggattacaggcatccgccaccacacccggctaatttttgtattttaaatagagatggggttcaaccatgttggtcaggctggtcttgaactcccgaccttaggtgatccacccaactcggcctcccaaagtgctgggattacaggcgtgagccacggtgtctggactttttcttggtacttttcaacgcttatcccattttctgtcttccaagatggctttgctgttctcccctctctagttctttttaaactgcctcatgtatttttacactttttggtttgtttgtttttttttgggggatggagtttccctcttgtcgcgcaagctggagtgcacgatctctgctcactgcagcctccacctcccaggatcaagcgattctgcagcctcagcctcctgagtagctgggattacaggtgcatgccaccatgcccagctaatttctgtatttttagtagagacgggttggccaggctcgtctcgagctcctgacctcaggtgatccactcacctcagcctcccaaagtgctgggattacaggcgtgaaccaccacgcccggcctttttacacttttttttttttgccttttcccccctcttttgtgtggagaatggggtcttgttatattttccaggcaggtcttgaactcctgggctccagctttcctcatgcctgtgccttcctaagagctgggattccaggcatgagccaccatgcccggctaaactggttcatgtatttttggaaagtcttttacagttattttagtaaggtttaggaaggaagagagctaaatgcatgcactcagcctaccatcttctcatgggaattctctcatgccttcttttacaaagaagtgataataataatcatggatttttattatatgcttcctataaagctcagggctttacagaaatattctcagttaatctttaccacaaacctacaaggtggacaggaccagattaggaattttaaaattaagccctgaaactattaaggtgcaggcatatgtcataaaaaaaaattaaattataaagtaaagaaggctgacaaaattgtttttgtttttgctttttttagagacagggtcttgctctgttgcccaggctggagtgtaatggtgcgattgtaactcactgcagcctcaaactcctgggttcagcaatcctgcctcagcttcccaagtagctgagactacagagatgtaccaccatgctcagctaattaaaaaaaaacaactgttttttgtttgtttgttttgagacagagtttcacccctgtcacccaggctggagtgcaatggcacgatctcagctcactgcaacctccacctcctgggttcaagtgattctcctgcctcagcctcctgagtagctgggattacaggcacatgccaccatgcccagctaatttttgtacttttagtagagatggtgtttcaccgtgttgaccagactggtcttgaactcctgacctcaggtgatccacccaccttggccttccaaagtgctgggattacaggcatgagccaccgtgcccagtcttttttatttttgagacaggttctcactttgtcacccaggctagagtgcagtggcacaaacacggctcactgcaggcttgacctcctaggctccagtgatcttctcacctcagctccccaagtagctgggactgcagccatgcaccaccacacccggctaatttttgtattttttgtggagacgggatttcaccatgttgcccaggctggtcttgaactcctgagctcaagtgatccacctgcctaggcttctcaaagtgctgggattacaggtgtgagcccactgtgcctagtgaaaaaactttttttttttttttttttttttttttttttagagataagatcttactgtgttgcccaggctggtctctcattcctggcctcaagtgatcctcctgccttgacctcccaaagtgctgggattatgggtatgagccaccgtgcccagcctaaagttgctatttttcccatgatgtttatcttcgtggtgcttatgaaatggcaactatggcattcttccttctcgtgcatgcctgtgtgggtgtgccctcagcatatgcttacaaggtttattgggtgatccaacgctagccgcaagagctattattagctcccttttacagctgggaaaacagactcagaggagtggagaacttgctgcagatttgttaagtgtcagagccaaatatacacttggattatcctgactccaaagccggagccctgctggtcagtcggtgacaccgggcaaccacagggatccccctcaatcccacggaaggctgtctactgtcttcatctcagagtgttgacagctcaaagcttaggaggctggagctaagttcaataaatgaacgtgatgaataggagaaaagcgccattaaagccctccagacaagaaccactttggagcccctccatgggtccctggggtgtaggaggggcaggaaagcagataagattccattctgagcctctgcacttgccctatgcaagatagccacaagtaatgttttgtcctcacctcattagcaacaaatggccacactcaggggattaaaaaaagaaataacagccagcctttatcagcttggggctcttggctaattcctctttaagcttaagacaactctgcgggtggagtgatccaaacgactttctccactttgcaagttcccacactcggctgtatccttctgcttgagattggcagccccctggggatggttcctgctcacccaactcccctgaggctgctccccagtagaggcagagagaggaagggcactgatgtcctcagggcccctgcaataggtcaggacctgggttcactgctccatcaatcccacattgctcggccctcactagcaccacacagggtgggtggcagcctccccatttgatcaatggggaaaactcagcacacctacttggccccagaactgagagtcaaacctggggacccagcttcgctgccctcagaatgttactcttccctcctgggtagcgtggtatagatagtgtagtattcttgtccccatataacggaagaggaaactgaggcccccagaaggctaagggactagcataggccttgtgtcttagcctgttaaggctgctatatcaaaataccatagactgggtggcttttaaacagatatttgtttctcgtggttctggaggctgggaagtccaagatcaagcttggtatctggtgagggcctagtgctgccttctcgctgtgtctcacatggtggaagggacctgctagctctctgggtctctcccccaatgaggattgaacccccatgatctcatcacctcccaaaggccccacctcctaatatcatcactttaggggtaaggattccagcatatgaatttgagggagacatgagcattcagaccatgacaccttgtaatcagaaaggggttaaatatctttggttgaatatcctgtcctgccgattcagaatcactgctgtctataacctcttccctagatcactgttttagatgatgatgataaagatgatattaacggcaattaccaagctcttaaatgtgctgtgggtaaaacaattttaagctctttctgaatccagtctctttcaatcatcttcatgcccttgaaaggtctggatttttgtcgatttccctggtgaggaaacgggccctgggggcagaggtgatagggtggagccaagaagtaattcccagctgtttctctgcagaggcagtgctgctacaaacacatctccaggaaggggtacagccaaatgcttctctgtctcttgtgggttttgcagtggctgtcagctatgtgtctggcccggttgggaatgatgggggactgtgtgtgggaatgaatggctctgtctggctggctcagtctttacagaggtgctaggagtgtctgtttggtgctctgactaatcatgaaaagttcacgtttttatctttattttatttttatttttggtacccatggtgcattacagggaagggagacagcaaaggagaattatttgttataaaatagtaaatattggccaggcacagtggttcacacctgtaatctcagcactttgggaggcagaggcaggcagatcatctgaggtcaggagttcgagaccagcctggccaatgtagtgaaaccccatctctactaaaaatacaaaaaattagccaggcatggtggtgggcgactataatcccagctactcgggaggctgaggcaggagaatcgcttgaacctgggaggtagaggttgcagtgagccgagattgccccactgcactccagcctgggcaacaagagcaaaactccgtctcaaaaaaaaacaaaaacaaaaacaaaaaccgtaaatattaaattgaaaaagggacatacttaagggagtgaacctgaaaagccccagctgacacttggcaacaccttccttgtttgttttgggcttttttgagacagagtctcactctgttgcccaggctggagtgtagtggtgtgatctcggctcacctgagcctcagcctctccaggctcaggtgatcctcccacctcagcctccagagtagctgcatacaggcatgcaccagtacaactggctaatttttgtattttttgtagagatgaggttttgctatgttgttcaggctggccttgaactcctgagcccaagcaatccacctacctcggcctcccaaagtgctgggattataggcgtgacccacagtgcctggccagcaccttccttgttaaattgcatgtgtcagccacctccctcggtgtcctcccagcctctgggcagtctggctccccattcctttctttatccaacagcatttttttgtgagacaaggccttgccctgttgcccaggctggagtggagtggcacactcatagctcactccagcctccaactcctgggctcaagtgatcctcccctctcagcctcccaagtagctgggaccacaggcacagatcatcacgcctggctaattttttgattttttgtagagatgaggtctcattatgttgcccaggctggtctcgaactcctggcctcaagcaatcctcccgcctcggtctcccaaagtgctggaattacagatgtgatccaccacgcccggtcattctaacaatattgattattagatgttgccctagacacagcctactgtgcgtatgtgtaaatacgaattgaatcatcccacaagtagctgctaagtagaggaggtccagagagtggggaagtgtagccctggggaccttgggaggacaggggaggcttccttggaaggtgaagtgtaggcttggctagggaacttgatataggttctatgaggctgctggggctggagcagagagaagggggagaatgtaggaggtaggagtggaggcccaagagggagagcgttggttttcctgtctcctacaccccttcactggccagttctgctttcatgtttttatttattatatattttttgagacagagtttcactctttcacccaagctagagcgcagtggcacaataatagctccctgtaacctcgaactcctaggctcaagcaattttcctgcctcagccttccaaatagctggggctacaggcacacacctctgtccacagctaattaaaaaaaatttttttttcatagagataggggtctcgctttgagtctcaaactcctcgcctcaagcaatccttctgcctcagcctcccaaagcactgggattacaggcatgagctcctatgcccagcccagttctgcttttacaataccagggcttcctgtaggtttggaaaacacctgttgggttgcagcaaaggctctcaaagtatctcttcttactcagcatgtcatcctaaccaactctgccgggagagtagagtggggagatgaaggctggagaaagagaagggccctcacttacagaatggcttaggtcatgggctctggagctgggttcacctcccagctctgccccggctattactttgtgcctcagtttcctcacttgtcccgtgaggatgatgactgtgcttactccagttgttacaagggtgattcggtcagtgtgtagggacacggtgcatggacaggacaagttcaacaggcattagcagtcagctgccgaggacccaccgtcaagggccatgcagtggccaccttcacagtcacaccacagaagatccagaacctctggcatctgcctccgtgcggggcattaggtagagagccacttttctgcaggcaatggaggctgagacctttcttctttactagcccaggggtattgatggccctgcagagacgggttttgattacctctcactggatcccccagcagcctgttaccagaaagaagggcagacgcagggagcctgggtctgtgctcagtccccgctgggttttctccttttatggtcagcctacagtgctctggcttcccagacagaatccaccagcttgtgtttgggcttgggccgaaatagctggtctgtggggagctgggtacctcctgggagtcctcaggcccacagcgggggaggaaccgctgaagccctttatcttctcaggaaacgtgcctggggccttacacatccgaggctgggtggggagtctggggaggaggaagggagagaggcatgtttaaggatggggtgtgaggtgacatgagccccagggatctgggctgggaagctcagccccaggcgggtcctgatgatggccggccgcccccagctccagccttcccagactccacggaggctcggtactgtgtccccgcccactttggagcttctgtcccaggccctctgcttgggatgctctgcctcgacctctccccaggagattctttcacatttttcttaatgctgttcagtggtcacctctgccgtgaaggcttcctgtcttgctcaggtcagtgtgaaaaaacaaacaaacaaaaaacctgacgtctatagcacttgggttcacatccatcgtagcactgctcatctcttacggtcatttctttgcccatctgactcccaccctgggtcatgaacttctcaaaagcaaggataagcaagtcatgaagctcggtgcattggcttgagcctgtgatttcagttacttgggaggccaaggcgggaggatcacttgaggccaggagtttgggaccagcctgggtaatattactaagttaccttactaggccctgtctctacaaaaaaaatgaaaacaaaaaacaaaaaaaccattagccaggcgtagtggcatgcacctgtagtcccagctgctcaggaggctgagatggaaggatctgttagcccaggagttccagactgcagttagctatgatcgtgctactgcacttcagcctgggcatcagagtgacacctcatctcttaaaaaagaaaagaaaaaaaaaagcagatcttattgacttttgtgctttcggtacctggctcaggactcgtttgttgaatgaatatgtgaacacgtgaatatgcattttccattgcttctaccttggttgcctctctgagccagagagcaattcaaaataacaagcatttcctgagcacctactgtgtgtcaggcattgttccttgtaccttcaggagctcattggttcaggggaaaagcattgaaaatgaacaattttgtaattgttggaaacctaatagagctgcatgaagtggaagaagtcagatttataatcattcagaggtggtataaaatgaacatcatttttaaaaaaggtttatgcggtataatttaaataaattcattttaaggatacagttcacacctaaaattgcagctatgtctgcataactgtctaaattcactcataatttacatggttatgcagccattgctgcaatataattttatatttctatcatcccccaaagaaatcttgtgcacatttttttgtcactccatattcctacccgcagctcctggcagccacgaattcacaaatctactttctgtctctatggatttgcctattctggacatttcatataaatggaatcatatgtgaccttttgtggctggcttcttttttttttttttttttttttttttttttttttttgagacagagtgtctcactgcactcgcccgggctggagtgcagtgatgtggtctcggctcaccacaaactctgcctcctgggttcaagtgattctcctgcctcagcctcccgagtagctgggactataggcacgtgccaccacacctggctaatttttgtatttttagtagagacggggtttcactgtattggccaggctggtcttgaactcctgacctcgtgatctgcccacctcagcctcccaaagtgctgggattacaggtgtgagccaccgtgcccagccggctagcttctttcacttagtataatgttgtcaaggttcatccacgttgtatcatggattcatactatttatatattttttaagacagggtctgtctctgtcaccccagctggagtaccgtggtgcagtcgtggcttactacaacctccacctcctgggctcaagccattgtcccacctcagcctcttgagtagctgagaccacagggattgtgccactatgcccagctaatgtttgcatttttttttgtagagatagggtttcaccatgttgcccaggctggtttcggactcccgggctcaagcaatccacctgcctcagcttcccaaagtgctggaatttcaggcatgagccatggccgccggccataacatcctttcttttcatggctgaatactatcccactgtctgggtagaccacattttgtttatccatctacccattgatgaacatttggttgtttctattttttggatattatgaataaagtccataatttttaccaatatggaaaagaaaaacaagaaaaactctgaatgccatatcatggatagatggcctattatcattccatatcatctgtacctttttccgccagaatgttttgagacatttattaagtaaggatcacaatgatgataattactaaaatggagagaacctgtggaccatgggaaccactaggccatgtgacactcatgtttatattagagaaaggcaccgttttctcaaagcacttttcctccatctgctgaaagattattacaataaatacacaatgcaatacaataaatgaccaatgcaaatagtttctccatagagttatgcagtgtacaacatgcaccacggtccatggccatcctgcaggtaggaggtcaagtggaaaggtctccaactcagctctagaaaagtgcagagttagagaaggtatcatagaagagttgactcccaagacgatgtttcagatacagattagggtatgtacccgaagaattgaaaaggtactcaaactaaaacttgtacaggaatgttcatagcagcactatgcagaatagccaaaaggtggaaataacccaaatgtccgtcaactgttgaatggataaacaaaatatgatccatccgtacaatgtgatatgactcagccacaaataggcataaagtctgggacctgctacaacatggatgaacttcagccacatgctgagtgaaagaagtcagacatgaaaggccgcacatgttataattccatttatgcaaaaatatctagaataggtaagaccatagagacagaaagcaaattggcggttgcaagggcttatgggggagtggctgcttaacgggtagagggtttcatttgggggtgacagaatattttagaactagataaaggtggtagttacgtaacattgtgaatgtactaaatgctcctgaattatgcactttagttatttttttatctttattactattttttgagatggagtctccctctgtcacccaggctggagtgcagtggcgcgatctcagctcactgcaaactccacctccctggttcacgcgattctcctgcctcagcctcctgagtagctgggattacaggtgtgcaccaccgcgcccagctaatttttgtatttttggtagagacggggttttgccgtgttggtctcaaactcccgactttaggagatccagctgtgtcggcctcccaaagtgctgggattacaggcataagccaccgcacctggcttgaattattcactttaaaatggttctttttatgtagtgtaaattttacctcaatggaaggaaaaaagagagagagagagagaatggattaggccagagaagaagtggtggtgggtgcactgggcagaagaaatcacttgtgcaaagcaaggagggagtgaaactgctttgtacggtggagaacactgcttttgagtccaacacaagctcaggcttggggaaggaatcagataaaaatttccaggatctcagagttccctgtgctccacacgggttggcagacagcacccacatggagtccttctgctcgtaaccagcaccctgcaagcttcccacgcctggaagtggtgtgtttttgatgggaacgtcaggccagaggtctcccagcagcccccagctcggagccgcgctggcagctcccaggccttctcctggagcccgctccctctcctgggggccctgtgagcatctgagcctataaatctctcctgctctgggcctaggattcacaaggctgccaggaaagcctgcctctctccctgaagtagtggatcaacacagcccatctgtctgtccatctcaaaatctttccttaagatagtggaggttgtctgggccggtcccaggaggttctctctgtctgggttctaatcacagggtacctggttcttctatccttcaccctcttttaaaaaatcactttttagtactttgggaggctgaggcgggcggatcacctgaggtcaggagttcgagaccagcctggccaacatggtgaaaccccgtctctacaaaaaatagaaaaattagccaggcgtggtggcacgcacctgtagtcccagctactcggggggccgaggtggaagaattgcttgaaaccaggaggcagaggttgcagtgagccaagatcgagccactgcactccagcctgggtgacagagcgagactccatttcagaaaaaaaaaaaaaattaaactggtttcccattttgctctgtcctcgagtgaatttctccccctgggtggaagctaaaggcacgggtatctgtctgtctccagagtataatggagagattaaagtttgattgcttttttcctgctttttttttctttgagatggggtcttgctctgttgcccaggctggagtgcagtggcaaaatctcaactcactgcaacctccacctcctgggttcaagtgattctcctgccttagcctcccgagtagctgggactacaggtgcctgccgccatgcctggctaattttttgtatttttagtagagatgggtttcaccatgttgcccaggctggtctcgaactcctgacctcaggtgatccacccacgtgctgggattacaggtgtgagccaccacgcccggcctcctttctcttataaatagggacaccattgatttaggtctcactccaagccaggatgacctcatctcaacatccttcccttaattacatctgcaagacccttattctaaataaaatcacaggtgggatacagtggctcacgcctgtaatcccagcactttgggaggctgaggcaggtgggtcacttgagcccaagagtgtgaaaccagcctgggcaacatagcaagacccaatctctacaaaaaatacaaaaattagccgggcatgctggcatgtgcctatagtcccagctacaggggaggccgaagagggaggattgcttgagcctgggaggttgaggttgcagtgagctgagatcacgccactgtacacccacctgggcgacaaagtgagaccccatctcaatcaattggttagtcaataacatcgcagtctgaggttctgagtgaacatagcttttgggagtcacagttcaacccaccctagtgaccttgggcaagttgcctcacttctgaacctcactctccttatttgtaaaatggaggcaatgccagtgcccaccccaggagctgctgagagaattcagtgggtcacttcaacacagaagttcagcatacgcctgcagtgcagtgagtgctcgggagatcggagctgttagtgggatcctaatgcggtggctctttcttttctgtctttttttagctttgtggtcatgatggtttcataaagaacaataccgactctttttctattgaccatttttggtgggatgaggaaaagattgtatgtgttcatagcacaaacataaccaggatagaagtagaatgggtgaaagtaggtcttcctcctgtcccttttctcaatacttcaggctcaggcctgtttgttggttttttttgtttgttttgttttgtttttggagtctcgctctgttgcccaggctggagtgtagtggcatgatctcacctcactgcaacctccacctcctgggttgaagtgattctcctgcctcagcctccggagtaccttggattacaggtgcatgctaccatgcccagctaatttttgtatttttagtagagacagcgtttcaccatgttggccaggctggtcttgaactcctgacctcaagtgatctgcccgcctcagccttccgaagtgctgggattacaagtgtgagccaccgcacccatcccaggtctgtttttagagatagggtctcactccattgcccaggctggagtgcagtggtgtaatcacagctcactgcaaccttgaactccttggctcaagggatcctactgtctcagcctcccaagtagctgggacaaggggtatgtctatcacacatagctaattaaaaaaaaatttttttttgtagagactgggtcttgctatgttgtccaggctggtctggaactcctggcctcaagtgatcctcccatctcagcctcccaaagtgttgagattacaggcatgaaccactgcatcctacctatatatctgtctttttaaaacacaaaaggtataacactatgctacctcatcttttatttttagcttaatatattttggatatttttctgtgtccatccacaaagctctgcctggttcttttcaatggctgcctattttatttatgtatttatatcttatttgtttttgaaacagagtcttgctctgttgcccagcctggcatgcagtggcacgatctcggctcactgcaacgtccgcctcctgagttcaagcaattttcctgcctcagccttctgagtagctgggattacaagcgtgtgccatgacacccaactaatttttgtatttttagtggagatggggtttcaccatgttagccaggctggtctggaactcctgaactcaagtgatccaccctccttggcctcccaaagtggtgagattacaggcatgagccactgcgcccggcctgcctatttttaaatgtgccattatataaacacaccagaattgaaaccccagagctgactagtctttaggccttttgtcttgaggatttcgttcaaccaggccacccaaacatccatctataatccgagggaagagagagagaactgattggagttgggcatagaatctgaggaacgtgcccacatccaatcagttctctcttaagattacagatggaagaaagagtcatctctttcaccttgccttcttcagtcccatccatcctcccattcatattcccatccatccatccatccatccatccatccatccatccatccatccaactcatttaccggcctatacactctgtcctccctcccattcacccacccatccactctctcatccactcactcatccttccctcctccgtccaaccatccgtccaaccagctatatacccacccatctacccatctacacacccttccctcctttcttctttctttcttcctatctatccatccatccttccttctttccatccatctattcgtccacctacccacccacccactcatccatttgtcttcctgtctctctacctgtccatctatccatccttccatccagccatctgtctgcctattcacccagcctcccatccatttatcctcccgtccatttacctatccatccattcttccatccacccatcctttcttccttccttctttcctttcttccttccttccactcacttgcccatccacctcttcttccatcctcccatccatctactcatctatccatccattttcccacccatctgcccatccacccacccacctactcacctactcatctgcttatccaccctcccgtccatctgtctattcatccacccacccacccatccatctacctacccatctacccacccttccattcacccatctacccttccttcctttcttccttccttccgtccactcatcttcccatccatctactcatccatccctcaatccatccatctaacaagcataattcagcacctaccatctatgtgccagtactagagatacaatgtaaaaccaagcctaggagatttttgatgaaatgaagcttgtgagagctgagcactgaactagtaggactgaagccagggagtggatttaagaaatgcttgccactgtggcattgtctaccagcagatatgatgctgggatttctacattgttaggtgaccattgaacgtattggtaactgttctcagatctctctttgggaaggaaatgggtcttcagagcctggctccacctcagaggcctctttaagagtagaaggtgatggataatgtctgcttaatcacatctagttctttgatgacctctgtatcttttgggtttctctggtggtaaacaagagagactgactctgtcatctagtagaggaaagggatttgtaggggagtatggaggagctcacagttgcagtgggaacactaggaatcaggctaggtaaatgacagaaactgggctgcttgggcccaggggcagaaaggaagtctgcctcagggctctgtccacctgctgtgcttccctgtccttgactgagcttggagttttaggccagagagtctgaccaatgcagcctggaacacattcttacctctttgttgaaggtacttatgaggcagtcccactaagactgtacatgacggtaggggtgatgggggaaacctcaaggaccacaggatgcttctggaagaagaggaaatggatgctggatttacaaaaaaacacaaatgtgcacaatactatattacagatgaaggaactgaggcatggagtttaagaatatttgcccaaggccacagagcggagaagtggctaagggggaccccaatctgtatagatccaacatctgcgtttggtccctaacctaatctgggtggggtgggcctcccgggacacctccagagctgatgtggctggatgctaatgactcctggatcagtcaggctccagcatctttctggggctgcctctgggactttggggctgcccttttggctttggtcgtggcccctgtagcctgggcaatgagcccagctgacctgttgtcacttccaatgaggccagcatggagaagctttagaatgggagggccctgggaggagccaagtccagacccttagctcagagctcattttaattcatggctcttttttcttctttctgtttgcagatcgggaggaccagtccattctatgcacgtaagtggaactgctttttcttctgttttttttttgtttttttttttttttaatctgtagtcgagatccaacctatgaaagaaaagatccatgagtgcagagatctttgatttgttcatggttccaagtgcctctctttatacctggcaccatgtagatgctcactaaacatttgtgatatatggtcttctgcggaggcaggcaaacttaaactcttaatgacacctgctatcatttggttccatacctctcctccttctaaaaaactagcatttattgaacatgtactctgtgccaggacttgaactaaagattttatatgcagaatcttatctaattgcataacagccatctgtgttgatagggaagatgttaaactgtcactttagtatttcacatttatcaagccacaaacacatcagtgccatatttggtgattggtatcactgtttctttgaagacctaggtacataggcagaagatagtaactcaattttagaatcattgagagagttttcactattgtatttatatgcaagtaacatatattaatatatattgttgattcattgacattgaactcacagccagcagctctgtggctgatgcctggatgaagtttatctgatgtgtatttattacataatgggtatcacaactttattgtgcttggaaacatgagccaacacttgagcactatgctggggacatttttgtatgtgtgctgccgaagggagcacatctgaggggacattttaaactgcaaaataactaacaaaaagccacaaaaatacaaaaaaaggtggcactaaatacactacagaaaggacacttgtttacagtatgagagttgaaactagaaggtagagcattcccctgttcaacctgagctgggaacgtgtgcattgggggaatcgaattttccttactctgcacatgttcacaaatgactacaaaagtgccatgaatattgattttggggttacaaataactttcagcaggtcggtgaatttgaaaatatagaatatataaataatgaggatagactgtgcatatatatatttacataatatataatatgtattatatttaatatatttatatttatatatatatatatttgaaggtctggaagcaactaaagctataatcaacagaggttatttaaataaaatatagcatttccaggtagccactacaaagagtgaggctgatctatttatgctgagagagaacgctctttatagataataccgttgagtggaaaacacaggggcaaaccagcatatgcataatgtaaccgtgtgtgtctttaaaaagagcaggattgcatggacgtgcatatgtttcctatttgcatgaaattatctggaaggacaattaaaaactagtaattagaatttcagatggtgatggatggtaggatggcaatgaactgtattgagagaagattgaaacaattaataagtttggggttgatatagatagaaaacctggaaacaataaaacaaaggcaattataaactccaggaaaaaacaaaagttgggatggaaggagaagtaatcacattggactaaggagcccagctgtgcaagtttggagtatttatctaaccagaataactccctgtgatggacttggctctgtggggaaagggaagaggattagatgggaactgaattctcatattccatggtaggatgtacacatttgatgtttgacaatgaatagtctggatctagagatataatgctacctagctatgaggatataaatgctaaaacaacctgccgacttggtttcctagttttctggcttctaggggtcacctgcattccttggctcatggtctcttcctccatctttaaatcctgcagcatggtatcttcaaatctctttctctggtccccctacctctctcttataaggcccagtacctttgtggttatattagccccacctagatgatccaagacagtctcctcatctcaagcaaacatattcacagattctgaggataggccatggacattcttgtgggggctgtttttcagctagccacagaggcatttgatcccctaggagccaaacccatgtgtgagccacatgtcatctccccaggaaccaaaatagtgtagctcaactgccctctgttgagtgaatgaattaagtgtggtaacagagaggtgcaggaaagagtaggactttcagatggcttcctagctatgtagctatgcacgggtcacttgacctctctgagctgagcttatggagaggctgtgaagatgaagaagaggccaccctgctctcatttccagcacccatgccatcagcaggtgctgtttcatctaaaacggtgctatccaaaagaactttgtgatgagcacaaagttcacttaaaagttcacttaattgagctcttaaaaagtggcaagtatattgcagaactgaatttttaagattttagttaatttagatagcggttcctgccttggacggtatgatgctgaaatatttctcatctctgtccattcctctgactccaccgcctcttcctagttcagggtcccgtcacctctcaccagggcctctgtagcagtctcttaagctccctgctcccattgcttgcttgcttccttcctttaataaatatacattataagaatattcactcattattcattgaataaatattcattagcatgctgtcataaagtgtggattccagaacctaaccccttgggtttgaattctggccccatcatcgtctagttagttgtatgctccaggaaataagtcagttcacttctctgagcctcagtttccccatctgtaaaatgggaacaataagcaccccattgggttgttggaaggatgaaatgagtcactacatgtgaagaactgagaaacaggccactgccccatggtgagcactttgtaaggatcagctgctattgtagtgaaagtgctcactattttttaaaaatccttcctgcaatccagtatccatcttgcagtttgtttgtttgtttgtttgtttgtttttgagatggagttttgctctcattgcccaggctagagtgcaatggcgtgatcttggctcacagcaacctccacctcccaggttcaagtgattctcctgcctcagcctcccgagtagctgggataacaggcatgtaccaccatgcctggctaattttgtatttttagtagagacagggttttgtcatgttggtcaggctggtctcgaactcctgacctcaggtgacccggggagcctcggcctcccaagtgctgggattacaggcatgagccgctgagcctggcccatcctgcagtttgttgttgttgttgatttttttgttgagacagagtctcactctgttgcccaggctggagtgcagtggtgcgatcttggctcactgcaacccccgcctcctgggttcaagcaattctcctgcctcagcttcccgagtattatgccatcatgcccagctaatttttgtattgttaatagagatgggttttctccatgttggccagcctggtctcaaactcctgatctcaggtgatccacccacctcagtcagcctcccaaagtgctgggattacaggcatgagccacttcgcccagcccatcctgcagttctgattctccccacactggttctaaagtcccgttcccctcgtgaaatggtttcctgcacccatgagaataaaactcagattccttactgtgacttggaagactgagtgtgatctgctcttccctcttcacttcctgctgtcctcctctgttgtggccctccagccatgctgggagccattctgtctcatacctgggcccagcatttccctcccttggacctctgtccatactgtttgccctgcctggcccacccttccctccatccttcccacagggctctcttgtaactttcaaggctcagcaactccctggcttccccatccacagcctcccctctcctcccttcccctcgatcttctcagtcacatcacccagatgtagcaatgatatctccaccacgaactatcttgattatttgtttacttggctattgtgtatctccatctcctggaatgcagcgttagcaaggacttggcacactgcccacacacagccagtgctggagaaggaggccttagccattgttaggaaggaaatcccaaaacgatcagacttttatttgcaaatgcatccagtcagcccagaaccaccaacatcttcagtctctgtattcaattttattttgcttgttgtgaaattcagccaaagtgacttgaaggacctacaagttgacagcagggctgagcttttacgcgtagttggtgcttaagagaagccaggctggagccaactgtttggttatgcagttaagaaactgaaaattggccgcgcactgtggctcaggcctgtaatcccagcactttgggaggccgaggcgggcggatcacgaggtcaggagttcgagaccatcctggctaacacggtgaaaccccatctctactaaaaaaatacaaaaaaattagctgggcatggtggcgggtgcctgtagtcccagctattcaggaggctgaggcaggagaatggtgtgaacctggggggcggggcttgcagttagcagagatcgcaccactgcactccagcctgggtgacagagcgagactctgtctcaaaaaaaaaaaaaaaagaaaagaaaagaaactgaaaattggccacgcaccgtggctcacgcctgtaatcccagcactttgggaggccgaggcgggtggatcacgaggtcaggagttcgagaccatcctggctaacacggtgaaaccccatctctactaaaaaaaatacaaaaaaattagccgggcatggtggcgggtgcctgtagtcccagctattcaggaggctgaggcaggagaatggcgtgaacctggggggcggagcttgcagtgagctgagatcacgccagtgcactccagcctgggtgacagagcgagactctgtctcaaaaaaaaaaaaaaaaaaaaaagaaaagaaaagaaactgaaaattggctgggtgtggtggcttatgcctggaaactcagggccttgagaggccgaggcgggagggtggctggaagccagaagtttgagaccaaactgaggaacacagtaagaccccattactacaaaaaatttaaaaattagctaggtgggatggtgcatgcctgtagtcccagctactcaggaggttggggagggaggatcacttgagcttgggagttagaggctaagtgagctatgatggcaccactgcacctcagcctgggcaacagagcaagacccagagacaggaaggaaggaaaggaagggaaggaagacaagaaaggaaggaaactgaaagctgaataaatgtaatttttaggcctgagttgtattttgtctagcatgtaatccatccagtataatcagtttaattagaggccatgggcctggctggagatagagctgtgtgatcagggggctaaagtaagaggaggagggtggtttcacataaaattagagagaggtaagggggtgcttccaggccctggggaggagtttaaactttcgtctaaaatggatgacaggctgggcatggtggctcatgcctgtaatcctagcacttcgggaggccaaggcaggctgatcgcttgagctcaggagttcaagaccagcctggccaacatggccaaaccccctctctacaaaaacaaaaattagctgagcgtgatggcatgtgcctgtagtcccagctacttaggaggatgaggcaggaggatctcggttcactgagcctgggaggcagaaagttggcactgagccaagactgcaccactgcacttcagcctgggtgacacagtgagaccccatctcaaaaaatatatataacaataaaataaataaatgaaatggatgagaacgtgctaagggactcaagccaaggaaggacaaagtttaaccagtgggtcaaatcaggcccttgtctgtctgttccagataaagttttattgaaacacagccgcacccacttgtttacgtatttgcttttgtgctgcagtggagagctgagcagatgtgacaaagaatgcgtgaccctcaaagtctaaaatatttactgtctgaccttttacaaaaagagtttgctaactcctagcttaaacagtgggaaaatgtgaatattatttatattgtaatgataggatgaatgctgaaaatcattatacaaacaatatataacttctgtggaagcagtggttataaaagtaataataggtgggcacagtggctcacacctgtaatcccaacactttagggggccgaggcaggaggattgcctgaggcctggagttcaagactatcctgggcaacttagcgagaccccacaaaatcaaaaaattagctaggtgtagtggcacatgcctgtcatcccagctactcaggaggctgaggtgggagggtcacttgaacccaggagttcgagattgcagtgagtcaagattgtgccactgcactccggcctgagcaagaagcaaaactctgtctcaaaaaacaaaagtaataataactaacattttggcataccaggcattgttctaagcattttatataaatgttcactcatttaatcctcataagaatcatataaaaggtcaggcatggtggctcatgcctgtagtcccagcactttgggaggctgaggctagagatcacttgagaccaggagttcgagaccagcttgagcaacatagcgagacccctgtctctacagaaaatttaaaaatcagccagctgtggtggtgtgcacctgtagtcccagctacctgggagattggggcaggagtatcacttgagcctaggaattctcagctgcagtgagctatgattgcatcactgcactccagcctgggccacagagtgagatcttgtctcaaaaaaaaaaaaaaaaaaatcatacaaggtaagtgtttttattatacccattttataatggggtaaagaaactgaggtatggagaggctaaatgacttgcctaaggtcacccaggtaactggcagaggagggatttgaacttgagcaacctggtcctggagcccattatgctattctgccaattgatgctataggggagagaggcgttgcttctgcctggggttttgcaggacgtgtaggagttgtacagtacaaaatgccagggtgctttgccagtcacataaagaccagggactgaatagctgtgaggttcatcagagacaatttggctttcctaccagtggcaaaccacaggctgcaatggacttggcaatattcgaccctgggagccaggaccagctgcagaatttgtagaattttgcaaaatgaaaatgctggctgagtgcagtgactcacacctggaatcccagcactttgggaggctgaggcgggcagatcacatgaggtcaggagttcgaggccagcctcgccaacatggtgaaatcccatctctactaaaaatataaaaattacccaggcatagtggcgggcacctgtagttccagctacttgggaggttgaggcaggagaatcacttgaacctgggaggtagaggttgcagtgagccgccatcacacactgcactccagcctgggcaatagagcaagagtcagtctcaaaaaaaaaaaaaaaaaaagaaaagaaaaaaaatgcagagcgtttataaagaattaggaagaatttccagatggcaacattagagtatgaagcacagggtggtccctgtgagacggtacaggtcacactcatgaagccagcctggctgggggattaagtggccattgggtggttcttcccagctgctggggctggactgattaaaaggacttggcactggggtagttacaaggccaggaggccataacgtggtcatgagtctggtccttctccgggaagagggagctcagtaccaaattccccaagaaataagaaaggagtttagggtgctcagaccaggaaggcatcttcacccctagaggtcaggggtcagaaaagccaagctatgaatgtttctagaaccagctctaagcacatcaaccttcagacgcccacgagcctggagcttgggatgttttctttggcagaacctcccagggcaatttatttttctcaacagaacttggaaacagtggagcccagcagcaacatgggaaggggtagatgcccagagtttatgtcccactccccatcccaggcaaagtgggagaccatagccacggatagggcacattgatgtctttgtttttttttttgtctgtctgtttgtttgtttgtttgtttgttttttgagatggagtctcattctattgcccaggctggagtgcagtggcacgagctcagctcactgtaatctccgcctcctgggttcaagggattctcctgcctcagctccccaagtagctgggactacaggcacccaccaccatgcccagctactttttgtatttttagtagagacagggtttcaccatgttggccaggctggtcttgaactcctgacctcaagtgatccacccgcctcagcctcccaaagtaccgggatgacaggcgtgagccaccacacccggtgatgtctttgttgtaaaagggaggaggtgagagaggttcaaggccagggtggaaaggaaggaactattgtgggaaaggagaagtgagcagcagcagtctaggagcactggtttgtcagcatgaagagtgtgatccacacatgttgtttgtgcacactgctgtcctgattcttgtcttggatctgaataggttcatgaccacctacgcaagtggtttcctacatccaaaaatttctctcctttctcttgctttaatcagaatccaaccccttcactttagaatgaagtcaagcaaggttctgacgttagcctgattgaagtaattcatacttaggtgtgaatgactgagtggcttggttcattgattggggcaagtaaagcctcctggaatatatggcagaattccagtggagtggggctgggacttcactctgtcttttctctttgctgatttgttaaaataaaagggtaggaggcagaacatgggccctggtgtcaagtggacctacgttcaaatcctgcttctcctccatttcctatctgtgtgaaagcaggagcaattgtgggctggagcaatttacttcaaacctctctttgcctcagtttccccggatgggtgatggggataattaataactctctcattagattgctgggtagagtaaatgaaaagatctgtgagcccaaagcctagtactgtgcaggccttcaacaaatatcaattccccttcccctgcccttcttctggccttagaaagcaagtccctagagggttgggcctgtgtcatggaacaacttggtgaaatgtagtaaaaggaattctgactgcattagaatcagagacctgactttccattctgactgtatcccttctttgctgtgtgacctagggaaaattgcttacccactctgggcaagactcttccttctataataacatggaagcaggaagaggataaaggaaataattcatgtagagcatttagcaaagggacccttccccctatatccccccaatgacaaacgccaattcttctctgtcttaagagatgggatcttgctatgttgcccaggcttctctcaaactcctggcctcaaggcatcctcccaactcagcctcctgagtagctgctattataaacgtggccagttctctgctgcacctggccagttctcctcttttacacacacacacacacacacacacacacacacacacacacacatatattctggtcttagtttccccttctggggaaatggggtaatgccttcatggtccccatttcataaactgcctctgaggccatgtgaaataatgtggccattgggaaggaaggcctctaggaagggaagggaccacacaaagtcaccgcaagatgtttcatcattcttggccatcagacacttgatttctggacagtgggacctgtaggattaggcacagcaatttggggcactttttttttctttctctttcttttttcttttcttctatttcttttttaagccatgagccaagttattaatgggcctttggcagagaaaattaatttctttatttcctaattaggaagaagagcagagactgtactagctttggtggcactggttcagcacagagaaccttgggctgacctcggggtgaacaaattcttttttcaacttaaaaaaaaaactctcttatattttagagtattaagtgagctcagaaaataaaagagataaggcaaagaaaggaaacacaaaaaacaaaagtaaactgaaaaatagaagaagacgataaacaagtgaagttttggtcaaggcactgtccttatctttcactaggagtggtggaacatagaggcagtatctggatggagcggttccattgtgatgatttctggtggccaaaacaggcagctagtgcacgaaagccatcttggtaaaaaaaaaaaaaaaaaagatctaccttcatattccaggaggacatacttttttgatacgacaaaccatgtcgtgctgatctaaacatatcagtcatttacactttagtgtgaattacttcaactgggtttattcttagatacttggctgagatcatcagccagcttcctgatacatggggtgggattcctcagaggataaaggggcttgcatctgcccagtgaccaatgggataaccggttttttggtaaatttttctttccataagggagcttcttaaactttaggtcctggtactccagaggcacttacatcctttcttgaaggctgccttgtgcctggtctttccatttctagcaatgctaatgatgtctgcaggcggatcacgaggtcaggagatcgagaccatcctggctaacatggtgaaaccccgtctctactaaaaatacaaaaaattagccgagtgtgctggtgggtgcctgtagtcccagctacttgggaggctgaggcaggagaaccagggaggtggagcttgcagtgagctgaaattgtgccactgtactccagcctggggacagagtgagactccatctcaaaaaaaaaaaaaaaaaaaagtagataattccaaataaacctgtttggacctatgtaagaaaactaaggttttcttgttcactctatttttttagagatgaggtcttgctctgtcacccaggctggagtgcagtggtgtgatcatggctcactgtggcctcaaactcctgggctcaagccatcctcccacctcagcctcctgagtagctgggactacaggcatgcaccaccaagcctggttaatttttcttattttttatagagtcagggttgtgctgtgttgctcaggctggtcttgaactcctggactcgagtgatcctcctgcctcaacttcccaaatagctgggactacaggcatgtgccaccatgcctggctaatttttaaatctttttctagaggcagtgtctctctgtgttgctgagctggtctcacactcctgggctcaaatgatcctcccacctcagcctccccaagtgctgggatcacaggcatgagccaccacatccggcccaccttttcactctttgtatctgaattcttttctatgtcctcttggaaggaatagattgggcattggacctaggctggggacccagttccgctcactaccagagatgtggccttgggcaagttacttcccctctgggagcctctgtttcaccctctgggaaatggtggtgatgatcattattgtcctgcctggctcatggaactgcggaaaggtcaccatggaacgtgtgcatagatgatgttcccgtgtctttcagaggcgagtctggagccgggaaaaccgaaaacaccaagaaggtcattcagtacctggccgtggtggcctcctcccacaagggcaagaaagacacaagtatcacggtgagtggcagttcccaatcagaggccatgatttagccaaccggtctccagcttgcagcccaaccgagatacaaacagaacatcattgcaagaactcaggccccatctgactacccctcccctgaagactcaaagagggaccgtctttttggcgagcaggcctgttgagtgtgggtgatttcttggctcagctagaagcatccctccagaagggggcccgttttgtgaaatgagaataagccctttccttccatagcgagatcttcctccacgtcggggcttctcagtggtggcactgatgtcattttggaccagataactcttccttggaggggcttccctgtggctcgtagaatgtttcacaacatccctggcctcgacccgccagatgccgacagcccccttccctccagttgtgacaaccaaaaatatctctagacattgtcagatgttccctggggtgggacagttgcccttgattgagaagcactcctttcatgaatctctgtaacgtcccaggggttaaggtaccttttgggttcccggattcctccacgtgtccccctgtccctgggatggagatgctggtatcactcggcccgtgggcttcagtgcaatgccattcagtaactgtggattgagcacctactgtatgccaggaaccacttggggtggggacctggggataagtctgagagatgctgttattctcttctctgagcttccagacctgtggaagagcatgtagttgtcaaagaatccctcaaataaacagatgatgacacggtatgactaagagcttgggaggaaaagaagagcaggtttctagagtcatcacctctagggcccatccttctcttcctcctcgtgtgtcagccctgccccatctatcccacaggagggggcacgtggtagggccgctaggactggccggtgcctccgtctgcaggtttgtgggtgggaagatggtaggatggagatctgaccacggcatggggtgtctccagtgttcgccattccagatgtcactttgcgtcctcagaggggactctggggcagccaccatggccggcttgtctggaggcccttggagatctaggatgggcgctggtcgtggctttggagaactttccttctccaaacaaatgcaggaaactcaagattcagcatcctagaattgtctctggcaagttggtttccagccatagtgagtgggaacaatggccccagaggctgtgtggcagtttaaacacagtttccactgccttccctttccctaaagagtaaacacaggagataatactttctaacaactcatcgttatcaagggcctactatgtgctgcttgttttggctgcatgcgtaaacacatctcagacattgtctcactggatactgttttaaggagcctaatgtggccccagtaattatgaaaacctttgaaatgtctggatctctaagaaattagaaaaaggagggaatggctgagcatgggggctcatgcctgtaatctgtgttttgggaggccaaggtgggaggatggtctgagcccaggagttcaggaccagcctgggtgacatagtgagaccctgtctgtaccaaaaaaaaaaaaaaaaaaaaatcaagagaattagctgggcctggtgtgcatgcctgtagtcttagctacttgggaggctgaggcaggaggattgcctgagcccagtaggttgagactgcagtgagctgtgatcgtattcctgcagctaaacagagagaaaagaaacagtatcaaggaaaaggagctgaccagtctgtctgggagactccaggctgtttggggggatcaaagtcatatattctccagcccctgatgtccatgtgatggaaataacgctgacatttgttttatactgtgttgttcaaccacagcaaggcccatcttttgcctacgtgagtaactgagagtgttttcctggtgtgtaggggaggcacggagtgaacttagatctgcatgatcctcttgcacccaccgagtcccgtagctggtggtagaaatggggtaggccctagagtttcacaacttaaatcagtaaatgcaccaaaataccatcctgtgggtgtctgatgccagggaagggtgtgggggtgcatttaccacccacgggacgcctattggagtccccagggttgcgctccagcctgaaatggatttctccggttcagaatgaacccctgcacccttcaaagcatccgctcctggtacccttgactggaacaacctagacagagatgtctgtcccatctggctgagtgttttaggactgtcaggccccaaagcttccctggctcgatggacagtcgatggcacagctgtggcatgcctccctcttctctccctgccatcatccctaagtgtcttccctcagccctgtccctggtgcaccagtgtgtccctgtgcatgcgtgtgcagtgcgtgtctgtctcttgcatgctggttgcttgactcaagcctccagaaacagtcttggaggtcgcgatgcactagctttggtggcgcggtaaggccccagctacgcaacgcataacctggtcctgcttggacctgtgcatatgtaaactcatctctaacacagagcttggggggctgatgtgtgggtcccagcctagaagaaacccacaggtgtcttccttggctcccgaaaagatcattcaatccatcttagttagaccctgggtgactgtgttgcagatcagaaggagaattacagttcttatttgggatctgcttttgtgtgaccttggccgagtcagttaactcctcggggctatggtttcatcatctataaaattgagggtttgaaccaggtcccccgatttaaagctctcttgccaagacttttcaaccttacctgccagaatccccattctagaaagggagcctttttcagagagcatggagaccccaagtttatgtgaacaaaagtgattcctttagtcgtcttcccaccaacaaagaaatgcccgtggtgctccttgtaaatttccaccagtctcagctgtggtgattccacttgtagctgagatttgtatgcggatgaggcttttgcttcatctttctctgggagctacaaaaaggaggatgtgtggacaaatcaaaacagaaacaaatagcagcttcctgctttgtcctgtagaccaggtaccctgatgccttcctagcatgcggaggaatgaggaggaagccatgcccatccttgtcccctctagacactttcccggctcctgtccagcccagccctgatgcctggaaaaataaggaagggaaagcaggaggggaggacaaggagaaaaactcccagaatccagggcctggaggcctcggggcccaactgcagccgccatgttttagggctaggccaagagcagctcgtttgctttcccagcttaacttaccacattggccctttcctgccatgattaatcacgtgaccgcgtttgtgcaaaggcatcccggcagagggggccggtgggctgtgtacagtctcagcttcctttaacccaatgaatggagctcaggcaacctgctttgaagctttattccgcagtccgctaagaggattcctggtgggttttgtgcattccttacttgtctgctgtagaagacttcagaaaaccagtcctgagaaagaaaaaattgcaacttaaaaaaaattgcactaaaataattagaaggaggcttgtagtggtttaacttgaagaaggctgcttgttaaacatgaacagcagcacgactgccatgtacagtgggacaggtggtgcactgcacaactccggggggcaccattcatcatgatgtaaatgacatcaccgacattgtgcaaggcagtggctttgagtggcagtgatgttgcacagatgagcaggccctggtcttgaaaaaagtgaccttcctagggagcagatgtcctagctattagagagctcagacagttgcttctcttctgaaatcctcctgtaaatctgaacattagcatcagggtctaagaggaggtaggagataggagagaacctgtgggttaagggcagagttttgtgacaacatccatccaaggtagaactgtcaggacctaggttgctttctccaataactagatgtgaatgaattttagggagagctggaaaagcagcttctacaagcaaacccgattctggaggctttcggcaacgccaaaacagtgaagaacgacaactcctcacgattcgtaagtagcaaagccacatggattttccagaaaagctttggtgtcatctcctgcctggggctgcagagtgtttgcgtgcagaggtgggaggggcatctgaccctggagagatgggctgtatctcacaatcttgcaagggctcctgcctctcactctctcattcattcattaatttattcactattcactcaacaaatattgattggcctggtgcggtggctcacacctgtaatcccagcactttgggaggctgaggtgggaggatcacttgagcccaggggttctagaccagcctgggcaacaaagcgagatcccatctctattattaaaataaaatttaaaaaattaggtattgagcacctggtatgggctagacccttatatccgataccattttatgtaacaaaacatgaattgagtgccaactgtgtaccaggcacacacctcctccaagaaatacttagtaagtacctactgtgtacaattactctggtaggcacttttacatgtaccaccattctctttgtttttttctcatttgctgtttttattaagtgcctactgtataccaggcactcagcgagtctcacaggattgcgatgaatagttcagatatggttccagccttcatgaagctggttcttccaactgaataacagagagtaagtgaggcagggggtactaccttcccatgcacactcccccaggctccaaagcaaaaagtttttgcctgagcccaacagggcaggggaactctgaaagtggatggttgatgataggtagacaacaatggttttattgtgcaaaagaagcggttgtctccgtaggagggtcagaaagatattttagtgagaaaagatgaaggaaaaattgcctctgcattccaggagaagggggtctctgaactgttgctcgctgagatggggccctgtgaaagactctttgcagaaagctctgctctgctgagcaaatgcacatggtggtccctgaccctgtgatccccaaggcccattttagtaacaaacaattacataatgtctcctttcctcgcccgaaattagaatcatagatagtatcacctcctacacgtattagatgaatacacatcagcataatgccctaactggaatatgaagaagaaataacataagacaattcataatgaaagtgtgcatttcaggccaggcgaggtggctcatgcccgtagtcccagtactttgggagactgaggcgggcagatcacttgagctcaagagtttgagaccagcctgggcaacatggggaaaccccatctctacaaaaataaataaataaagtgcatttcagcatatcaatgctcgggccaggccacaccaacagaagacacagtaagagacagacacttaggtctatccacggcgacagctacaaatacaaggaaaagggtcaagttcaggcactgatgatgttggcatgggattttccagaatggcaactgactctcagtgaagcgctgaaccaaagaacaatcttctctagagtcacacagatgggatattcttgtattagaacaacattttaaacacttgttaatgctttcatttaaaagcataaaaatctagaccaggcacagagtggctcacacctgtaaacccagcaccttgggaggctgagttgggaagatcacctgaggtcaggagtttgagaccagcctggctaacatggtgaaaccctgtctctactaaaaatacaaaaattagctgggcgcagtgacacatgcctgtattcccagctactcgggaggctgaggtgggagaattccttgaacccggggagatggaggttgcagtgagccaaagtcacaccactgcactccaacctgggcgacagagtgaggctcttgtctcaaaaaaaaaaaaaaaaaaaaaaaagcgtaaaaatctaaagtcataaaggttaggttctaagcctggctaattacaaacagatttttacctccatgagtggcaggtgagacattggaagagtcataagggatatagacaaggattggcatcagagactctccaggtcattgcaggactcccaaaatatccttggccccactgttcactaacaacagcggcccccccccaacatgtgacaagccaaataatggcttccaccgatttccaaaatctccatagcagatgtgccgcctccactgagaagcactgcgtttgcatgttccaattctgtgcaatgtttctagcctgtcataaatggaagcacgtgcaagacaaatccctaaaaacatcctccactcactggcgtccctgccatcttgggaaggagagtgaagaaggtgcctgggccttgcctgtgaccagccggctctccctggctccatctgggatatggtcatcccaaatcactctactgcatgtttcccaatggggaaagtttgaaggttttgtcaaggactgagcaagcctaggggattgtgtccacacacgccaacacttcccaccatgttatgtcatgatgggggaaaaggatgaaatcctgtctcacctgttgaggaaacaggaaaagggttcatgccaacagatggaggattgggttccatccttggtttcatggcttagctgaggcaggtagatagggccatctttggagatacttgttgagcctctagggccaggaacatgagccattcctgcctaaaggacatcctacacagggcctgcttgggcagtgtggccaatgcatactcacctgtcccacagaaaaggtttaatccatagttggatgatgtggatgttttggagcagggtggggtctggggagggagccctctagcccctgaatatggaaaaaccttctttctgcttagggccctacctctcaggagcaacgtcacgttggacaagtcacttgatctcttttagccttagttttcccagctttaaaatggggatagtgggctgggtgtggtagtttactcctgtaatcccagcactttgggaggctgaggtgggaggattgcttgagtgcagcagtctgaggccaacctggacaacacagtgagatcctatctctacaaaaaaaaatttaaaaattagccagatatggtggtgcatgcctgtagtcctagctgcttgggagggtgaggtcatggggaaaaggggattgcttgagcccaggagttcaaggttacagtgagctgtgattgcaccactgcactccagccctcgctgacagagcaaaaccttgtctctaataaataaataagtttttttaaatagggatagccatgatggactacggtcattgcaaaagccgaatgaaattgatctgtgaacatgttttacacgttctgttgctgtcaggcctggggtggtttcagctcagcagatgttggttccgcctgacaacttgacctgtggggttctgagtgttcgcaagaatctccccgccccacctcccatcctctgtaccatctgcctcctgcttgcccacagcatggggttaacggctgaagttgggcagcaaagcctgaactgtgttttcctgttggcagggcaaattcatccgcatcaacttcgacgtcacgggttacatcgtgggagccaacattgagacctgtatcctttccctgagcctgggccaaatgggtacccctgccccctaccaatctcctgcccagaggctgggagagtccaagagccacctctatctttccagcctcttaggtttcttccagaacaaatctccccttaacagcaggcattgtggtgcagtggttatacatgtgtggaccggacccctggtttgaaccctaaacaagcagcctaggctgcatgtgatgctcaaatgatctgtcccttagctgagtgaccttgggctggttactccacctctctgtgcctcatcagcaaaatggggatgataatgaatggtacctgcctcatagaaatgtgagaatagagtgaatgaactcatataaagctctaggcaccatgcgaggtgcagagtaagggctggctacgtagtgtctatcgtatgatcttcacttcatccttattcagccattgtccgaggccaaattctggacctgtcgtcctcttagagagttggtctgtgatcggctccacttcttaggtaggaaattgatgaaaacagagtttacccagaagaatgctggtatcgcaaggaacaagtagagcatctctttcatgaacctgagcggtgaagtggagccaagttagaaatttctggacgtgggggaacaaccaggtctagagttcagtgactgatcagcctcaggagctttgcaggcggccctagggctcaggcttcctgtggaacacgtgcttggcaatgtataggacctgggggcctgacttagcttctttctgcacctgaggtcctctagcagcacctagtggtcccatttttccacgttatgtgccctggataagagggtgggttgtggagtagcttcctctccactgtacttgtctaagctgtggggatttgggaaaatcactgaagctctctgggcctcagttttgcctcggtaaaatgggggtgattgcacctagtttctggagctggtgcaggggttaaatgaaataatatgcataataatatgcacagcccttggtacggtactgggcccaaagtgagcatctcataggtggtggctattgcgttaactcaatgttttctacgtttctactttaatctgcccaaaccagccaggattcccatcctgcagctaggagggctgtcaggcttcggtcaagtccagagccagggccctcttgtcctgcagccctgcacacacctctcagcaattcatttcctgtgtttagagcgagccccaggcatagccccgtccttctggcctcagccttccttttagatcagtggttctcaaagtatgtttccaaaccagcagcatcagcatcacttgggagctctttagaaacacacatctcagccaggcacggtggttcacgcctgtaattccagcactttgggaggccgaggcgggcagaccacttgaggtcaggagttcgagaccacctggccaatatggtgaaaccctgtctctactaaaaatacaaaaattatccaggcgtggtggcatgcacctgtagtcccagctactcaggaggctgaggcaggagaattgcttggatccgggaggcagaggttgcagtgagccaagatcacacactgccctccagcctgggtgacagagcgagactctggctcaaacatacgtgcgtgtgtgtgtgtgtgtgtgtgtgtatgtgtgcgtgtgtatacccatgtacaccatgagaaagtctgagaatcactgctttccagattggacatgggctgtggtagcccgggcactgctagctggctttaggacttgaagaagacaaggtctgctgatctagccccatcatcccgcaccatcatgcttagtgctgtggaaatccacccagtacagtagcccagcctcccagctgccctctcccatcaccccggaccctgtgatctccatgccaccctcacctgccctcccctctgctctccctcctgccaccccgcatcgcggagaagctctcctgaaattaattagtgtggcgtgtttacggtctctctcgcctccatcccgtcagaccccactcttggaacagagggcatggaagacagctttgccacttgttagctgtatcatcttgagaaaggacttctcttctctgagcctcagtttccccttattgaaaacaccgataatagttgcacttatttcctagcatactttgtgaggcttcagtgagacaatttatatcaatcatttcacacaggaatgaatcataaatcataggatcatagatggtgtcattatttgtattctgtcatgtctgaagacagctcattttaaagaagatttgctggtgatggctgttaggggaacatctcgttaccattaccttcttcctggagcctttttatgctttttcttttcactctattcccctcccttttttttgcatctgaagtctgctggcagcacccagcggttccatttgtccataggggcaatggtcaaagttagacattaccgatcccaggggtagaactggaaagtcatcccatgtgaattgggtgtgacagggatggaggtggaagaccagaggaacacccgcagtatccccagaatccctaactccctccaaaccagatctgctagaaaaatcacgggcaattcgccaagccagagacgagaggacattccacatcttttactacatgattgctggagccaaggagaagatgagaagtaagtgactagcaatgacatgtgattggatggcttgagccttccctttcatcagaatccggggttaagggattggctattaaaacagtctcagatcctgccagaaaggaccatgtctgtgagtgacatatgaacagttcttcatctcctcccaatgagtgagtgtggcttgtgttcagtcattctcatttactgagcacctactatgtgacatagtagccatcaactccaattagacattagatcattaatgattcatgtctcattagaccagagagcatcaagtccaactagacacaatctacgccttcaaggaaagggagaaagacatttgccttacttgccaatttataaaacttgcaaatataaaagatgcattctggttttataaggaatttgcaggggcagcaggactaagcatttttcattatacatgttttgccagtgactttgtagaacaggggtcaagactttttctgtaaaaggccagatagtaaatcttcaggctttgcaggccaggtggcttctggcacagctattcaactctgccattgtaatacaagagcagccacaggcaatatataaaccaatgagtgcaggcaacacataaaccagtgagctcaggcaacacataaaccagtgagctcaggcaacacataaaccaatgagcacaggcagtacataaaccaatgagcacaggcagcacataaaccaatgaacataggcaacacataaatcagtgagtgcagatgcatcactgtgttacaataaaactttatttacaaaaacaggcagtgtgcagaagtttgctgacctctgttgtagggaaaagtttttttatgtaaatataatacactgtataccaaactccagtaggaagttatgagttctggacctgcagctgtttactaactcttaaaaatatatacaaatcgcatagcttaaaaaaggaatggatcagtgactatctgtacatagtagagtctacatgttagtaataagttttgagtctgaaattctatgggaacaatacagactttgcttcccatctcttttgtggcccaaggttagttattttggttaagacagttaccaaaaggatctgtgtgagctcagaacttcgctgtgtcggagtgtattgtagacctcagctactagggggtggcattatccattatttaaatttccagggtggggcaaagtggctcatgcctgtaatcccacactttcggaggcagaggcgggcggattacctgaggtcaggagtttgagaccagctcggccaagatagtgaaaccctgtctccccaaaaatacaaaaattagccaggtgtggtggctggcgcctgtcatcccagctacttgggaggctgaggcaggagaatcacttgaacctagaaggtggagtttgcagtgagctaagattgcaccactgcactccagcctaggcgatagagtgagactctgtctcaaacaataaaaataagtttccttaatggctggctttcaggaacataggctatgaggtggagcaatttttggtaaagggggaatgctgaatggattttttatgtaccagcaaacatggtatattagcagttacagtgcaggaccctgtggaatgggccagggaaaaatgttgacattccttttccttttatttggcacccaagaaaacagtttggttgtttggtaccttgggttccagttttgtgctttgcctctggtcttccagaaatgggcaagtatagggctcagaactaaattcccaggggccgtttgtattctagatgatagaactggaaagatgttaggcttttagaaagaaccaaatattgctaaatgcatccaaactcgggataatgaagtcttggcaaagacctcaatcctcgtgacttgaatcaggcatttcaagttaatccaaaagtttgagttaactggtgccttcagtcaatttaacctcgagtttatcaagcagcttccaagtgacttgacccataaaagaccttgattttgaaagaaaaatatcttgctgacgtctctccaaaagtataaccgaatccatcctaattaaagattgatctggaagaggatccttgatgtattggagggtataataaaagcaaatggtgcaggagaaagaaaggcaattataaagttgggggtgggggagaagctgaacaacaacaaaggaaatgtaatcataggatacagtttgacacagaatatctaattaatgtcataaaaagggagttggcaaactgtttttgctaaagggtcagtagtaaacgttttagactttaaggaccagatggcctctgttgcaactactcaactctgttgcctagtgagaaagcagccatgagaaataaacaaggacatcagagcagctgtgtttcaataaaactttatttacaaaaacaacaggggaccagatttgccaacctgtgatataagccttatatattgattcaactaaaaatagctgggggtggctgggcacggtggctcacacctgtaatcccagcactttgggaggctgaggcgggtggatcacctgatgtcaggggttcaagactagactagccaacatgatgaaaccccgtctctactaaaaatacaacaaattacctgggcatggtggtgggtgcctgtaatcccagctactcgagaggcaggagaattgcttgaatccgggaggcagaggttgcagtgagcagccaatatcgcaccactgcactccaacctggacaaaggtgaaactccctctcaaaaaaaaaaaaaaaaatagctggaggaaaggaaaggtagtataagaaagctgcatttttgcctaccatagcaggaagtcactagatactatctaaacttgacatatccagaaatcgcctattacagcgattgtgctttgcctctggtcttccaataggccaaaagcacctgttacttttggcactgaggactggtttcctggaagaaaagttttccacagactgggcgggcagggttggggggatggtgtggggatgattcacgtgtattacatttactgtgcactttattattacattgtaatatacaatgaaataattatactagtcaccataatgtagaatcattgggagcttgttttcctgcagtcccatcggggggtgatgggggacagtgacagattatcaggcattagagtgttataaggagggcacatgtgcagctcacgatagggtttgcgctcctatgagaatctaatgctgctgctgatcttatgggaagcggagctcagacagtgatgcaagcgatgggcagcagctgcaaatagcggataaagcttcacttgctcacctgctgctcacctcctgctgtgtggcccagttcctaacatggaccggtactggtctatggcctatgggttggggaacccttggcctatgatatgtaatacataatggtatatacattataataggctagtatatatagcaagcctattgtacagagagatagtggtaactgccagataaaaagcagctaaaagagataaaagcaggtattatggagtaaggtagagttggagaagggatgtgacaggagaatgctatttttcattataaacctttggtagtaattgatttttaaaactcatgtgcctgtttgaatttgataaaaattttataaatacatgaataaggccaggtgcggtggctcacgtctgtaatcccagaactttgagaggccaaggtgggtggatcacctgaggtcaggagttcaagtctagtgtggtcaacatggtgaaaccccatctctactaaaaatacaaaatttagccgggcgtggtggcgggcgcctgtaatcccagctactcaggaggttgaggcaggagaatcgcttgaacctgggaggcggaggttgcagtgagccgagatcgcgccactgcactcctgcctggacgacagagtgagactccgtctcaaaaaaaaaaaaaaaaaaaaaagagtaaaggttgatctaactcttctgacagctttgtctctgaaggctgaaggcagggtgcctctagacaattgaggtaaaggcatcccttcctccaggtaaatgtaacttcgtgccagggattgtggcttagcaagcagaaccaaggctggatatcagctgcagtcactggagcagtgcacaacctgcaccgctgtgtaaggctggcagtggttggtgaggctgtctacgtgacgatgcgtgagggctttaaacggttcaagccttgataaagggaaaggaattatgatggcccagacccttgaccagatctcggtctcatgttgaaattagaagtatgtcttattgaccctgacctgtcttcctctccttctaggtgacttgcttttggagggcttcaacaactacaccttcctctccaatggctttgtgcccatcccagcagcccaggatgatgagatgttccaggaaaccgtggaggccatggcaatcatgggtttcagcgaggaggagcagctatgtaagcctcacaccttgagtctggagggtagcttgcctggataccagtggaacctgttaagaactcttctctggtcaggacagatttctgctctctgaattccccaccttccattaaaaaaaaaaaaaaaaaaggaggaaaatgaattttattctaggtggtttgtttgtgttgtagaaaagtggctgtataactagggttgcaagtaacccgagctggcttaaaccaaagggaaagtgactaactcagaatgttgagaagttcagggaggttaggcacagtggttcaggtctgtaatctcagcgctttgcggggccaaggtgggcggatcactttaggtcaggagttcgagaccaacctggtcaatttggtgaaaccctgtctctactaaaaatacaaaaaaaaaattagccagggctggtggtgcacacttgtagtcctagctactcaggaggctgaggtgggaggattgcttgaacccggaaggcagaggttgcagtgagccaagattacaccactccactccagcttgggagatggagctagactccatctcaaaaaaaaaaaaagttcaggaattcaagcttcaggtacagtgagatctaggtgttcaaaagatttttctagaacctaatttcttgtcttctatctctctcgactacattgtttctctataggatgcagtttgttgacagcaacatagctgggttccagcccttatattctttgggtttatgtccaaagaacagagtagattcccggcttaagttcctgaatggagtgtcattgactctgattggttggcttaggttgatatgcacattcctgagctatgcagcataggcagggttgtggaaagcgcagggtggtttcattatggtccctaagaatggattcttggagctgaaggtagagatgttggcctcatcaggaacatgtgggcagggtttaggggagggggagtgatcgaggcagtggatttactcaggcttttcctggaggggttgctctggtgatcaattgatattgatcaaaatcatccaaccaatggccaagaaacacactgggtcttgagaacaggacagctcagaaagaaattcttggtcgggacactgtgtttccagaaacgattttccttctgcgttagatgtgcctcagtgttgaaggttaatctctttcaggaacaccaggacagaactgtggaaagtttcccttccttcccacgcctacgcccgtttggagccccagaatagcactgaggttgctgaaatgctgcataaggggaggggcagctcctccgaagataacttggggtctggaaaattaggctgtatgggtcagttgacaaatggatggtgtatgtgggtcttggccagggtcccacatcagaatctagtgctgatagcctccttgtctgaatgacataggccctccaagaatgattcatttcatttgggacaggggtcagttttgcttctaatcttgcttttaaataacaatgaacaatggttaagtatttgctgtgtgccaggaatttaccaaatccttttttcttgatgtactacactgttcagtatagttttatttaaataataaaaaactggaacaggctgggcacagtggctcatgcctgtaatcccagcatttggagacactgaggcaagaggattgcttgagcccaggagttcgagaccagcctggataacacagtgagactctgtctctacaaaaaaaataaatagaaaaaaactggaacaaactaaaataggttgattaatagagggtttattaaatcattgtctgtccttgtgaaagaaaacaatgagaccatttaaattgttttgctgggcatggtggctcacgcctgtaattccagcactttgagaagccaaggcaggcagatcacttgagcttgagtttgagactaacctgggcaacatggcaagatcccttctctacaaataatacaaaaaattaactgggtgtggtggtgcacactgtagtcccagctacttgggagactgaggcaggaagattgcttgagcccaggaggtcgaagctgcagtgagccgagatcacaccactctgtcacctaggctggagtacggtggcgcagtctcagctcactgcaatctctgccttgcaggctcaagcagtcctcccagctcagcctctcaagtcgttgagactacagacatgtgctaccacgcctggctaatttttgattttagggtttttgttttgttttgtttgagatggaggcttgctattgtcacccaggctggagtgcagtggcacgacctcggctcactgcaacctctgcctcctgggttcaagcaattctcttggctgagcctcctgggtagctgggattataggcgcccaccaccatgccccactaattttttttgtatttttagtagatactgggtctcgccatgttggccaggctggtcttaaactcctgacctcagatgatccacccatcttggcctcccaaagtgctgggattgcaggcatgagccaccgtgcctggcctggggttttttgttttgttttggtttgatttttggaggggtgggtagagacaaggcttcaccatgttatccagtattctctggtcttgaactcctgggctcaaacaatcagcccaccttggcctcccaaagtgctgggattacaggcatgagccaccatgcccagtccccagtgttctcaatgtactttggcacttgtttcccctttaaccacagagaccagactccaggcccagcaccttcggcagccccaagcatctagctagaatttggtaatactgttttccttgtatttatatttataattgccatctatttatggcaagtgaagatgatttgtcactgaagatagagaaagttttctattaaaacaaatgtaaggaaagagaaggaagtaaatttaaagaaaatgattaagcaaataatggagcagatggtacacagagcaagcattcagacgatggcgtgcaaatgacgaactctcataggaaccaacttagtcctaaatgtacaccaaccccatttataaaccaagagctacttccaaaccctccatcaaggggcctatggagaagggggtgggtcaggcttcaggctggagcttcatgaggctccaagtgaccaggggacaccaggattttccccaccacattgggttctgcagccttgaactcctggcctcaagatatcctcatgcgccaccatgcctggcctggttatactgcttctaatgtattttgaagataaaaaataaaatcacctaaattgtccatcctgtgtatccctggtggtacacatgtctgatgttggaaagtcctgtttcttattcctcagcaagaagagaggtgtaaggccactgtaaaaaattagcacaaacttgatgccttaaaacaacaggaatttattctctcccagttctggaggccagggttctgaaatcagggtgtcggcaggagccgggcataatggctcatgcctgtaatcccagcactttgggaggccaaggcaagaggatcgtttgaggccaggagttcaagaccagcctgagcaacatagcaagaccccttctctactaaaaatttaaaaaaaaaaaatttttttttttttaaaagacaagatgttggcaggggttgttcctcctggaggcactgagggagatctgttccttgcctctgtcctggcttctggtggctctggctgttcctggcttttccttggcttgtctcactccagtctctgcctcatccttcatgtggcattctactctgtgggtcttctcttctgtccatcataaagacacttgacattaaatgtagggcccaccaggttaatccaagatgatctcatcttgagatcttgtacttgattccatctgcgaagaccgattttttccaaaataggccacgttcaggctgggcgcggtggttcacgcctgtagtcccagctctcagggaggcagaggcgggaggatagcttgagcccaggagttcgagacctgcctgggcaatatagtgagaccccggtatccacaaaaaggaaaaaaaaataaatgtaaccccccaaattaggccacattcacaggttccaggtggacatattttagaaagaccaacattcaacctaatataggtggcttccactctttatcacctactaggccaggcccttgctcagcatcttacaagacctaaacttcacgaagcaggtactactgttaccatctccgttttgcagatagggaaactgaggctcatgggacttattgagactcatgtagagtctctatcctctattcatccatgattcatccatcaatccatcctctatcatccatctatcctctactcatccttccatcacccatccatccatcacccatccgtccatccatctacccacccatccatccatgaacccatcctctatacatttatacattcatccatccattcaccctccatctgccatccatccatctccctccctccccatgtgtatctggacccggaactaggatttggaaattcagagataatgagatttataagaagcaaagctgggatttgaactcaggactctctaactgcagagcgcgtgctttgcaccagcacaccaggatgctgccagccgtcaccacccttgctgtgttgtgtctcctcactggtttacttctttgctgtctgctaattctgccccaaggttcatctcttatggcctgggagtggtggcattcttttgtcatttctggaattacatttaactataccagaaagtgcaaaccaatggttcctgagcccacaggagagatcggccactacaaccttcaaaatttttagaaattggttcctaaagtttaaatatgggtaggccgggcactgtggcctataatcccaaccctatgggaggccaaggcacatggatcacttgaagtcaggagtttgagaccagcctggccaacatggtgaaactccgtctctactaaaaatagaaaaattagccgggtgtggtggcacacgcctgtaatcccagctactctggaggctgaggcaggagaattcccctgaacctgggaagcgcagaggttgcagtgagccgagattgcaccaatgcactccaacctgggtgacagcaagactcagtctcacacacacacacacacacacacacacacacacacacacacacaccaaaaaacatgggtacacttcacataaaaactctgggtttccattatctagaaaaatcagaagttccagcaacacttggcttatatcccctgtggcaatgacggagtagctgctggccccttcagatgggtttgtggcctccttgggtccccacagtcctcattagttggctttgttcatttagaccagtggttctctgccagaggtgagtttgcctcccaggggacattgagtagtatctggtgacatttgtggttgtcacaactctgtcagggtaaccaccactgacatctagtggttagaggccagggatgctactaaacttcccatgatacccaggacagctccccacaatagagaattatctggcccccaatttctgcagtgacaagattgagaaaccctgagttggccggctcgcctgggctgtgcaggcatttcaggaatctttagtttaaattgacacttttaaaactgtgagtgcaactcttcatagtttacaaagactctttcatagatgttatggttaaaaggaagtgtgtttccaagccctgtcaacagcagcttcattcattttggggagaaggctttctaccatagtaagtgggagcaaatggatgggtggtcagcagctgggtccttttgctgagctgggccagggaccccatggcgtgagaatagctgttgtgaagggccttgtaatgtctggtttggcctgaggaaccagagaagtctgggatctctaggctttgttcctggaacatagtgactgatttgaagccagaactctgggtgatttgtacctgagttaagctaagccaagaatttgcattaatcatcatccatccattcatccatctaccatccatccatcatctgtccatccatccattcatccatccatcatccatccatcaatgctgtatccattcctccatcaattctccatccatctatccatcgtctatccatcaatcctctgtccattccatctatccatctatcctctatccatccatccatcatccgtctatcctctatccatgaattattcatccatcaatccatcctctattcatccatctatcctctactcatccgtccatcattcacccattcatctacccacccatccatccatccgtccattcatccatgaacccatcctctatccatttattcattcatccatccatccaccttccacctaccatccatccatctctctccctccctcccatgtgtatcaggaccttggaataggctttggaaattcaaagatgattagggcaggccctccactctccagaaactcatggtcttatggggatttcagacatagaaactattttaacagtaacatggcctgagtatggagtcagaaaggttccaagtattctgggaacacagcgtttttgtttggagacacctggacaacaagtggaaacaaatgtatatcttcttcatcccaacatgggcatctgttacacccagaagagtatgtaagaagcacagggtttttatttcaaaaatccttttattgacatatgatttacatggagaaaattgtgtatgccatagcgtgcagtgcaaagaattattataaactgaacacgtctgtgtaactagaatccattttaaataagacaatgccaccagccccatggaagctcccacatgcaccttctaagaacttccctcaattaaggataatcattatcctgacttctaacagcatcgattagttttgcctcttcttgaatggacggtctatatatggacttagacagtatgttcttgtttccatctgtcctcttttgttcggtatttgtgtctggaagatatgtcagggttttttttttgttttagagacaggatctccctacattgcccaggctgtatcaagctcctggcttcaagcagttctcccacctcagcctcccaaagtgctggggtcgcaggcatgagtcactatgctggccccaatacatcagttttgatttgtggtagttgtagctcattcattctcactgttctgtggcaggggttgctaacacatttttctgtaaagggtcagatagtaaattctttagcctttgtaggccagacgatctttgttgcaactcattaactctgccagtgtagcatgcaaatagttacagacaatatgtaaatgaatgagtatagctgttttccactaaaactttatgtataatagcaagcagtgggccagatttggtccatgggctgtaatttgccagtccctgctgcgtggcattccattgtaatgcaaggttttaagcaaccatatgaaaatattgagctcagaatctagtttcttcagaggaaagatgtaagctggctctgggtccccagtggctttaggctccaaaactccagggtaccttggcattgacctttgtgtctgctctgcccttctctccccacctcagccatattgaaggtggtatcatcggtcctgcagcttggaaatatcgtcttcaagaaggaaagaaacacagaccaggcgtccatgccagataacacaggtacttgccactttttcctgatgaccaatgactttggggttgggggggtgggggaggtgacatttaaccactggttatttttcaaggtgaaggtatctgggattttaacaacagttggactaggttcttatcactcactttttcaaacttttcagtgctcaagaccctatgtggaaagttattgaatcagagcgcagggattaaaaaaaaacaaacctaatagttttatttatttgttcttttttttaaatacaaaattttacaagttttaatagagacgaggtctcgctgtgttgcccaagctgatcttgaactcctgagctcaagtgatcctcccaccttggcctcccaaaatgctgggattacaggcaagagtcatcacgtcctacccctaatagtgaccagacaagatcccgagggaccatctcttctaaaataccccacttaattgttttgttaaagaaatatttctcaagcccctgcaatatgccactgggatacagcaggaaatgacacaagaatagctcttcttacggtatctgtggtcgtcttggggagacagacctcaattgccctgagaattaggggtgccagataaaatacaggatgtccagataaatttcaattttaggtaaacaacaaacctttttttaaattttaattatgtcccttgtaacatttggaccgtgattataccaaaagagtattcttgtttatctgaaattcaggtttaactgagcatcctgtaattttccccctaaatctgataaacctacccacaaataaacagtattttgtgttttgagaagctggcctggctaccactatgcttgttggtggctgagctgagagcaaaacttaggtttcttatttcccagcccaggctgtatattgtgttgctttttcccgctccctagagcccaccttgatcaaacctgttgcaaccgcttactgggtttaccttgcccacagcctagacagagccaattaatcaagacaggggaattgcgatagagtaagagtaactcacgcagagccggctgcatgggagaacagagttttattattactcaaatcaatctccttgagcattcgtggatcagagtttttaagcataatgtggttagggggaggccagtgagttgggggtgctgattggttgggtcagagatgaaattacagggagtcgaagctgtcctcttgccctgagtcagttcctggacagaggccataagatcagatgagccagtttctcgatctgggtggtgtcagctgatccacctggtgccagggtccgcaaaaatatctcaagtactggtcttaggttttacaatagtgatgttatccccaggagcaatttagggagggtcagactcttgtagcctccagttacaggactcctaaaccataatttcaaacctttgggctaatttgttattcctacaaaggcagtctagtctccaggcaagaagggggtttgttttgggaaagggttcttgtgttttaaactataaactaagaggctaggcgtggtggctcatgcctgtaatcctaggattttgggaggcccaggcaggtggatcacttgaagtcaggagttcaagaccagcctcgccaacatggtgaaaccccatctctactaaaaatacaaaaattagccaggcgtagtggcaggcgcctgtaatcccagctactcaggaggctgaggcaggagaactgcttgaacgcaggaggcggagattgcagtgcgccgagattgtgccactgcactccagcctgggtaacagagtgagactctgtgtccaaaacataaaaaataaactataaactaagttcctgccaagttaattcggcttacacccacaaatggttcagtggagcttggaggttagaagcaaggtggagtccgttaggtcagatcttgttcagtgtctcagttataattttgcagtggcagtttcattctcaggtgtttgttatgtattagagtccctaaatctggcaaattaatggaatccggatgccaaggaaagacctcagggaaagagaaatgaaaaagtgctcttgccaagagatggggaaaaaaaaatcctaaaatcactctatttactctgccttgcacatgcaaagcagcatgtaatgctattttcatgttaagggaccagctcgtggtcacaccactgcacttcagcccgggcgacaggaagactgcatctcaaaataaaagaagagcatttaggttgactctagcattttgctattgcaaacaatgctgcaacacatatcctagaagggtgaaagaaatatttattgaacagtaactgttcaataaatgttactattaataactatttaatacttactaagtaactgttaaataaatctcaagggccagtggctcacgcctgtaatcccagcacttagggaggccgaggtgggcggattgcctgagttcaggacttcgagaccagcctgggcaacacggtgtaactccatctcaactaaaatacaaaagaaattagctgggtgtggtggcaggcacctataatgccagctactcgggaggctgaggcaggagaattgcttgaacccggaaggcggaggttgcagtgagctgagatcgcgccactgcactccagcctgggcgacagagcgagactctgtctccaaaaataaataaataaataaacaaataaataaataaataaatctatctatctcagggactttacatactttaccttatttagtcctgggtaccaacaaggtaccgaagagctgaccctttttaaagctgagaaaagcaagatgctgggagggtaaagagcttttccaaagtcacatgacttggaagtgtgaagggacagggacttgaaactagaactacctgaccctaaacccccaactggggcctgcttcagcccaccccaatcattgcctctcagcaaaatactggggagtgtgaccactaatgacagcagcctttaggacacttcaagctatattcatggtcagcgggtcccatttccccaagagaacccgctgtattcacagatcacaaatatcccatgcgatgtgtcttcttgccaagctatttcttttgtgatgcactcacgatgtttcttttctccatccagctgctcagaaagtttgccacctcatgggaattaatgtgacagatttcaccagatccatcctcactcctcgtatcaaggttgggcgagatgtggtacagaaagctcagacaaaagaacaggtaatgatgtacttatcacttatccatccatgcacccacccatccatccattcatccatctatccacctgttcactcattcatgtattcattaatccattcacccatggtctgcctctgcatctgtccatccatccatctttctacccactcattcatctgtctgttcatccatccatccatccatccattcatctgcccatctatctgctcacccatcatctctccatccctcactcatccatctgtccatccatccatgacccagccatctgtccatctgtccgtccatccatcacccatccagctgtcattccattcattcattcattcattcatctgtccatgcatccacccatccatctctttatccctcatttattcaatactagaatattcacagtcccatgtcaggttttgtttgtttgtttgttttttgtttttgagccagagccttgctctgttgcccaggggggggtgcagtggtgccatcgcagctcactgtagcctctgcctcccagattcaaacgattctcctgcctcagtcccccaagcagctgggactacaggcatgcaccacaacgcctggctaatttttgtatttttagtagagaagggtttttgccttgttggtcaggctggtcttgaactcccgacctcaagtgacccacctgcctcggcctcccaaagtgctgggattacagtgtgagtcactgcacccggccaagaataaaaatcttcaccaccagcctggcttatgtgaaaatggagcccattgagaataaccgggttcccctggttgccctctgcaggctgactttgctgtagaggctttggccaaggcaacatatgagcgccttttccgctggatactcacccgcgtgaacaaagccctggacaagacccatcggcaaggggcttccttcctggggatcctggatatagctggatttgagatctttgaggtacagctcggtgggatcctaagagccatggtcttggttgtctgagatgggctttttcttggaggagtcatgattttggagaaaggcatgtagatggctactgtagggtaggaggctgtctagttaagggtggatcattgagggtataagagacagaaatccaacaggaaatgcattggtttctggaactgagaaggccagacatgtagctggatcccgtaggcagggtctgatctcccgccatcgttctctctctctctctgccttcctccatattggctccattctcaagcaggctctcccctcacgggggcaagatggctgccacagctccagactgcctctcagtaatcctggtaaaaaaaaaaaaaaaaaaaaagcacatatctcttttctaacagttccaaccaaaatcttggaattaagtctcactgactcttactcacctgaattgggctacatggtcacctccaagccaagaactgtttgcaggagcttgcaatacctcatgtagtagaaacatggatattggatcctttacccatgggtttgaagaaagttctcagagaaagggaaggttttttttttgtcttgtcttgtttttttttttttgagacagagtcttgctctgtcgcccagactggaatgcagtgtcacaattttgtctcactgctgcctccgcctcctgggttcaagcaattctcttgtctcagcctcctgagtagctgggactacaggagtgtaccactgtgcccagctaattttttttttttttttagacagagtctcgctctgttgcccaggccggagtgcagtagtgcaatcttggctcaccgcaacctccgcctcccaggttcaagtgattctcctgcctcagcctctcgagtagctgggattagtgccaccatgcctggctacttttttttttttttttggtagagacagagtttcaccctgttggccaggctagtctcaaactcctgatctcaaatgatccaccagcctcggcctcccaaagtgctgggattacaggtatgagccactgtgcttggccaatttttgtatttttagtggagagaggtttcgctatgcttgccaggctggtcgcaaactcctgacctcaagtgatcctcccgccttggcctccctaagtgctgggattacaatcatgagcactacacccagccaggaggttttaagattgatagatgtcccgaaagaagtgtactaccgagtcactttctctctgcgcctctgttttcacatctgtaaaatgtttccacatctgtacatgcagtagcgtgccttacgaggtttgtccatccatagatggttgtgcagatggaggagataagcatctttaaggtgtgtgagggccatgtgatatcaacttcaccagccctggtggactctaggcagcatgttttggggcctcagccctgtctgggtgctgggatggcagaacaggatgtgggcgggccatgggggcgctgtcgggtggagcttctgtggggctccttgtcttctgacttcataccaagatgctcacgccccgcccccacgccatgtgctcaggtgaactccttcgagcagctgtgcatcaactacaccaacgagaagctgcagcagctcttcaaccacaccatgttcatcctggagcaggaggagtaccagcgcgagggcatcgagtggaacttcatcgactttgggctggacctacagccctgcatcgagctcatcgagcgaccggtgaggggcacgtgggcgtgcggggctccgtcacaccttgtacacgtgtgtggcctctgtggagccgacgtggaccccacactctccccatgcacatagcattcccccacccaatccatcacccagtcctgaaaggctgtaagctgaatccttgtgaactcttacaatttccattaacccacattttcatatcaaaggtattttctttaatttctgccttccttccatcctcttttttcttcctttttttcttccctaccctctttcccttccctttccttctctgccattgctttttttttttttttttttttttttatgacatggtctgactctgttgcccaggctggagtgcagtggcacaatcttgcctcactgcaacctccacctccctgcctcaagtgatcctcccgcctcagcctcccaagtggctgagactacaggcgtgcaccaccacgcccacctaacttttgtattttcagtagagacagggtttctactaattagccgggcctggtggtgcacgcctgtggtcccagctatttgggaggctgaggtgggaggattgcttgagccctggaggcagaggttgctgtaagccgagattgcgccactgcattccagcctggataacagagtgagaccctgtctccaaaaaaaacttttctaacaggaaccctaggtgaattcaagtcaagcaacaaattcatttgcaagaattatgaactcggccgggcgcggtggctcatgcctgtaatcccagcactttgggaggccgaggcgggcggatcacgaggtcaggagatggagaccatcctggctaacacggtgaaaccccgcctctactaaaaatagaaaaaatcagccgggcgccgtggcaggcgcctgtagtcccagctactcgggaggctgaggcaggagaatggcgtgaacccaggaagcggagcttgcagtgagtcgagatcgcgccactgcaccgtctgcctgggcgacaaggcaaaactctgtctcaaaaaaaaaaaaaaaaaaaaaagagttatgaactcttcatgatgttgcctgcgtgttgcccactagggggcggcagcaaacattatgttctgccttccatccctgttactggtccattgggcacagggtaatttgaaggtagatttggaagcatgggggtcataaactcatctttatatgtgggcaaatacagtatcagatctcggcggatgcccatgcgttgtgtatagttggccagctcttcatggaatgcctgaggttgggtgttctctctgattcaagccctacttgtctcccacagaacaaccctccaggtgtgctggccctgctggacgaggaatgctggttccccaaagccacggacaagtctttcgtggagaagctgtgcacggagcagggcagccaccccaagttccagaagcccaagcagctcaaggacaagactgagttctccatcatccattatgctgggaaggtaccagccacagggcccaggggactctgtctcaggggacccccagtggctgctcagcgcagagacagtctgagagtggcagaaccttgggctgcctggaaactgcaaagccatctgctgctaagcgaatcccaaccaagtcctattcgtaatttgtctacgcatctgtaaggcatcagctgtagccactctcatgttttccaaccgtgacgtccagacagttatttctttctgtttttgttggagacagggtctcgctttgtcgcccaggctggagtgcagtggtgcgatcatagctcactacagcctcaacctcctgggctcacacgatcctcctgcctcagcttcccaagtagctgggactacaggtgtacaccaccatgcccagctaaaatcttttttcctttttgagatggaattttgctcttgtcatccaggctggagtgcaatggcgtgatctctgctaactgcaacctctccctccgggttcaagagattctcctgcctcagcctcccaaatagctgggattacaggcacctgccaccacacccagctaatttttgtatttttagtagagaagggtttcgccatgttggccaggctggtctcaaactcctgacctcaggtgatccacccgcctcggcctcccaaggtgctaggattacaggcatgagccaccgtgcctggccgcccagctaaatttttaaattatgtatagatatggggtcttgctgtgttgcccaggctggtcttgaattcctgggctcaagagatctccctgcctcggcttcctgaagtgctgggattatgagcacgagccactgtacctggcctcagcctgcttttcttgtatagactctaaatccttcctgctacaagttatacccaacaggcggggccaactggaatggggtgactaatacatccacacctggcttcaacaaaaatctcccatgtcacggtcttgagtttgctattgccagcctgctctggccagggaaatctatgatagttgtattcatcatcatcatcatcatcatcaacatgccttggctgttattgtataggcccttgccctgtggctctcaagagtcctggataatgtacaaaggacatagcttagtctggcttgcagaattgtagtattctattgactcctcagtacctccactgcatcatgggcacaaacaatgctctctaccagggcctggcaacagagtccgatctggcccacagcttgttattgtaaataaagttttattggaacacagccatgcccatttgtatgcataatgtctatggctggctgcttttgtatactacagtgctagagttgagtagctgcgacaaagactgtatgacttggctgggtgtggtggctcacgcctgtaaccccagcaccaaggcaggtggattacttgaggtcagcagtttgagaccagcctggccaacatggcgaaagcccgtctctgctaaaaataaaaaataaaaaaaatttaaaaattagccagctgtgagattacaggcacacaactgtaacctcagctactcaggaggctgaggcaagagaactgcttgacccaggaagttggaggttgcagtgagctgagactgcaccactgcactccagactgggcaacagagaaccactctgtctcaaaaaccaaaacaaacaaacaaacaaaacattgtatgacttgccaagccaaaaatatctactatctgggccttcaccaaaagtttcccaactcctagcctatattcaagggggtatatgttcctttaagcatatagagacaacacttttcttttccctacttcatcagtggattttttttattattattttcagtcttctctcagatcaagcctacctattatcctgataacccacatcccatgataacccagcaaagctgtattatcagttcctttcatttaatattcaccatagtaaaaattacggctttgggcattgtcattgtttgagtcaggaatgtaaaaagcctatatgtcctttttctgtatatccatatatcaggatctctgagttacaaattatgctcattagagagtggaaaataggatgccatgcttaattaatttatttatttaattattttgagacagagtctcactctgtcacccaggctggagttcagtggcgcaatctcagctcactgcaatctccgcctcccaggctgaagcgattctcctgcctcagcctcccgagtagctggcattacaggtgtgcaccaccatgcctggctaattttttttttttttttgtatttttagtagacatggggtttcaccatgttggtcaggttggtcttgaacgcctgacctcaaatgatccacccaccttggccttccacagtgctgggattaccagtgtgaaccaccacgcttggctgccatgcttaatttctaaaccaggatgattgggaagatgatgaggggggagttttgcatgtcggcaggagggcatctgccgtcatgaaatctcttaatagtgtataactcacaggtactgtgctggcttaggaggagggaggctaccacagcagcgttagtaggagaatatggaatggaaactaggctttcccagcaatggctatcactggctgatgtcctactacgtgggcacaggtccctgggctgttggtctcttcactggtgtttgtggagtcccatcatggtggtcataaacgtcatttcctctctgacctcagaagatctggaaggacaatgggagggctggggtcctggccttggtttctaagtttctagtttcccaggggttctgaccagcagggtgtccttggcaggtggactataatgcgagtgcctggctgaccaagaatatggacccgctgaatgacaacgtgacttccctgctcaatgcctcctccgacaagtttgtggccgacctgtggaaggacggtaaggccttctctgctcgggtccatgttctgctttgagctggagaattgaacacccaagtcccccgactctcacacctgccccaggaggggaggcctttacatgggggcaggggaaggaagagcattggcatgggctggtgatgtctcgttgaaacaatttcttcctgagtgggggtccctgagcccctcaatcctacatgtcccgaggggattgaggtcctgaggtcagggctcaggcaatagaggagaaacagcatgccaggcacggggagttagactgccctgtccagagtcagaaggacttcactgtatcttgtctctgccacctcctagctctgtggtcttggatgagtcacttgatgtcattaagcttcattgtcctcattagtaaaacaggagatgcaataatagttgccgtctctactagaggtattatgagggttaaattagaccagtgatgctcaaactcaagcaggcatcatgaccccctggaaggctttgtttatttatttagggacagagtcttgctttgtcacccaggctggagggcggtggtgcaatcttggctcactgcagcctccaccttctgggttccagtgattttcctgcctcagcctcccaagtagctagcattacaggcacacaccaccatacctggctaatttttgtatttttagtagagacggggttcccccatgttggccaggctggtctcaaactcctgacctcaggtgatccgcccacctcagcctcaaaaagtgctgggattacaggtgtgagccactgcacctggccctctttggagggctttttaaaacccagatggctgggcctaccctaagatctaattctgcaggtctggggccagggatggggcgggcctgaaaacattcatcccaggtgatgctgctggtctagggaccacactccggctccctttgagaaccagtgaatagatgatccctgtgaagagctgctggagtgatgatgaggggagggggtttgctgtttgtccctggccatcagtgtccacagcaggttttattcttggcacagggcccatgggcctggggcttacaggactggtctccccttgttttaagcatgctaaaaaaagggctccaggaggggccagctgtgccctaaccatatgccaggctctgggcctagggaacaacatcgcaccctgggtctgtgtcatcccaggacacatgatgaagcctgtagtccctcctctgcgggacccacagtcttgtgggagagatgagactctcaaagacaagcagagagacaagcatgaggctgcgcatggtggctcacacctgtaatctcagcactttgggaggctgaggcaggaggatcagttgaggtcaagagttcgagaccagtctggccaacgtggcgaaaccccatctctactaaaaatacaaaaactaactgggcgtggtggtggtaatcccagctactcgggaggctgaggcaggagaactgcttgaacctgggaggcgcaggttgcagtgagctgagattgtgccattggactccagcctgggcaaaagagcaagactctgtcttgaaaaaataaaactaaaaataaaaaataaaaacaaaattagccgggtgtgctggtgggtgcctgtaatcccagctactcaggaggctaaggcaggagaatcacctgaacctgggtggtgaaggttgcagtgagccaagatcgtgccactgctctccagctgggcgacagagtgagagcttgtctcaaaaaaaaaaaaaaaaaaaaaagattgttacacagaatctgagtagaaggtgaagaaatggtgccatccatggcctgtgggttgggcttggcatgtgcaggacctgctgggctggtagaaaaagaaccttggaggtgatgatgatgatgatgatgatgatgatgatgatggccgggcgcggtagctcacgcctgtaatcccagcacattgggaggccaaggcaggggaatcacctgaggtcaggagttcgagaccagcctgaccaacatggagaaactctgtctctactaaaaatataaaaaaaatgagccgggcgtggtggcgcatgcctgtaatcccagctactgggaggctgaggcgggagaattgctggaacccgggaggcggacgttgtggtgagccgagatcacgccattgcactccagcctggccaacaagagtgaaactccgtctcaataaaataaaataatgataataataataataataataataataataataataataatacctactttttgttgagcacttactgatgtgccaggctatctcggagtgtgtgctgtatcttctgcctcagaatatttcttccgtggatacctacatggttacccactcatttcttgctggtttctgctcaaatatcaacttagcagagcccaccacctccttgtctaagagagcaccctcttcactctctctccgctttaccctatttttatttttctacgcacacctcactactcaagatattccatacttaacatctgtgatctctgtctgtctccttccctgtgatataagcggggtgagggggccgggtctttttttgttcacagcagtgtccccagggcctggagcacagaaggtcctcaataactatttgttggtggatgaaagattggaggctggcagggaataagtgccttctgtgccttatttttttttacccctgccctagaaggtagacggtattattacctcccttttgtagaaagggagactgaggcacaggatagtgccaagccaaggctagtcagtgagtggacagcgagagcaggcttgactcctaggtcagcgtgactccatcacagggaatttgttctttctgccactcaggtgctctcaggatttccccaatagacaatacttggaaaccctgactgccgaaggaggcgttggtgatggaaggaaagattggagtgggcaggttggtgggtggggctggggctgagcctctggcctatttaggggtgggtgggccagaggctgatgccaccctggctgtgccccatagtggaccgcatcgtgggcctggaccagatggccaagatgacggagagctcgctgcccagcgcctccaagaccaagaagggcatgttccgcacagtggggcagctgtacaaggagcagctgggcaagctgatgaccacgctacgcaacaccacgcccaacttcgtgcgctgcatcatccccaaccacgagaagagggtgaggcccgccgcccagaccctggggctcccagaagccagggctgtcccaagcggtcacagcgtccccagggcgccctctgcccccacctaccccgaggaccccattttccatgtggggaaggctatctgaatctcagacccattccccatccctggaggaaaaggaggaagggaggatgcatccagagacttttcagttgtggagttgctgtgcaggtcatccagccactcattcattcattatcccaggaagtattcactgggctctgccctgtcctgggtgctggggagcagtgttagaaaaattgtagcccttccctgtgggtttctcataatctggtgcaggcatcttcagcttggggcgattgtgtcctctatatggacatgctacagacatttttggttgtcacaaccaggagggggctgttagtcagcatctagtgggtaggggccagggatgccctaagcattgtacaatgcacaggatggtccctcaacccccagcacagaatccctacaagatgccagtagtgctgaggttatgggagacacggggagaggtaaacatacagctgatgatggtgatggaatgtggtcagttaggagaacaccaaagagccagggctcctcccacagcctcaggactcagagaaagcttctggtgaacttgaacgttaagaatgtgtggccatcaacttggtgacatggaaggcagggtggggcctaggataagcagggggcctaggataagcagagggcccaggctaagcaagagtgtggaggtgagaagtgaaggaactaggtaagaaaatgctagatagtgtccaggcgtgttgctcacgcctgtaatcccagctactcaggaggctgagaaacaaaaatctgttgaacccaggaggcggaggttgcagtgagctgagattgcaccacagcattccagcctgggcagcagagcgagactccatcttaaaaaaaaaaaaaaaaaaggaaagaaaatgctaaataggtcatttcatgttgcaaatgtgtgatggcatgaggtaggaatcagatggtgtgaggtaggattgaggctgaatgggtaggcaggggctagatcgtggtgctccttgtgttctttctggagcttggccttctctctctaggcatgccattgggggtgttaaagcagggctatatcatggtcagatttacattttaggaagtgaatgagggggctgggcatatgctagctcatgcctataatcccaacactttgggaggttgaggtgggaggatcacttgagaccaggtgttcaaggctagcctgggcaacatagcaagaccctatatctacaaaaacatttttaaaaattttccaggcatggtagcacatacctgtggtcccaaatacttgggaggctgatttgggaggatcacttgagcccaggagtttgaggctgcagtgagccatgatcgcaccactggactccagcctggctgacagaatgggaccctatctcaaaaaataaaaaggacaaagggattgaggggagaggcaagaccagagagagagaccaggtgggtggtttctgtggttgtccaggcaggagaagatagtggagacaatggtggtgaagagaagtgggggggttgggagatatttgggagctagaagcaatcaaactgctgatggacaggaagtgagggagacgaggtgatgaggaggaagccccaggttccagccaggcgatgctagtgtcaccaagaaccagagagatcatgaggcagccattgccgaagcaaagagatgaaaacccagaggggggcactgctttgcccctcggccctcagctaagccctccttgggtgcttctgttggtaccctcatggcctggccaggtgggtcatccaggtaggaggtttggggctttgctgcgccatggtttctggccccagggatccactgccctctttgacctttgcagtccggcaagctggatgcgttcctggtgctggagcagctgcggtgcaatggggtgctggaaggcattcgcatctgccggcagggcttccccaaccggatcgtcttccaggagttccgccaacggtaagtcccaaggtctggcccaggtagggcagggggtgagcgggactgggtggaggaatggatgctggaggtacccggggtgacttctgctctgtgtttcaagctacgagatcctggcggcgaatgccatccccaaaggcttcatggacgggaagcaggcctgcattctcatggtgagcccagaagtccaccagagacctcccaacctctggccgcaagccacctgctgctcttggtgggaccgttcttacccatgtcatcactggccaaatggcacagtggaaatcaggagctcttcctttccttccttttgcagatcaaagccctggaacttgaccccaacttatacaggatagggcagagcaaaatcttcttccgaactggcgtcctggcccacctagaggaggagcgagatttgaagatcaccgatgtcatcatggccttccaggcgatgtgtcgtggctacttggccagaaagtaaagatgctttcctgcatcctaatacctcaaacgcgaatcacaaacaggggcctttctgttctgattccctgattctaagaggccacctgtttaagatgcatcattgactgaatgacagccttttcttgaaggggaagaaatgcttctactttaaataaatgtaccaagttacgagtgcaggaagggaacgagttttagacctgggttctcatcgtggatgccccagtttttgctgatgaaccttgggcaagttactctacctctctgagcttccagttttttagctggaaactgagcataatcattttgacctcagagagctgttcatgaggtgtcactaagataacgcatgacgagagcttagaacagtgcgtggttctcaggtcagaaatgattgttgttgtttttacctccctccctcactccttccttccctccctcccttccttccttcctttcttcttcctttttgagacagagtctctctctctctctctgtcgcccaggctggagtgcagtggcgcagtctcaactcactgcaacctctgcctcttggactcaagcaattctcgtgtctgagcctcccgagtggctggaattagaggcgcccaccaccacactggcctaatttttgtatttttagtagagacaaagtttcaccatgttggccaggctggtctcaaattcctggtctcaagtgatccacctgccttggcctcccaaagtgctgggattataggcatgacccactgcgcccagcctagacatgttagaattggataaaccattgaggaaagaggacttgacggtgtctagatccccgtgtcccagtgggatttataaggcagggttttggagggtgtgatgtcccagctgttctgtgaagactgggagccggggaagggttcgggttccttaatgaaagtcataccccagggactgcagggacaggtggggtcgctctctgtctggggtgtgtgttgtcattgggcagagaccacaccctcaccagtaggaccctgatgtgtcaggttcattcattgacacatggacccaagatggtcaaggccagctttgggagctcttggccctcccgcaacagacctaacttgtcaagtttcgttactaagttccctgttgctgtccttcctggataactggggcaattttattcttaaagttttcctgtgtccaagatggcagccaagcagggaagacagaattacgttcactgttctatcgtttctcaatctatcgatagcccttaaacgggaagagtgctggttcagggtcacagtgtgaaattcctaaaacaacccaggagagaataggtttgacagggctgggtgtggtagctgacacctgtaatcccaggcactttgggaggccgaggcaggaggattgcttgagcccaggagtttgagaccagcctgggcaacatggcgagacccctatctctaccaaaaaaaaaaaactttaaaaattagctgggcatggtagcatgtgcccgtagtcccaactacttgggaggctgaggcaggaggatcatttaagcccaggaatttgaggctgcagtgagccatcatcacaccactgcactccagcctgggccgcagagccagaccctgtctctgaaaataaacaaataaataaataagttagtcagaaacagctggtgtaggctgggcatggtggctcctacctgtaatcccagcactttgggaggccaaggtgggtggatcacctgaggtcaggagtttgagacccacctggccaacatgggaaaccccatctctactaaaaatacaaaaattagccaggcatggttgtgggcacctgtaatccaagctactcaggaggctgaagcaggagaatcacttgaaccccggaggtggagtttgcagtgagctgagatcgtgccaccgcactccagcctgggcaacaagagcgaaactctatctcaaaaaaaaaaaaaaaaaaaaaagaaagaaagaaaaaagaaacagctagtgcagctggggagtacgggagcccccttaggaatgatgcacatagttgtgttttctgagtggtgtttggatctcagctaagtccagggcatgttgtgagccctgggtcttccttgtccactgaaaaaggctctgtcctgtagatgatttaagttgtttgcagccagacaacacatgtgtcacacagggtttctggaagaacctgagttggggagattggggcatgtccctgtgcaggttcaggatgctgcagggcagggctctgttgacagcagggtgtggcttcatgacccccgcaccttctcttcccccctccctagggcttttgccaagaggcagcagcagctgaccgccatgaaggtgattcagaggaactgcgccgcctacctcaagctgcggaactggcagtggtggaggcttttcaccaaagtgagtgctctgccccagcccccttcccaggggcccccagccctgcttcttcactctggagccttcacatttgggacaggaggtggtcgcaagtgggtgtggaatggagggctcgaactcagaccttgagcattggcggttctctggcccgaggaggccctgtcctttggcacataggctatagccaggaccttaacacaaagtattaatatttccatccgcactggaatccctcgtgtggcccatttatagccacacccacttcctccgtagccatggaaaccactctgttctccagttctgtaattttgatggttcaagaatgctgccgggggcggcggctcacgcctgtaatcccagcactttgggaggccgaggcaggcggatcacttgcggtcaggagttcaaaaccagcctggccaacatggcaaaaccctgtctctacttaaaatacaaaaattagctgggtatggtggcaggcacctgtaatcccagatactcaggaggctaaggcaggagaatctcttgaactcaggagacagaggttgcagtgagccaagatcatgcctgcactccagcctgggtgaaagattgagactctgtctcttctttctttttttttttatttaaaaaaaaggccaggcacggtggctcacggctgtaatcccagcactttgggaggccgaggcgggtggatcacaaagtcaagaaatcaagaccatcctggccaagatggtgaaaccctgtctctactaaatgtacaaaaattagctgggcgtggtggcaaacgcctgtagtcacagctactcaggaggctgaggcaagagaatcacttgaacctgggaggcagaggttgcagagagctgagatcgcgccactgtactgcactccagcctggtgacagagcgagactccgtctcaaaaaaaaataaaacaaatattctatacatggaattagagagcatccagactgttgcatgtatcaatactgcaggtttttttttttttactttttgcattttttgaaatggagtctcactctgttacccaggctggtcttgaactcctgacctcaagcaaccctcctgcttcaggctcccaaagtgctgggattacaggcatgagccacctcatctggccatagcatattattttttatttctggcagagtcagggcctccagaggactcaactggttcctgtagtggcactggttgcattgtccccatggcacaaagacatgctctgttgcaatagactaggcttctccttatatgcccttgagtgtatccactggtgcaaggctttttcaccaagcaaacagacattgagtgcctgctgtatcccaggcacatgctaggtgctgggggtgcagctgtgaacacacaccatggtccctgacctccatgaatattctagccgaattggtggggagtaaacaataaacagataatcacagagacagatacataatggcaaactgtgataagtgcatgaagcaagctgctggagtacatagcaggggcttccttgtgccaggcaggggcttgaaaacaaagagttaggaggcagcccagggaaggacagcagatgctgctttttggaaatgttcgtccccactgaaccaacttctgaaaaactatcctaagaaaatcgtcttagccaggtgtggtggctcatgcctgtaatcccagcactttgggtggccaaggcaggaggatcacctgggttcacgagttcgaaaccagcctggccaacatggcgaaaccctatctctactgaaaatacaaaaattagccaggtgtggtggtgggcacctgtaatcccagctactcaggagattgaggcaggagaatcacttgaaccgaggaggcagaggtttcagtgagctgagatcgtgccactgcactccagcctgggtgacagggcgagactccacctgaaaaagagaaaagaaaatcaagagttaagggcattcattatggccttatttacaatagcagaatttcagtgtccagtcctagctgaatgatgagttcaataatggttcatctatcaatggaatgttttcagctattaaaatgatggctttggctactgaataggtctgctaaaaaaaaaaaaaaaaaagacttctacctagctgtctagttggacactgtggcatgtgcctgtagtcccagctactctggagctggggtgggaggatcgcttgaggccaggagttcaaggctgcagtgagctatgattgtgtcactgcactccagcctgggtgacaaaacaagaccatcgctaaataaataaattaacttaaaagatggctatgtaaagttgtaagaatgatgtaacagcatggggtaatacatatcttataatttttaaaaaaattttatttgtggagacagggtctcactgtgtcacccaggctggagtgcagtggcacaatcgtggctcactgcagcctcagcctgcagggttcaagcgatcttcctgcctcagacccctcactagctgggactacaggcacacaccaccatgcctggttacttgtttttgtagagatggggtctcatgatgttgcccaggctggtcccaaactcctgggctcaagcgcttgcctcggcctcccaaaatgctgggattacaggcatgcatcactgttcctgtctgtatcatataattttaaataataaaagcagcctctacaactaggcagcatggtcttaagtctattttttaaacatagaaaaagagccaggaaggaaatgtaaacaatgttaataatgactttgatagggaggtgggtgggatatgaaagattttttttctcccttttgtccttggaaggaaatatcacttttcagcagtagttctctgttgggatggttctaaagtggggaagatgagactttttcctttcactttgtaccttttctggtgctctgatttagagctcctcagtcttgccactgttgatattttggggtgactaattctgttgtgggggctgtcctgtgcactgtagggtgtttagcagtatccctggcctctacccactggatgccagaggcaccccccaccccagctgtgacaatcagcagtgtctccagacaatatcccctagtggggatcggtgggggcaacattgtccctggctcggaaccactgatcgaatttattatgacaacatatccctttgccacaaaaacaaatgatgggctaaccgtgtgtgtgcaggtgaagccactgctgcaggtgacacggcaggaggaggagatgcaggccaaggaggatgaactgcagaagaccaaggagcggcagcagaaggcagagaatgagcttaaggagctggaacagaagcactcgcaggtacctgtatggatgcatggctggggttgctggggaacaggacttggccccgtggggctcacccgcctcctccccaccacctgcgtgcagctgaccgaggagaagaacctgctacaggaacagctgcaggcagagacagagctgtatgcagaggctgaggagatgcgggtgcggctggcggccaagaagcaggagctggaggagatactgcatgagatggaggcccgcctggaggaggaggaagacaggggccagcagctacaggctgaaaggaagaagatggcccagcagatgctggtaaggtgtcacaggggcagcccgtggtgggtagcaaatcacttgaccctcaccacaggcctgtggaggtgcatccagggatatgtgtccctgctgggacagatgatgagacgggggcttggagagggttggtcatctgatcaaggccacacagctgggattgggactggaacacagtgagcccactctgttctattgccctgccttgcatgtgctaaccccttttctcctaacagcaagcctgaatggaggataattgtatttgttagctattgctacataacaaaacatgccaaactcagcagctaaaaataaaaagtattgcatagtcaggaatttgagagtggcttaggtgagtggttctggctgagggtccggcctgaggttgcagtcaaggtgttggctgaggctgcagtcatctgaaggctcatctggggctggaggacccacttctacttggcttattcacacagctgttggaggaggcctcagttccttatcatgaaggcctctcccctcagggctgcttgagtgtccttccaatatggcagcagagttcccccagaaggagtgatctgagagaggagaaaggaagccgcaatgccttttatagcctaatctctgaagttacattccatcacttcttcctgatttttgttgttgttgttagaagcaaatctaacccccactcaaggggaggagaattaggctccacctttttggagtcgcaaagaacttgtggatagattttaaaaccaccatggtacctactgtgctcattttatagatgaggaggttgaggttccatgaagcagagcagcttacccaggtctttattttttttttttttttgagacagagtctcactctcttgcctaggctggggtgcgatggtgcgatctcagctcactgcaacctctgcctctcgggttcaagcgattctcctgcctcagcctcccgagtagctgggattacaggagcccaccaccatgcctggctaattttttttgtatttttagtagagacggggtttcaccatgttggccaggctggtcttgaattcctgacctcaagtgatccacccacctcggcctccaaaagtgctgggattacaggtgtgagccaccacgctcaggcctttatttcttccttttaggaggctacagagttctgggcatcttcaggcctagcccctgtattcattagtccccagatcaccacgagagtaaatctgttataaccaaagctgttactcttttccctccacaacaaaggaccttgaagaacagctggaggaggaggaagctgccaggcagaagctgcaacttgagaaggtcacggctgaggccaagatcaagaaactggaggatgagatcctggtcatggatgatcagaacaataaactatcaaaagtgagtaggggccgggtgcagtggctcacgcctataatccgagcactttgggaggccaaggtatgtggatcacttgaggccaggagtttgagactagcctggccaacagggtaaaactccatctctactaaaaatacaaagattagccaggtgtggtggccagtgtctgtaatcccagccacttgggaggctgaggcaggagaatcacttgaacctgggaggtagaggttgcagtgagctgagatcgtgccactgcactgcagcctgggtgacagagtgactctgtttcaaaaaaaaaaaaaagtggaatcaagtttctgcattaaaaacaacaggcttaccaggatcagggagattttggggatttgggactttcagttctcaaagcagaaaagcccttagaaaaccaggacaagctggtcaccgtagtcagtagtcactaaccagccccacctgcttttagttctttgagctggatgtcagcttggcccctactgtgagccaggctctgtgttagatgcaggtatgcatggtgaaggaggacccttcccttgtggggtttatactgtagtgagatggcaaataatcgtcatttaccatggtgatcagggctctgaaggaaacgttcaccatattttaagagtgcggcaggccgggtgcggtggctcatgcctgcaatcccagcactttgggaggctgaggcaagtggattacctgaggtcaggagttggagaccagcctggccaacacggtaaaaccccatctctactaaaaatacaaaaaattagttgggtgtgttggcgggcgcctgtagtcccagctactcgggaggctgaggcaggagaatcacttgaacgtgggaggcagaggttgcagtgagctgagatagcaacactgcactccaccctgggcgacagagtgagactctgtctcaaaaaaaaaaaaagaatacagcagtgggggatagaggaagggtattcatagaagacttcctggaggaggtgacatttaagcagaaacttaaagatgaaggagcagttagaggggagtagaagagcatctcagctggttggcccactgtgcaaaggccctggggcagggaagagctggccagtggcaggaatggaaggagggtacctttagctgaccatacaatatgagggacaaactggcacgagatgagaaatggccagtttttggaaattgttatgggacttctctttaccatttaaaactctagttgtattttgttataatgtgggtttttctttcaactgtttacatggaaatcactaaaagtgaaacatagattctagagaaaagaaaaatcctaaagctatctctttctctttccccaaaaaggaacgaaaactccttgaggagaggattagtgacttaacgacaaatcttgcagaagaggaagaaaaggccaagaatcttaccaagctgaaaaacaagcatgaatctatgatttcagaactggaaggtaaaccagctaccaagagatttatttttattttattttattattttttttagagatgaggtcttgctctgttgcccaggctgcagtgcagtggtgcgatcatggctcactgcagcccgaaactcctaagctccagtgatcctcctgcctcagcctcctgagcagctgagactacaggcgtgcatcaccacacccagctaatttttttttattttttattttgtagagatggggtttcactatgatgctcagtctagtctcaaactcctgggcccaagcagtcctcccaccttggcctcccaaagtgctgggattataggcatgagccactattcctgggcttgaatgggtatttttaaaagcaggaaaatcagaaaggaaatttgaggatggcagatcatcccatgagtgacaactaactctatgccacctctcgaaatcacccttagtcatcacatgcactaataatatgataaaagggctgggtgcggtggctctcgcctgtaatcccagcactttgggaggccgaggtgggcggatcacgaggtcaagagttggagaccagcctggccaacatggtgaaaccctgtctcaaaatacaaaaattagccaggcgtggtggcgggcgcctgtaatcccagctactcgggaggctgaggcaggagaattgcttgaacccgggaggcggaggttgcagtgagctgagattgcgccactgcactccagcctgggcaacaagagcaaaactccatctcaactaataataatattatgacaatataaggtgctgttcatcgggagataatggtccagaccgtgactatgatggttactgattgggggatgtgttcatctcctccgggtaaaatgcctgggcaggaaggctcatttccgggcatctctctggggcctccccttcctgaagagcaccttggtttttgcagtgcggctaaagaaggaagagaagagccgacaggagctggagaagctgaaacggaagctggagggtgatgccagcgacttccacgagcagatcgctgacctccaggcgcagatcgcagagctcaagatgcagctggccaagaaggaggaggagctgcaggcggccctggccaggtagcggggctggcaaggggcatttgctgtgtgtccatgtatcccctgggcccctgctcattcgctcattcgcagtggctgtcttggtcaaggcggccccaggcccttggcatgaacttcgtttcccaggccaggcctcccacaagccttctcgaccctgttcactcccccagatcctcaccttcgactttcttctcttccctgcaaacacatcatgtctttgcagttgatctcacctactcccatggtgttgctgctgcctcttcgacatccaggcttttctcatctagacccccttctgaatttccgattgcccaatgagtcaatttccaccgtcatctcaaacacccctgtctaaggcgggaatgaccttcctttccccagcccctccctctaagggccctcttttttgtgaacaccaatctcctcctttgtttctgccgacccacagcaagcagcaaccttcagattctgccagtccttctaaatgtcccccacccatttcctctggtttttccctcttcctggctcttagctggatttacactaatgctaatactgcagcagccactatgaatgattatttacctgctcactcggtgctaagttcttttcaagcaatacctttgcagacacctggccaggtgtactgccggtgtctttgaggaggaagctgagcctcctaggggtaacgcaacaggagcaatgtcattgcttctaagaggcagagctgggatttaagcctcaaagctttctgattgatcccctggcctggctcttttgtcggccaatttgtgctatgttgacagtgctacggtgatgaagggaaagcatctctctggggcaggaacctgctcacaaaactttgctggctggatgcagtggctcacgcctgtaatctcagcactttgggaagccgaggtggggggattgcttgaggccagcagtttgagaccaacatgggcaacatagcaagaccctgtccctacaaaaagttaaaaaatgagccaggcatggtggtgtgtgcctgtagtcccagctactcaggaggctgagatgggaggatcacttgagcccaggaggttgaggctaaagtgagctatgatcatgccactgcactccagcctgggcaacagagcaagaccctgtctcaaaacaataataacaacaaaacaaaaacctaacttcactggcttactagggaaaatccagtttccttagcctcaccctcagagcccatccaccctctgcagtctcaccccaacccaactatttcactttctctcttgttgctgccctttcacaagtacagtaaaatcaaagtgcttgcctctcctgcagcattctgccatttaacagggcttcttgcagcccaccttgatctctggtcaccacctccaccagatgcagagccccagtctgaatatcccccgcaagcagtggctggccaaatgctgtgcatggggcgggtactcagtcactgagcaaatgcagaaagaacagacagttgccagggaagaagaactgtccaacattcagaaagcatctacacagtccctactgtgaccaggtaccttgccagtctggggtcaatgctttgcattcttgcacacacatgcacacacgtgcatacacacgtacacacacccatgcacatgtacaacctgttttgatgtcagaccttggcactcacatcctatgttaatctcatatagtctggcatgtcaagaagcagacctggggacatggatagaaggtgtttgatgtctctgcaacataactgtctggtcccagaaaagtttttggccacattgtaagagaggaaaccaagggacctgggggttcattctgctgggtctctccctggaaggcttgacgatgaaatcgctcagaagaacaatgccctgaagaagatccgggagctggagggccacatctcagacctccaggaggacctggactcagagcgggccgccaggaacaaggctgaaaagcagaagcgagacctcggcgaggagctggaggccctaaagacagagctggaagacacactggacagcacagccactcagcaggagctcaggtgaggggcccatcaatcccaccatcctgctatcccactgcaccaatgggatgggggcagaagaggggacaaacccaaagcaaatcgtgcatcagcccctgtgcatttaccttcctggccgcggtttgctttaacttatagaagcatggttggctgtttcttttttttctttcttttttttttttttttgaggcagtctggctttgttgcctaggctggagtgcagttgtgccatcttggctcactgcaacctccacctctgagatttaagcgattctcatgcctcagcctcctgagtagctgggattacaggtatgtgccaccacacccggctaattttttgtttttagtagagatggagttttgccatgttgcccaggctggacttgaactcctggcctcaagtgatccacccacttccgcctcccaaactgctggtattacatgtgtgagccactgcacccgaccctcatcatcttatttctcatcagaagagtagtatataccagggatgtacaatcttttggcttcccttggccacattggaagaaaaagatttgtcttgggccacacataagatacactaacactaataatagctgatcaactaaaaaaattttacaaattggaaaaaacatctcatactgttttaagaaagtttatgactctgtgtcaggctgcattcaaaaccatcctcattggtaagcttggatatactcagagaacaatttgaaaactatagaaaagcagacataaaaaaaaatcacctttagggtcgggctcacgcctataatctcagcactttgggaggccaaagacaggtggatcacttgaggtcaggagttcaagaccagcctggccaacatggtgaaaccctgtctctactataaatccaaaaattacctgggcgtggtggcgcatgcctgtaaatcccagctactcaggaggctgaggcagtagagtcacttgaatctgggaggcagaggttgcagtgagctgagatcgcaccatcgcactccagcctgggtgacacagtgagtgagactccatctcaaaaaaaaacaaaaaacaaaaaaatcacccttagtcacaccagttaacattcttgagaaattccttcctgtctgtgtgtgtatcagtcagtccccaagctccaattcccaagtatgtgtgtgtatcacttttgtgttaaattttaaaaataaaattgatcagattggttttcaattgaagattcacttcaaatgaacaaacaataacaaactgcctgccagatcacgaatcctgactctagtgaaactaggtcattgattcattcagtaaacacataaatgtattttgatgcaatctgtggtgttggcatagcatgtatcatagcatatagctatgctagctgtgccaacaccatataccctggggtttacttcccccactttgggttttgtgcagtgtcacatgcacatagagcacagcgttctgctcccttgccgcttggcctttgatacagaagagcccagtgcatgggccaggtatggtggctcatgcctgtaatcccagcactttgggaggctgaagcagacagatcacctgaggtcaggagttcgagaccagcctggccaacatcatgaaaacctgtctctactaaaaagacaaaaattagccgggcgtggtggtgggcgtcggtaatcccagctacttgggagactgaggcaggagaatcccttgaacctgggaggcagaggttgcagtgagctgacatcattccactgtactccagtctggacgacggagcaagactcgataagaaaaacaaacaaacaaaacaaaaaaccaggctgagtgcggtggctcacacctgtaatcccagcactttgggaggctgaggcgggtggatcacctgaggtcaggagttcgaaaccagcctgaccaacatgttgaaaccccatctctactaaaaatataaaattagccgggcgtggtggtgggcacctgtaatcccagctacttaggaggccgaggcaggagaatcgcttgaacccgggaggtggaggttgcagggggccaagattgcgctgtcgcactccagcctgggcaacaggagtgaaactccatctcaaaaacaaacaaacaaaaccatggactcaaggtcaaggtttagcttctaattctggctccatcacacaatggctgtgacaccatgggtaaaactgcttaccctctcttagccttagtttcctcatttgtaaaatggaaataataacacacctgcctctttgggttgctctgaggattagatgatgtatataaaaaacttagctcagggcctggcatatagtaactgctcattaaataagagccaacattaatatttaagcaaaattttgcagttcacagacatcctttcaattctattactttgtgtatttgtttgccagtcattacagatgtcctaggcaggtgatatgctccacattttgcagctgaggaaattttaggtccagagatgttaggtgaatgacccaaggtcacacagctagagaggggtggtgatgaggactgcagctctgggtcctggaagagctctcattcttttgcacggcactgagatgaccctctgtctccacccaactgccattcactgtgttcctcccaccaagggccaagagggagcaggaggtgacggtgctgaagaaggccctggatgaagagacgcggtcccatgaggctcaggtccaggagatgaggcagaaacacgcacaggcggtggaggagctcacagagcagcttgagcagttcaagagggtaatgctttttggtgatgctttttggtgatgacacataagagtgacatcagcagcctcaaattactacaggtcagggtctgcataaagacaaaaaacaagttacataagattctaatgatgatgatagcagcttatatttatttacaaaatgcttcccatacaggctgggtgaggtggctcacgcctgtaatcccagtacttggggaggctgaggcgggaggatcgcttgagctcaggagttggagaccagcctgggcaacatagtgagaccttgtttctactaaaattttaaaaaagtaggccaggcgtggtggctcaagcctgtaatcccagcactttgggaggccaaactgggtggatcacctgaggtcaggagttcgagaccagcctggccaacatggcgaaaccctatctctactacaaatacaaaaaattagccgggcgcggtggtgcatgcctgtaatcccagctactcgggaggctgaggcaggagaatcacttgaacccaggaggcagaggttgcagtgagcagagatcatgccattgcactccagcctgagcaacagagcaggattccatctcaaaaaaataaaataaaataaaatattggccaggcctggtagtgcattcctgtggtcccagctatttgggaggctgaggtgggaggatcgtttgagcctgggaggttgaggctgcagtgagccctgtcatgccactgcactctagcctggacgacacagtgagaccttaatcaaacaataaaaataggctgggcacggtggctcaccatgtctgtaatcccagcaatttgggaggcaaggcgggcaaatcacttgagctcaggagttcgagaccagcctggccaacatggtgaaaccccatctctaccaaaaatataaagaattagctgggtgtggtggcatgtgcctgtaatcttagctactcgggaggctgaggcaggacaatcacttggacccaggaggaagaggttgcagtgagctcagatcgtgctactgcactccagtctgggcgacagagtgagccgccatctcaaaaaaagaaaaaaaaaaaagaatgaatagaaatgcttctcatacagtatgtcaattaatcttcacaaccaccctgtgagacgtgtactattaaactcattttacaagcaaagaaactgaggtcctaggtgcctagaggtgaagagacttacccaaggtcacactgctggtaagtgacagagccatgatttgcacccaaacagtctggtcctagaccccactttctggcctctacaggactgaaggcctataggatgggtggggcctatcaatatactgcccttcagggataagcaaaggtgtaacaacactttcggggagatttaaatgaaacttaaaactgggatcattctatccactttaatttctctgcagactggaggaaggccaggcatggcggctcatgcctcccgtaatcctaacactttgggaggccaaggagggaggattgcttgagcccaggactttcagatcgcctgggcaacatagcgatttttcttttgtaaaaaaaaaaaagactggaggaaacttgtcattatttgatttcaatggcagaacagctctctccggcataatttgagaatgactaggtcaaatcactctcccgttgttggaactctttgcggtgtatgggagtgggagctggtaaatagcagtaccgaatgctgaatcttgggtgctcttctctcctttggggtagtgcctgtgcttcattccccagggtaagttttttagcttgcgaccttcggccagattgttttcctgaaagcctgagttacattaccctcagcgttgcagctcctccacatccccttcagtggaagcttttggttctgctagattaagtgggtgcagcattgcctaaaaattttggggaatttgcatttggttctatcactagtgtattggtccgttgttgcactgctctacagaaatacccaagattggattatttgtttattttttgagcagtggagtcttactctgtcactcaggctggagttcagtggcgtgatcttggctcactgcaacctccacctcctgggttcaaatgattctcctgcctcagcctcccaagtagctgggactacaggcacacaccaccatgcccggctaatttttttttttttttttttttttagtagagatggggttttgccatgttggccaggctgatctcgaactcctgacctcaggtgatccacctgccttggcctcccaaagtgctgagatgacaggtgtgagccactgcaccaccctgagattgggtaatttctaaagaagagaggtttaattggctcacggttctgcaggctgtacagaaagcatagcagcttctgcttctggggaggcctcaggaaacttaccatcatggtggaaggcaacggggaggcaggcatgttttacatgaccagagcaggcagaagagagagaatggggagctgccagacacttttaaacaaccagatctcatgagggcagcaccaaagggatagtgctaaaccattagaaactgcccccaaaggccgggcgcggtggctcatgcttataatcccagcactttgggaggctgagataggcggatcaccaagtcaggagttcaagactagcctgaccaacatagtgaaaccccatctctactaaaaatacataaaattaggctgggtgcagtggctcacgcctgtaatcccagcactttgggagcccgaggcaggcagatcacctgaggtcaggagtttgagaccagtctggccaacatggcaaaaccccgtctctactaaaaatacaaaaattagctggacgtggtggcggtcgcctgtaatcccagctacttgggaggctgagacatgaaaatcacttgaacccaggaggtaaaggttgcagtgagccaagattgtgccactgcaccccagcctgggcaacagagtgagactcagtttcaaaaaaaaaaaaaaaaaattatggttggaagagtgaggccccagacagaatcactgaccctccccatgcttggggttcattagacgtgaacaggagctagaagccaagcccattcccagccaggcctctttgggaagacgcagttattaagaccaccagcagacggcatgtccattactgacccgcacaaagcaggtagaggtgcaaacctctgcccatctcaggtgcagggaaacagaggcctttgcctctaacaacttgaattctgatgtagagacctggttccatctgcttgtgggggaaacgtttaacatcagctcctacctgggctccccaggccctcgtgcggtttggccccagttctggggtcttaggctgggctaaggtttctgggagcccatgtcccctagggtccccgcttcactgctttgttaccaccaagagactccctgtccccatctgaggtctggcagctcttagtcatgtcttggagggaggacgggcatccagggctgaccggtcaacgtccagcacctcccagggactatgggaagactgagtggtgggtctcgtcctctcgggatacttgcgcttctctttccccttctctacaacctggaaagaagcccctcaccgcgtcctacttttgcccaacacgcttttttttttgagacaaagtctcactctgtcgcccaggctggagtgcactggcgggatctcggctcactgcaacccccgcctcctgggttcaggcaattctcctgcttcagcctcctcagcagctgggattacaggtgactgccaccatgcccggctaatttttatatttttagtagagacggggtttcaccatgttggccaggctggtctcaaactcctgacctcaagtgacctgcctgcataggcctcccaaagtgctgggattctaggcctgagccaccgcgcctggccccaacacactttttttttcctgtagggcaactcacatgcctacaggagctggttccataaaataagtttcccttaactaggacagaagtagcagtgtcaatcacacgacacctgtgaaggacgggggcggtgaaaggtgactgccccacctgcagagccagccgctacttagatgtggcagattgttgccttgaaggaaagcaagaccctctgtttccagatctttcgttgttgttggttttttgtttttgtttttaagtttaggattactgaggcatatgtagtaaaatttatccattttactgctccattaattttaacaaatgtgtattgtgtaactaccaccaccacagtcaccacatagaatgttagttattgattgattgattgagatggagtctcactctgttacccaggctggaatgcagtggcatgatcttggttcactgcaacctccacctcccaggttcaagcaatacttgtgccttagccaccccagtagctgggactacaggcgtgcgccaccatgcccggctaatttttccatttttagtagagatgcagtttcgccatgttggccaggctggtctcgaactcctcacctcaagtgatccacctgccttggcctcccaaagctacttatttctgaaacagggtctcactttgttgcccaggctggagtgcagtggtgtgatcatagctcactgcagcctccaattcctgggctcaagcaagcctgccatccgcctcctgagtagctgggattgctggtgtgtgccccccacacccagctaatgttttattttagtagagatgggggtctcactacattgcccaggctggtcttgtactcctggccttaagcgatccttctgcctgcttcccaaagtgctggggatgacaagtatgagctgccatggcatgccttcaaacattaaagttttttgaaaaagaagctgggaatccagatttttatgtgacatttattaaaatgtcggcaactcatttttttaaaagtagtgaaagggtcaaaggggacatgtcagcaggttggataccgcttgtgggattccagattgcaacccatgagctttaggaaaatagaatccaaaatatcagctgggtgcggcagctcacgcctgtaatcccagcacttagggaggccaagatgggtggatcacttgaggtcaggagttcgagagcagcctggctaacatggtgaaacctcgtctctactaaaaatacaaaaattagtcgggcatggtggcgggcgcctgtaatcccagctacttgggcagctgaggcaggagaatagtttgaacctgggaggcggaggttgcagtgagccaagattgtgccacggcactccagcctgggtaacagagttaagactccatctcaaaaaaaaaataacaacaaaaaaaccccaaatctcttactggtgattgtgtgccccctgttgtgtgccttcctggacctctctgagggaggaaagggcagggcctgaaacgttctcccggccacagcctccctgttatccctcccctctgcttccttcgccaggccaaggcgaacctagacaagaataagcagacgctggagaaagagaacgcagacctggccggggagctgcgggtcctgggccaggccaagcaggaggtggaacataagaagaagaagctggaggcgcaggtgcaggagctgcagtccaagtgcagcgatggggagcgggcccgggcggagctcaatgacaaagtccacaagctgcaggtgaggaggtggcgcggtggtgtggtgggcagtgctgggtggtgcccagttctgtggggaggagcctcttcccggctcgctgaggtctctcttgctgcaaggcaagtcctttcctctagttgcgttcctggaggagaggcgatgatctccctgttcaattaaatattaaaaaaaccttctggccaggcacggtggctcatgcctgtaatcccagcactttgggagacagaggtgggtggatcacctgaggtcaggggtttgagaccagtctggccaacatggtgaaaagtctctactaaaaatacaaaaattagccaggcgtggtcgtgggcacctgtagtcccatctactcgggaggctgaggcaggagaatagcttgaacccaggaggcagaggttgcagtgtgcggagaccgcaccattgtactccagcctgggctaaaagggcaaaactctgtctcaggaaaaaaaaaaaaaaagaaaaaaaacccttccttttccaatttgataagtatttattgagcacctgctgtatgccaggcactgtgcttaatcctgagatccaacagcaaggaagaagagacactgtcgctgccccagtaggactccagccgagtaaggggaagggaagggaagggaaagacatgaataatcacacaaatgaatgtcaaatgatgcagcaaagggaaggcacatgatgcccaagtgtaaataaccagggggcctaacctgggggaggaggagccacgaaaggcttccctaaggagcatggataagtctaccaggcagagggaacagcgtgtgcaaaggccctgtggtaagtagaaaaattaggagagagacatacagccagtagagctggagtgcccagctggggttgggggtagggggagatagtacagagtggggttggagggggagcttgtacccagatgatgtagggcttttgagaacctattacatgtatgttgatccttactctgggcaatgtgaagctgttgaggggttttaagctgctgaatgacatggtctttttgtctttggtcttctttcacttggcatagccatttaccctgccttgccactcatggggacgtggccaaagttttcacaaatgtttaacatgtccacagccagggaccaaggggcgagggaagaattaagtgagatgtttttttctcacatgcagttgagagcagggcttttgccgccctcatataagcagtgtcaagatcattcatatcctccttgtcaatggaagagatggaggggtaggctaacagcctcaaagggacttatgcagagacactagggagtaaaagccagagaatacagagaggacgtttttacctttagggcctgcgtctctggctttggccatcagggtcaaagagtaggagtgaggaaggaagggatgggacagcatccctgggacgttcaagtaccatcctggtctcccttctccagccttagagagtggaccagccagagcacctcgtctggactctcagacctgctgctttgtctctaccaaccttggcagggatctaggatccatttagtgggatcaggtcccagtcaataccattggggctcaaataagttcttagaaccacagagtctagggccagggtcccaactcataggtgacggagttcccttcaagccacagattctgttttttttgtgtgtgtgtgtgtttttttttttttttatcagagtcccatacctcacgggtattttctcaatcagtgaacacctcaagtactagcccatgtgttttgagtaaaaagggctcctttcaacgaggatccccttctagaggctttgactaaccagtctcttggcacccttagaatgaagttgagagcgtcacagggatgcttaacgaggccgaggggaaggccattaagctggccaaggacgtggcgtccctcagttcccagctccaggacacccaggtgagtgtcctgccacatcatccaggggacctggggggtggccttcctcggggcaggtccctgggacctctttgcatcccttttgcaggagctgcttcaagaagaaacccggcagaagctcaacgtgtctacgaagctgcgccagctggaggaggagcggaacagcctgcaagaccagctggacgaggagatggaggccaagcagaacctggagcgccacatctccactctcaacatccaggtgcctgccccgtgtccttgcttccttcatgggtcctctcaacttctctgcgctgagatcccccgcaggcagatcgcggtggagtgttggtgcgatggtgcttgaccccccagcttcccctgctattgggtttctccaacgaggagacatggtcttcgcttctcagagtctgtggggccagggacaggggccactcatggtccccctctcaccctaccctggacgctgtccttgtagctctccgactcgaagaagaagctgcaggactttgccagcaccgtggaagctctggaagaggggaagaagaggttccagaaggagatcgagaacctcacccagcagtacgaggagaaggcggccgcttatgataaactggaaaagaccaagaacaggcttcagcaggagctggacgacctggttgttgatttggacaaccagcggcaactcgtgtccaacctggaaaagaagcagaggaaatttgatcaggtagagggcgtggggtgtcccccactctggccatggacgctgggttggggaatcagctctgcagagtatgacgcgtggctctggcctgtgcctgcatcccctctccactctgtggggagccatgggaggctgtcttatcttgtcttgggcgaccatggagcattaacgctaccaggtcacagtaaggatggcaaagaagccttgatgactgtgacttttctgggtaccagcaccatgagggtcacctgcacacatggtgatgccttagtttctagcctgaagaaggaatgaggtgcttatttattcactaaatgtatttactgaatacctattgagtagtattccaagtaattcagtttctatacttttaataccactcttccctaagatttcattctgtaaaattccaagtacacagcaaagttgacagaattgtacggtgaacacctttaaggccaccacctggattcagtcattgacactgtattatatgaactttatcagatacttattttgagacaggatctagctctgtcacccaggctggagtgcagtggtgtgatctcagctccccgcaacctccaccactgggttcaagcgattctcctgcttcagcctttcatgtagccgggattataggagcacaccactatgtctggctaatttttgtatttttagtagagatggggttttgccatgttgtccaggctggtctccaactcctggcctcacatgatctgcctgccttggcctcccaaagtgctgggattataggtatgagccactatgcccggcccacatatttatttataaagactaattctatctatcatgccttatctcttgggtacatttcagagcaaattacagatgtcagtacatttccccttccacacctcaacattgcatattaattagagtttatttttaaacacaattttgcttcttttggggtaaaacttacatgtgatgagattcacaaatcttaattgtacgataaatggagacccctgtatgacccaaacccctaaataccaacttttaagatacattattatttagtaaatatgatttagtttacaagtgactcagggttattctaaaaatcagtttgagaggccaggcacggtggctcacgcctgtaatcctagcactttgggaggctgaggcaggtggatcacttgaggtcaggggtttgagaccagcctggccaacatcgtgcaactttgtctctactaaaaataccaaaattagccgggcgtggtggcgcacgcctgtaatccctgctactctggaagctgaggcaggagaatcgcttgaacccagggtggggtggaggttgcagtgagccaagattgcgccactacaccccagcctgagtgatggagtgaaaaccctgtctcaaaaataaataaaatgaggattgtacagtgaggctaaatgccagatgcctgcaggttccctacccctccctgactgacctcctagtgtcaggattctagataacatcccagtttctcctcttcccatcagctacctctcctctgggctgtcagctcatcttcaatgcttcgttatctggttgaaggcctgaggttgcttttattttcctgtcacatagagtgtagtgcagtggcacacatagtgtgggatttttgtgttgactgtgccatttagaggtccctgtctttgctgaatactggaagtttggcttttggatgttacaatttataatctgctctgttctctctgaagatgagattaacgtgagcatggaatgttctctgagttgcttctccaagcagagagatatgtgtgcagggccacccatgcttaccatttccctactgaggctcttaggatacttttgtaagatattaatagctacttgtggccatgaaacaaactaataactagcttctggcagctttaaatctcactttgacctcagtgtgctctaagcaacgtgggcaggtctagtggtttcgaagcacaaggatttggccaggtgtggtggctcacacctgtaatctccgtgctttgggaggccgaggcaggaggctcacttgagggtcaggagttcgagaccagcctggtcaacatggcaaaaccacatctctacttaaaatacaaaaattagccaggtgtggtggtgggcacctgtaatcccaactactctggaggctgaggcaggagaatcgcttgaacccacgaggcggaggttgcagtgaaccaagactgcaccattgcactccagcctgggtgacaaagtgagactccatctaaaacaaacaaacacacaaaccaacaaaaaaaaacaagtcagctgatttctggctctgcataaggttgatgtagaagtcagaacgccagatgattatataaattactcccatagctaacctacactgcttacacctgcacctcaatacattcagcaggacacagggcttcccccggtatttacaattcagtgacgctgaccccggatatgcctagaagtcacctctgggtcttgtgttgtagttgttagccgaggagaaaaacatctcttccaaatacgcggatgagagggacagagctgaggcagaagccagggagaaggaaaccaaggccctgtccctggctcgggcccttgaagaggccttggaagccaaagaggaactcgagcggaccaacaaaatgctcaaagccgaaatggaagacctggtcagctccaaggatgacgtgggcaagaacgtaagtggctctgggtggtttttctcgtccatgtttcgcctgcccaccctctgtgctattcaccagtccatgcgaggctagctcctggcctttttcatagcgaactatcatcggaaatggaaggaggtttttggactggtgcaggggctgggaggggctgagaatggcagtcgaggatgggtctgagttggggggtccgaggataaggctggggtctgaactctcaggggtcatcttgagtcccggccatgcatcctgtgggaggccaaagccacctccctgatctcctgaggtgccgctcacggtgggtttctcaatcgtcttcatgaagttgagcctcatagaatggggctgcccgctctgccggcaggtccatgagctggagaagtccaagcgggccctggagacccagatggaggagatgaagacgcagctggaagagctggaggacgagctgcaagccacggaggacgccaaactgcggctggaagtcaacatgcaggcgctcaagggccagttcgaaagggatctccaagcccgggacgagcagaatgaggagaagaggaggcaactgcagagacaggtgcgtgctgccggggaggccagcagagggaggtcgggtggcctttttcattcctatcaccactctcatggttggtgtggaaacttcgttttctttatttttttttgaaacagagtctcgctctgtcgcccaggctggagtgcagtggcgtaatctcagctcactgcaacctccacctcctgcctcagcctcccgagtagcttggattacaggcgcatgccaccatacctagctaatttttttttttttttcagtggagacaaggtttcaccatgttggccaggctggtcttgaactcctggcctcaagtgatccattctcctgttggcctcccaaagtgctgggattacagacatgagccacccacgcccggcgtgattccgttttctcatctgcaactggggatgagatgcccacctcacaagggggctgtgctggggaaggggtgcagtgatgtgctgcctaggtgagccaaaggacctcccaggggcaagtggggcagcacacatctctattcctcgcccagcttcacgagtatgagacggaactggaagacgagcgaaagcaacgtgccctggcagctgcagcaaagaagaagctggaaggggacctgaaagacctggagcttcaggccgactctgccatcaaggggagggaggaagccatcaagcagctacgcaaactgcaggtgggtgacactaggagcttggggcatgggtggagggagggcacagttcccctcaggccaccgaagtcagcagagcgggctccaggaagcaagcctgcacctgccattggtgtgggttcagctggggtttttctggaaccattcaggatttggtggctgtctcctgccctgggtagggcagcattattaggtatttggccactgccctcagatcacatcaggggctcagcttctcaggcaggtctgtggagcccacccagaatggtgctcccagcgcaccaccagccacctggaactgagagccatgctcgtgcaatgggaacttctttgtggtcaactgcagaaaatccaaggggtgggtgtgcaaagctgaactgggcagcagaacttgggggagtaaggacatctgagcttgtcctccctgttgactcatgcaggctcagatgaaggactttcaaagagagctggaagatgcccgtgcctccagagatgagatctttgccacagccaaagagaatgagaagaaagccaagagcttggaagcagacctcatgcagctacaagaggtaaagcctcgccttgctaggagagcctcagatgcgggtgtcacggtagcaccccttggcagctccagtctgtgcattcccagatttcatttcgtcctcctctggggtccacctgtctagaaagacacacgcttccctcctctatgtattcacggggcctcccctgagctcagaggaagaacatgtactttcaagggtggctgagttgtcagggtggactcttggtggggcttggcctttccctggcagacaacagccttcctccctcccacctaggacctcgccgccgctgagagggctcgcaaacaagcggacctcgagaaggaggaactggcagaggagctggccagtagcctgtcgggaaggtaggaaactgaatggaggaagagggctctgaagcagaggatggggggacaggcagcatcctcgacccccattttattttttaaattttttcgagacagagtttcattctgtcacccaggctggagggcagtggcacaatcttggctcactgcaacctccacctcccaggttcaagcaattctcctgcctcagccttctgagtagctgagactacaggtgtgtaccaccatgcctggctaatttttatatttttagtagaggtggggtttcaccatgttggccaggctagtcttgaactcctgaccttaggtgatcctcctaccttggcctcccaaagtgctgtgattacaggtgtgagccaccgtgcctggccctggacccccatttcaatgctgctgctgacgaagcgtcctctgagattggggacagacccatggtggttaggttttccgtcagcgctttcatgcctgtttgggggtgtggctgctttcattcattcccaataagtagctgtgtggggagaaggggaggccaggaagagtcagggaggagtgtgctggtccccatcccaatcccagctttgctgacacggacccggcctgagtcccggctgtccacttcctggctgtgtaactacagatgagtcttctaatcttctccaagcctcagtttcacccattagatgatgagggcaatacccctgaggcatgactccaaggagggggcatcttttaaggcgggggagggtagaggcccccaccatggccgcccttcccccaggaacgcactccaggacgagaagcgccgcctggaggcccggatcgcccagctggaggaggagctggaggaggagcagggcaacatggaggccatgagcgaccgggtccgcaaagccacacagcaggtgagggccgcctggacaccacagtcacgctgcctactgtctctcctgcagcaggatcctgcaccagtcaacacacgcgtggcggcttcctgtgtgcaggccctggattgagggacaagagggtggtggggcctgagagtagagatccagggcccttacaccagtgcccaggctgctgtcttcagaatactcctctccacgctgcagtgtctcattttccagccacggcgtggctggctccccgtacctcacggccatccctggagtccgggccttgggatgctctttcattgcgttttcccctagctgaagctctgaccttatccagtgagcccttggtgatgtcactgagcactagttccatggtgggcactagggaccatccagtaacctgcagccccttgtggtgtagggtgaacaggcatcattctccaggcgactccaggacagagaaagcaagggacaagtcactcgctcagcctgggtggcactgacacttgtggaagcacctcttttttttggagacagggtctctctgtggcccaggctggagtgcagtggcgcaatcttggctcactgcaacctctgcctcccaagttcaagggattctcctgcttcaacctcccaagtagctgggactacaggcacgtgccaccactgcccggctaatttttgtatttttaatagagacggggtttcaccatgttggccaggcaggtctcgaactcctgagctcaagtgatttacctgcctctgcttccaaaagtgctgggattacaggcgtgcgccaccacgcccggcctggaagaagctcttgagtggagttttacaggatgaaggagaggacagggtgcccgggatcaagggactcgtgcagaggccaaacaaggcaggaagaggcatggtctcagtgcgctctcttgggcttccctgagtccgcctcatggccttcactctcctccccaggccgagcagctcagcaacgagctggccacagagcgcagcacggcccagaagaatgagagtgcccggcagcagctcgagcggcagaacaaggagctccggagcaagctccacgagatggagggggccgtcaagtccaagttcaagtccaccatcgcggcgctggaggccaagattgcacagctggaggagcaggtcgagcaggaggccaggtatgcgggtgtggagttccgaacccagtttgcaggggggtgatggacagcaggagtcatagtgaagtcagggaacctcttccagcatcagttctggcttgtaagaagcaagctctgtgatgcctacagtgcaggtatgttgtgagaactgaacgtaaacacagcaaagtgccctgctggttcctggcctagggcaagcacctaaagtgtgagctgctcttagcatctccatggtcctcctgacattaacctgccttcccagcagtacatatgacttttcccagcctctgcagggatagcatgctgacagatcaaaaatccaaccaggctggacgtggtggctcacgcctgtaatcccagcaatttgggaggctgaggcaggtggatcacttgaggtcaggagtttgagaccggcctggccaacatggtgaaaccctgtctgtaccaaaaattagccgagtgtggtggcacatgcctattatctcagctactcaggagactgaggcaggagaatcactccaacgtgacacgtggaggttgcagtgagccgagattgtgccactgcactgcagcctgggtgacacagtgggacccttccacacacatacacacacacaaaaaaaaccccaaaaaacaaaagtccaaccggcagcccatttggtacacacactggaagccttcttaattatgggtcgaatgaggcatatgatcacagcacatttcttaccattggattctaaggattctcacccattctcttctagtagctttttcagtaattcgcacgccctgcaatgcacccatttaaagtgtataattcaagggctattcatatattcacaaacatgtaaaaacgatcaccacagtcattttgagaacattttcatcggctcaaacagaaaccccaggccatatgtggtatttcatgcccataatcccggcactttgggaggctgaggtaggtgggagcagcacttgagtccaggagttcgagaccagtctgggcagcatagcaagacttttttatttttatttttttgagacatagtctcactctgtttcccaggctggtgtgcagtggtgcgatctcagctcactgcaacctccgcctcaccctcccaagtagctgggactacaggtgcacaccactgtacccagcttgtaattgtattttttagtagggatggggtttcaccatgttggccaggctggtctcgaactcctgaccacaggtgatctgcccacctcggcctcccagagtactgggattacaggcatgagccaccacgcctggccagagactccgtttctatgaaaaacttttaaaagtctgagcatgctggtgtacgcctgtagtcccagctacttgggaggctgaggtgggaggattgcttgagccaggagttcaaggctgcagtgaactatgaactagggtgaagagcaggcattggagcaccactgcactccaacctgggtcacacagcaagaccttgcctcctccccgcaaaaaaaatagaaaccccatgccctgtaaccactcccttcagtccctggcaaccataatctactttctgtctctatgaatttatctattctggacacttgatatcaacggaatcacacactatgttgtctgctatgtgtcttctttcacttggcaagaattccaggctcatccatgctgtggcatgcattgatactttattccttttcatggctgaatactattccaccatctgactgattcttgagaggagtccagatacggggctcaggaaagcactcaagatgccacctccaggtgacacaccagctacaaggggtgccaccctccgctgaaaccacctgttttccttgctgtttgcagagagaaacaggcggccaccaagtcgctgaagcagaaagacaagaagctgaaggaaatcttgctgcaggtggaggacgagcgcaagatggccgagcagtacaaggagcaggtagcccctgccacccagcctccctcgagcccccagcccccagccggcctcccctaaccacccctccaactctccgcgacaggcagagaaaggcaatgccagggtcaagcagctcaagaggcagctggaggaggcagaggaggagtcccagcgcatcaacgccaaccgcaggaagctgcagcgggagctggatgaggccacggagagcaacgaggccatgggccgcgaggtgaacgcactcaagagcaagctcaggtgaggagcccgtggcccgggaggaccccgtctctcaggccagagaaaagcactgggggctcgggctcctttcggcctgcaaatgccccttgtgcccacagccgccactcccttctgtggtttattcctgcttctccttaatcactaagcttagtgtgggccaggcactgagatcagacccgggccctgccttgcctggtagcagctaaccttctagatcctttaacgatcgaccgtctcccatccggtcctccggctgaggaggaggaagaggctatccccactgtctcctccagcccctccttcattgcatcactgagtcttcacgacatccattgaagctgcaacaccaccccccgccacttcacctccttcctgacatgctctgctcctcctttctccccctcagcactgctgccatctgggctgcattattctcgggtatgggggctgtccgacattccccatcagaaggaaaaagatccctgaaaagtagcaggtgcttacatttctggcctctacccaccggctgcagtagtcccccaccaccctgcaatgtgacaaccaaaaatgtctctagatgttgccagaagtcctctagagatgggagggtacgactgccaccccgctgagaattcctgctgtcactggagtgggggctgttttctctcccatgcctctggtaccttgggggtcccccctgctcccaagggctgcttccaccaccctgtccatccatcccgattggctcccaggaggttttagctccgggcttcctgtctcccacaccactcctcacagttctccatgatttcaacatccaggtgggcgacgcagcctctcggttccttgaccctctgggtgatcctgctgcttctaccgggccaaccagtactcctaggagccctcacaatttgaccctcaggcatcccattgtctgcctggtgccacctttctttggctctgtccccaacggggtcttcactccattaatgccatcagcctctgacccagctccaaaccagctgtctagtaacccccgtcgcgcatcctcaacatccggttccccctcttgcattgctgcaatcatttggtgaaagcacaacccaaatgaaactcaagcttggctgggcacgggactcacacctataatcccagcactttgggaggccaaggcaggtgaatcgctttgagctcaggagttcaagagcagcaagaccccatctctacaacaaacaaacaaaaatcagccaggtgggatggcgcaaacctaaaatcccagctactcaggaggctgaggtgggacgatcagtggagccccagaggtcaaggctgcagtgagccatgatctagccaatgcacttaccctggatggacagagtgagaccctgtctcaaaaaacccaaaacccactctccaccttttcccacagagcaggccttgctcaggggtcctcccacacccctccctcatcttctcactctctgctgcttttcactttttctttgaacttatgatcgctcctccccattctctctcagctggggaccttacttcctacttaactcaaaagcagaaatgatcatgaaacgtgcacaagctcccactgcctcatcatcctacctccgtgcacctctgtacacttctattttttttccatttctatgctgaaccctctggcaccaaccgaggccaacacctccattggacccgaccctcttgttcactcaagcacatagctccaaaaatccttattttgcaaggttttctctttcatttgctccatcagcaaatggaataacctcttagccccatgtctaccttgctacccttactacaaaactggatgtgaatgccgaaaccctgtctctaccaaaaaatataaaaattagccaggtgtggtggtgcatgcctatagttccagctactcaggaggctgaggcacaagaatggcttaaaaccgggagagagaggttgcagtccagcctgggtgacagagtgagactcggtctcaaaaaaaaaaaaactgtatgtgaagagttgctggttcccctcgcccccacccatcactctcccagaagcctcccatgggtgacactaatggccagaggtcccctgacagggcagcagcacgtgacgcagtccatcatgcctctggcctaattcacttgcttccctggacttccccgacaccatccacacctgcttgtcccccgacctgtggggttgtccctcttcctctcctctgctgatccctcacctcgaaacctgcttgccactagaccgccccagggtatcaacttagttctcttttgggcagagtcttgctctgttgcccaggctggagtgcagtagcactatctcagctcactgcaacctctgcctcccagttcaagctatttttggcctatttttatatttttagtagagatggggttgcaccatgttgcccaggctggtcttgaactcctgatcttgtgatccacccgcctcagcctccccacgtgctgggattacaggcatggaccactgcacggccttagttgttttcatctctccccagcgctaggtgagaggtctcaactaatcttggcgctttagaattccatgtatatctaatgactcctcagttcatctctgagaagccctagcttcttcctagaacctcagaccaccctcccgttcccacatggatgtctaataggcagctcacaccaaacatgctgcaccccaagtcctgactgaaactcttcacccccaaactggctcctctctccagctcagcagctaaaatgatgaagttgccaacaattcacatcacaaacctcgtggtccttcttaacgttttggtctcctttataccccacatcccatctatgggagaatctggtcaactttccctaaagaatcctgcccaggctgggtgcagtggctcaccccttaatcccagcactttgggaggccaacgcaggctgatcacctgaggtcaggagttcaaggccagcctgaccaacatggtgaaaccccgtctctactaaaaacacaaaaattagccgggtatggtggggcgtgcctgtaatcccagctactagggaggctgaggcaggagaatcgcttgaacctgggagacacaggttacagtgagctgagatcgcaccactgcacttcagcctgggtgacagaccaaaactcggtctcaaaaaaaaaatctccagtgtctaggacagcaccaggcagagtgaacctttatccctcgggtcctagatattttccccgcttcattctcataccaccacagccatgtgctgagcctcttactacctttaataccaatgacttgatcttttaacagttttaatcatacatgaatataacggcaaataaacatacctcctctatatttttaaaccagcatcacctctatcaactggttacgatgaaagtaatatgataaaaatagtatcaagttcaatatctagctattgtggccacaacttgatcaccaagacctgaagcctacttctccactaaaaagggagtgacaacagccattagcaccaaatagactctctctgacatcataattagacttgtttaaaaagagttggaaaggaaatgactttctcagggcccagttcagttagcggatggcatgcccggaagccatctgaaatcacctctagagtttggggaccactgcgtgagacagggaaaagtccaaacccctctgagaaggggaagagagcagctggcgcagggcaccaagccttcagggaaaagccccactcgctgcatggtgagcgcttgttggtcccccatggataggagagaaaccaggcctaggctcccaaagtacagcaggggcctggaagcatctcccagggttgaggggtcagtggaggagagctgttctcactgtgaagactcctggggcaaagcgcggtggctcacgcctgtaatcccagcactttgggaggctgaggtgggctgatcacctgaggtcaggagttcgagaccagcctggccaacatggtgaaacttcatctctactaaaaacacaaaaatcagctaggcgtggtggcagatgcctgtaatcccagctactcgtgaggctgagacaggacactcctttgcaacccaggaggaggagcctgcagtgagccaagatcaagcctctatactccagccttcagagcaagactctgtctccaaaaaaaaaacaaaaaacaaaaaccctcagatgtgctctgctggcaaccagtccccctgcctctcctgagtggctgggctgagcgatggggatacagccactctgactccctaccccactgctgtctctgcttccctttctcaggcccagtgatttcttttctttttattatttatttttagacggagtctagctctgttgccaggctggagtgcagtggcgcgatctcggctcactgcaacctttgcctcccaggttcaagcgattctcctgcctcagcctcccaagtagctgagattacaggtgcgtgccaccacacctggctaatttttgtatttttagtagtggcaaggtttcaccatactggctgggatggtctcgatctcctgacctcgtgatccacctgcctcggtctcccaaagtgctggggttacaggcgtgagccaccatgcccggccggcccagtgattctttagcacacactggacacctcctgtgggttctgccccagacacttgagccttcttgggcagccaagggcaaagtggaacaaaaagaccatttttgccagttccgacacgaatacacacataatgcaggtggaaggtctgtcctgccttctgcatcttttgggtgcacaaaaacataaaatcaggcactagagccctgagggaggttggtaagcatgcctggctcctcagccaagaaggaactgtagtgcgagtttcaccaagttctatcagccagacgcatctcgacacaagccctctctaaagccagacccacttacctaccactggctacactgccagttacctccggcaagagctgtacaaggcctccacctctcctctcttgctagaggcccgaaagctaatgaagagcaagtaatcataaaccaagggacaggcggctgcaggttccttgcctgggacttcttggcttctgttccaacactgatttctcaaactagcttgctcaaatgcttttacttccctgaaccagtatgcaatcatgggatttataggaggttcttaaaagtagctctaaaggacagacattttcctttccatttaaaaaactgagccgggtgcagtggctcacacctgtaatcccagctctttgggaggccgaggtgggtggatcacttgaggtcaggagttcgagaccagcatggccaacatggtgaaactccgtctctactaaaaatatgaaaattagccagccacggtggtgcatgcctgtaatcccagctactcgggaggctgaggcaggagaatcgcttgaacccgggaggtggaggttgcagtgagcagagatagatcatgccagtgcactccatcctgggtgacagagtatcaaaaaactgcttatcctttcatctaccagcctcaccaaatgctcttggcgtcaggtgattcactgcaacgttgacttaagggtgcttttaatgccaggtgcggtggttcatgcctgtaatcccaaatcccagcaccttgggaggccaaggcaggaagatcattgacatcaggagttggagacaagcctgaccaacatagtgcaaccccatctgtactaaaaatacaaaaattagccaagcacgtggggcctgcctgtaatcccagctactcgggaggctgagacaaggggatcacttgaatccaggacgtagaggttgcagtgagccaagatcgcacccctgcactccagcctgggtgacagagactatctcaaaataaaaaagagtgcctttaattattaaatcgaagcaaatgtctttaacaattaagaatatacttaaccgggctccttcttgtttgctgatggtaacctccggggattctctctctgtttcagagggccccccccacaggaaacttcgcagtgatgcaccaggtatcatgccttcagcttcgcagctgtgtgttgtctcagtatccatttcttttctgcccaatgcgcccctctgcccaccccaatttttaaacccttgcacatttccacgagattcttgcaaaatctggaggcttggatatctttgtgcaaagctttcattgaaaccaagatcaggatgacaaatagacctcatctcttgacccactgtccttcctgcctctgggcagcacatgtgacatgacacccaacagtgtgcgcccttatcactgcatcttgacgagatggcagaggctgtgtgtgtagcttggatttttcttcctttcatgccaaaagccactcttacgtggttagggcactcagcagtgctgtcctcccttgtccagtgaagacactgcactgaatgaatatgacagttccactatctgggcacattcctggagaacgtacttggcttctagttggctggtctgggtcacaagtcagagatcacaaagttcacggtaactgcggcgcggcaaccagtcctcccatgattcagctttcacaggcttgtctgcgaaggaaatgagctcactgcgatgtctgacaaatgccgggggctgcacgtggcttgagtgatgtctagctacaaactgcattttcagcacacggggtggaagctgaccaccgcaaagccaagcacagtcctggcagagccttttctggaggcttcacgggcatgtacatgttcagggactggggagtggatacccaagactcaaggatgcacacagggcccttcccaagaaagcatgaagaggtctctgctgctctgggattttgcttttttttttttttttttttgagacggagtctcgctctggagtgcaatggcgcaatcttggctcaccgcaacctttgcctcctgggttcaagcgattctcctacctcagccttctgagtagctgggattacaggctcccgccacctcgcccagctaatttttgtatttttattagagacaggatatcaccatgttggccaggctggtctcaaactcctgacttcaggtgatccgcgcgccttggcctccccaaatgctgggattacaagcatgaccaacttttcacaggtgaagttaggccatgtggatctgacttcacctcatggagaggccaaaccaaccctcatttgtgtccatcttcatttttggagaatctcagctttgctgtcactaccaaaatacttaaagcgcagggtgaggtcttgttaagagccagttttgtgggggagcagatgagtttctaggacacttcaagcagctctcctaccagctgattgggatcataggataagccaaattccagggtgggctgaagtgcagaacccactggtcagtgggaaactgagtccttgcaaactagcaggtgcttacactcaagatgattcccgaggccttggataagctgagtccacgaatagaatccaaatgctaggccaggcacagtgggtcatgcctataatcccagcactttgggaggccgaggcgggcagataacttgaggtcaggaccagcctggccaacatggtaaaaccccgtctctcctaaaaatacaaaaattagccaggagtggtggcatgtctgtagtcccagttacttggaaggctgaggcaggagaatcgcttgaacctgggaggcagaggctgcagtgagccaagatcacgccactgcactccagcctgggcaacacagcgagactctatttcaaaaaaaaattccagattctccaggatcagaccctttaagaaaacctttaggggggtcccttagttcctgtaacaggtatagttggtgtcaaccttggtctaggatttgaaaccagttccaagaaaagcacttcagccaaaacagagtatcttgcaggctgacagccaagcaaggagcttcaacggcccagggcacaatgtatttcttaggtcaagggagcaaatttatccattaagcttttccagttagcaaatagactcttccaagagccaaaaagagagtgcctagagcactgatgtggaggttagggactacttcccagctcatcagatttttttttgtttttttttttggagacagtcttgctgtttcccaggctggagtgcagtggcacaacgttggctcactgcagccttcacctcctgggttcaagcaattctcctgcctcagcctcctgagtgactgggattccaggcgcctgccaccacgcacggctaatttagtatatttagtagagacggggtttcaccatattggccaggatggcctcgaacaactgacctcacgagtgatctgcccacctcggcctccccaagtgctgggattacaggcatgagtcgcagcaactggccaacccatcagggtttgaacctggagttaaaactgtgacgaagagagctgtgtggggagcgtacagggaacagtcaaactgctgctcctctgcgctgaatttgagcatccttctgagtcaagcgcttggaaaacagtgctaaaaaagaaaaagacttaagggtcacatctagagagagaaggatggagagttctctagtagggctgcaagtccagaagcttctctgtgaagctgggctaggagtgtttactttgaagtggctgcagctttaagtatttattcctgatcgctgcactgcgggaagtcccatcctttatagccaggtgggctttcccagccggggtctctcccatcctctgtcaacaaaagggtcatttgcgaattcctcttctcagtgatcatgaatctctgggccttgatttttttttttttttttttttgagacggagtctcaccctgtcgcctaggctggagtgcagtggccacatctcggctcactgcaagctccgcctcctgggttcatgtcattctcctgcctcagcctccctcccgagtagctgggactacaggcacccgccagcacgcccggctaattttttgtatttttagtagagacacggtttcaccatgttagccaggatggtctcgatctcctgacctcatgatccgcccgcctcagcctcccaaagtgctgagattacaggtgtgagccaccatgcccagccgagttgttccttttgactaaagaattggtcactgagttgtgttcatccttatggcttcttatccaacccttgcgtggggagcaaaagtctgctctcttctttgatgtcctaaaataagacctgtcttccgattcaggtcaaacagggccagatggccagagcccaacataattatttgttgcggttgctgaaaagagttaagtgtttcttctgaacggtgaaggctggcagcaggcagatctgatttttccttcttctgcccactctcttcctcctacccaaagtctcccctcacgtgaccagcccttcctgtgaagtcgaggtgataaactcaagagagaaccagcgcagagaggagatggcagcattaaggagagacaggggtgtcctactggctggagctaaaatccacctcagaggccaggtgcactggcacacacctgtaatcccaacactttgagaggctaagacaggtggatcgtttgaggccaggagttcaagaccagcctgggtcacatggcaaaatcccatctctgctaaaaatacaaaaattagccaggcgtggcagtgtgcacgtgcatgtagtcccagctactcaatactgaggctcaaggactgctggaactcaggaggcagaggttgcagtgagccaagatcatgccactgcactccagcctgggtgagagagactcttaaatttcttttttaaatccaccttgaaggccaggtgtggtggcccacgcctgtaatgccagcgctttgggaggccaaggtaggagaactgcttgagctcaggagttccagaccagcctgggcaacaatatcaagacctcatctcaatttaataaaataatccaccttggattaacacgtataatttccttttctaatattcactgggcacctgttttacgccatgtgcggtatgttccacgatcagcaaaacagatgcagcagtccctgcagtggggaaaactcagtccatgaacattcacaccagcagggggtgctgtctcgccttttaaccagggagcccctctgtgtccttctcaaggctgcccttgtccatttcaccttcttccaattcaaatcttgaaaactcacctctaaggcgaatgggggtgaggagatacagaagaaaaacagtatgttctctcttcaactctgccccatgggctatgaataaagtcagaagacaaaatcccctgcttggtttttggcgtttttttcctattctaaatcaaagaccacagcagaccagaatcctgtggcttctcaaatgaccaagcctgacatattgaaaagcagatcgtcttgctttgaaaaaccttctccacccacccccgcaaccaatttcagctgattaaattcaatcactcatgccttaagactggcaatgatttgttgacttcaacttgaatatctgcatcttatttgtgccgtgtgtgttttctgccataaaaaaaatttatattgcaataggactatagctacaagtttaaaatagatttataaaaaatctatcccaaccatgaagatttctttgctaaataatgtgttttcttacaacccacaggcgaggaaacgagacctctttcgttccttctagaaggtctggaggacgtagagttattgaaaatgcagatggttctgaggaggaaacggacactcgagacgcagacttcaatggaaccaaggccagtgaataagcaactttctacagttttgcaccacggcaagaaaaccaaaaaccaaaacaaacaaacaaaaaaaacccaacaacaacccagaacaaagcaaaacccagcagactgtacttagcattgtctaaatccattctcaaattccaaatatcacagacacccctcacacaaggaatataaaaaccaccaccctccagcctgggcaacgtagtaaaacctcatctatacaagaatttaaaaataagctgggcgtggtggtacacacctgtggtcccagctactagggaggctgagccaggaagaacgctccagcccaggacttcgaggctgcaatgagctataattgcatcattgcactccagcctgggcaacagagaccctgtctcaaccaccaccaccaccaccacccctactacccctgtattcaaggtaaaaattgaagtttgtatgatgtaagagatgagaaaaacccaacaggaaacacagacacatcctccagttctatcaatggattgtgcagacactgagtttttagaaaaacatatccacggtaaccggtccctggcaattctgtttacatgaaatggggagaaagtcaccgaaatgggtgccgccggcccccactcccaattcattccctaacctgcaaacctttccaacttctcacgtcaggcctttgagaattctttccccctctcctggtttccacacctcagacacgcacagttcaccaagtgccttctgtagtcacatgaattgaaaaggagacgctgctcccacggaggggagcaggaatgctgcactgtttacaccctgactgtgcttaaaaacactttcactaataaatggttataaatcacaa

SEQ ID NO: 82 - DNA, 6938 bp, Homo sapiens
gtccttcccacccttagtcccaggcatctgactaccgggaacctcagccagagtccgggagccccccaccccgtccaggagccaacagagcccccgtcttgctggcgtgagaatacattgctctcctttggttgaatcagctgtccctcttcgtgggaaaatgaaccagaagacaatcctcgtgctcctcattctggccgtcatcaccatctttgccttggtttgtgtcctgctggtgggcaggggtggagatgggggtgaacccagccagcttccccattgcccctctgtatctcccagtgcccagccttggacacaccctggccagagccagctgtttgcagacctgagccgagaggagctgacggctgtgatgcgctttctgacccagcggctggggccagggctggtggatgcagcccaggcccggccctcggacaactgtgtcttctcagtggagttgcagctgcctcccaaggctgcagccctggctcacttggacagggggagccccccacctgcccgggaggcactggccatcgtcttctttggcaggcaaccccagcccaacgtgagtgagctggtggtggggccactgcctcacccctcctacatgcgggacgtgactgtggagcgtcatggaggccccctgccctatcaccgacgccccgtgctgttccaagagtacctggacatagaccagatgatcttcaacagagagctgccccaggcttctgggcttctccaccactgttgcttctacaagcaccggggacggaacctggtgacaatgaccacggctccccgtggtctgcaatcaggggaccgggccacctggtttggcctctactacaacatctcgggcgctgggttcttcctgcaccacgtgggcttggagctgctagtgaaccacaaggcccttgaccctgcccgctggactatccagaaggtgttctatcaaggccgctactacgacagcctggcccagctggaggcccagtttgaggccggcctggtgaatgtggtgctgatcccagacaatggcacaggtgggtcctggtccctgaagtcccctgtgcccccgggtccagctccccctctacagttctatccccaaggcccccgcttcagtgtccagggaagtcgagtggcctcctcactgtggactttctcctttggcctcggagcattcagtggcccaaggatctttgacgttcgcttccaaggagaaagactagtttatgagataagcctccaagaggccttggccatctatggtggaaattccccagcagcaatgacgacccgctatgtggatggaggctttggcatgggcaagtacaccacgcccctgacccgtggggtggactgcccctacttggccacctacgtggactggcacttccttttggagtcccaggcccccaagacaatacgtgatgccttttgtgtgtttgaacagaaccagggcctccccctgcggcgacaccactcagatctctactcgcactactttgggggtcttgcggaaacggtgctggtcgtcagatctatgtccaccttgctcaactatgactatgtgtgggatacggtcttccaccccagtggggccatagaaatacgattctatgccacgggctacatcagctcggcattcctctttggtgctactgggaagtacgggaaccaagtgtcagagcacaccctgggcacggtccacacccacagcgcccacttcaaggtggatctggatgtagcaggtaagacattttggtggggagaaggcttctggaagaagggctgaaaagttgtttccattagctttgggttttatgtagattatcccagaaaggaagacgtggatttttgtacttccccttttgctggatgggagagagttggctgctgagttttatttggatcttagctcactggctgggtgcaaagctgcagccttcctctacgtgacctcatccaaagatcttgggaaatggccgagctcagggaggaggcaggatttgggctaacagtgtccccattgccctcttctctcccttgtacttatatgggctctgctgctgggagcagccttctgtttgtcagctcagttctgtgtctggcctgtggtggtggtgttttggaggatctctttgcattctaccacgtccctggcatgtgcaggtcagtcattccaggttgtacatttcctttggagatggaccctcctccctgattttccttctttctctgggcacaattcacctaagtgtgaggggtcacatggatcccgtggagcattctggatagatcctggagtctggtcacagagagagccaaggctacatgatggcttggagtcttcatctttgtcttttcactgtctttccccacattgagtcagtcaccaggtgtttttttttggttttgttttattttgttttgtttctgttttgcacctgcagtatctcggcaggtcagactgtcatgccgtgcaggtgccagccctctctctgctgtttttgctcttgttgctctcagagccaagagccactctgcacccagagggcctcccatccacaccagcctgccctttactcagctctcactttcgtcatcacctgtgggatcctgtctgcagaaccccctcaaaactctttccttcacggtgcagctccaccctgccttgctgtgctctgcacagctacacccaaattctccatgtccctggacacgcacttcacatgttacagtcaggcatcctcctgtttgcttatgctttgtctctgcttagaatgtccttccatatcatcttttctggtaatgtcctttaaggccaggctgaaaagttgcccggaagggcccccttttcctgcctgcaactgtattcctgtgatccggaagttgcctaggccatgctcctctcacaggacaggccagtcagtggtttgtctgtctgcgtggaaagcaagagggtaaggatgatcattcatctctatccccagggacgagtacagtcctctctgctaatgaatgttgaaagaatgaatgagtgaaatggaatgaactccctgatgaagtattttaatttacaggtcaacagctttggctaaaggattggaggtatcctggggagagggaagagaaggaggggcacactcagttctgggctgctctttggcccccactctgaagccagatgggggcagagtccagaggggccagggcagttgcctgacaggccctcccctatcccaccctgagcaggactggagaactgggtctgggccgaggatatggtctttgtccccatggctgtgccctggagccctgagcaccagctgcagaggctgcaggtgacccggaagctgctggagatggaggagcaggccgccttcctcgtgggaagcgccacccctcgctacctgtacctggccagcaaccacagcaacaagtggggtcacccccggggctaccgcatccagatgctcagctttgctggagagccgctgccccaaaacagctccatggcgagaggcttcagctgggagaggtgagtggcgggcagtcagagaggaggggggcagtgagagtgggaaaggagtgttggcggacactcagctcacactgtaggtgaggggagagctctctcaggaaggcttttcttttccttttttttttttttttttgagatggagttttgctctgttgcccaggccggagtgcagtggagcaatctcactgcatcctccgcctcccagtttcaagcgattctcctgcctcagcctccccagtagctgggattacaggtgcacgccaccacacatggctaatttttgtatttttagtagagatagggtttcaccatgttggccaggctggtctcgaactcctgacctcatgatccaccctccttggtctcccaaagtgctgtgattacaggcatgagccacaatgcctggccaaaggtttttctagttatccaaagaaaccatgatgggcacattttccccttggaggctaaagcccaggagtgagaactctcttctgttttggatgggagaggggttgtactgttaaatggctggggataaacaggaggacttgaccccccttagggtgacgtcggggattctgtagcgccgagtcagttgtgtgactgcaattggggaagctgagctctgagcactcagttccctttcatcataatcaggcagcaggatggggtcaatggccatggaggcctgaccagtgcctccctaggtaccagctggctgtgacccagcggaaggaggaggagcccagtagcagcagcgttttcaatcagaatgacccttgggcccccactgtggatttcagtgacttcatcaacaatgagaccattgctggaaaggtcagctggccggggtagagggtacaggatgagccttgctttctcttgggagggtccctgaaaaccacctgcacttctcaggggtggtgctgattcctgccttctgcacttcagtatatctgatcattatcctttgagggaaccttcctgagctgggtgtccatatgcagacactgagtgaggccctgggcctgtccttgagatcttagagccctcttagttccagtttcatggactgagtcctttccaggctccaggactcaggagggatggaagttaccagggaaaatgacatctcctgtatctgaagcttctcccattcctgacttgatgaatttcacaatgttggcctggttctgcttcccaagcgctggttctttttcctccacccttctttcctcagttgtggggaactcttggagagttaggggaagaggagctgaagtagcctgtgggtgtcaccctctgggggtagataggcaatgggcgatatgatgggaaatgtcagagatggaggctgcaagccagggacagggaagcaggtgttcctaatatgaaatggactacttatgctttgactcctacccagcaggaaaaaatgtttaaagactcatgatccttgggctggtgagctgaatccctaccagggcatgtcctcagcaaagccagacctcgtgatcctctttcttctcccctgctaggatttggtggcctgggtgacagctggttttctgcatatcccacatgcagaggacattcctaacacagtgactgtggggaacggcgtgggcttcttcctccgaccctataacttctttgacgaagacccctccttctactctgccgactccatctacttccgaggggaccaggatgctggggcctgcgaggtcaaccccctagcttgcctgccccaggctgctgcctgtgcccccgacctccctgccttctcccacgggggcttctctcacaactaggcggtcctgggatggggcatgtggccaagggctccagggccagggtgtgagggatggggagcagctgggcactgggccggcagcctggttccctctttcctgtgccaggactctctttcttccactaccctccctcgcatccgcctctgagccaggagcctcctgaccctgtgatgcctgacacaggggacactgaaccttgttgatgccagctgtactgagttctcatccacagaggccaggcatggcccagcctggagccgtggccgagggcttccctagatggttccctttgttgctgtctggctttcccgaatctttttaggccacctccaaggactctaaaagggggctattccctggagaccccagagtagggttgccagtcctgcaagtccatagctgagctggaaaggatgcttctgctcacattccctctcatccaggtcctttccttctcgtcttcctctctctcacctacttcctcctcctcctcctgttcctgccttctcttctatcctgcaatttctcccgaatcctgaggggatatccctatgtcccagcccctggtactcccccagccctcagttttcagtcaagttccgtctcctctccagccctatggaagtctcaaggtcacgggacccctaatcagagtggccaatccctgtgtgtcgttcccttgtgtctgttgcttattgggagtaggagttgctcctacccctgtcctggggctgggtgtgtttcaggacagctgcttctgtgcatttgtgtctgcctgcctcatgctctctatagaggaggatggtcatcgtgacagcagcagctcaagttagcatttcaagtgatttgggggtgcaatgataatgaagaatggccattttgtaccagggctctgtattctgcaacagcctgtttgggaggctggagtggaaacaaagggtgggcatcaaagatgagaagccaaagcccctacaactccagccacccagccaggaggggctgtccaatcacattcaggcatgcgaatgagctgggccctgggtgaggtgggggtctggcctagtggggaggggcctggcctgggtggggcagggcctggcctggtccaggcttgggctccattcccatcactgctgtccctcctgaggtctggattggggatggggacaaagaaatagcaagagatgagaaacaacagaaacttttttctctaaaggactggttaaatcaattctgatacagccttacaatacaatagtatgcagctaaaaaataattgtatgtctttatatactaatatgtaataatcttcaggtgaaaaaggcaagccacagaaatgtgtatagcgcacttcccatttgtgtttcagaaaggagtagaatataaacacataattgcttatgtatgcctattcagaataaatgggtaacactgattacttttgggaggggaaccagtaggttgaggacaggagagggaagggtcttaacacttacacccttttgtacattttgaattttgaaccatgtgactgtattacctattcaaaataaacaataaatgggccc

SEQ ID NO: 83 - DNA, 57727 bp, Homo sapiens
attgtctgaggcaaaaagacatcaagtcctttcatgctgtcctgggaaaggcggtttggaacaagttatcctgattctagagacgtgagtgttcccagctgcaccgtgacttgtttttggctcctaggcaaagtgcccagtttcctctgctcccaaatttctccaactgcaaagtagagataatccttgttacctttttcttgcagtgttctgaaaataaatagggcaaataattctaaagtgttttgagagatttggctgagggcatatttgcctagaaatgtaggtgggggtttttggtttattttggttttattttgtttttgtcagtgtttttgcttttggccagacgttggcatgcatttagaaaatctaaattaaattaaattaaattataattattcatctgatgataatggaacatttacaggatgcaaagcactgtgctaggcaccaggagaatgcagaaagggcacatccccttccttcaaggagtttacagctttctcagaagcaggtatgatatatatatgtgtctatatcacataatagagggattatagataagttacacaagtgtggctgtcagccatggtagctgatttggaatcccatcctgtaagttacagttggataccctagaaaaaacacccttactaagctttggtttcctcttatgtaaatgataatagctaacatttattgagtgtctgctacgtggcaggggtgttctatgcagtttatcatgttaactaacttaaaactcagaacaattgcagagatagatattatcatcatttccatatgtatatccctgtcttatagataaaagcactgatgctttagagaggttatataacttgtcccgggtcatagttaggaagtggtgaagataggatgcaaatccaagctggctggcctcaaattctgccaatccaaccactgtatgacactacccctcaaatgggaacacagtaaaacttaccatgcgtagtgaggatcaactgataataacgcataaaaagctgttagcacagtgtctgacacataataaatgtgtgataaatgtagaagtagcagtagaagagattagacacatacaaacaaccagaatcccgggccaaaaataagtgcacacctccattctttttatgggaaacctccttcttagataccaaccattataaccatggagttacagtggagagctgtgttgaggggagaactgcaacatttctgaatcagcatacaagtgatctataatataaggagcaatcatttttatatatgtccatttccaaatctcattcaaagaaggttaaggtatctgaagtacccttctattaaaattcagactgtatttgctagaacaatttccaattgagcaacgtaaaaatgcatctgctgccatttctcttcttccctcctttaatccctactccccaatttcctttagaaagaaacaacagcatggagtttcttttcaaggtcttaaaataaaaatctccaaaaaagggatgctgcttataaaacctttcagagttgtttgaaaaagaaaaaaaatgcataaagagccaagtgcttatattctggccaagttatgaggctctgagaacaagagcttgaggggaagactgttaaccccatccacgccaccagaattagctctttcccttttggtttgcaagcactgcctgtaaagccctcgcatgagaggccagcctgctagggaaatccaggaatctgcaacaaaaacgatgacagtctgaaatactctctggtgccaacctccaaattctcgtctgtcacttcagacccccactagttgacagagcagcagaatttcaactccagtagacttgaatatgcctctgggcaaagaagcagagctaacgaggaaagggatttaaagagtttttcttgggtgtttgtcaaacttttattccctgtctgtgtgcagaggggattcaacttcaatttttctgcagtggctctgggtccagccccttacttaaaggtaagttgtaataaatttacggcattatctaattgcatttgttaagctgatttgcgtgatctgataaagctgtcaaatatttttgcctaaataatacaaagccatttatttaccaaaaaaagttttgtgtgatttacagaaaagatacttcatagagaattttaccatttgtattcatgttttcttgtttcctgcgaaattaaatagcaagtactaataaatgatggtgattttagtgaagaccaagaatagaaatgtggaactgttgatcgcctcagtagcattcagatcttagtgaagcctgaatcctgaaatgtgttttgtagaagtactttattacatatatgaaataaactataaagaaggtagtttttaaaaaaaatttcaaatcaaataatttgtatgttttccatgtttaaattatctaaagttattcaatctcctgagcctaacagcaatgtagaaacggaactttttgcttttccaaaaggtaggaaaatttctccttttatactatattcttgtttgattatttttaagttattgcgattattttccctttcttggttcccttttacagctttataactaattattttttgcctcctactatcatttgttaagatgctcacacatagacctaaaatttctctaattcttgataatgtcttatttacaaaagcaaaaatgggagaagagaattaaagagctaaagagattatggtaactcatattataatgtactaccatttctggctctcttttctaaaataaagcaataatgtaggttgtgcttattcatccttcccaggtattaaaggtcactctgcaagagaaaaaaagaaaagaaaggaaaagaaaagaaaaaaaaacatgcttttaactgcagatcaatactgttgaaacagtacaccaagaggtactgcagaaagagtatctcttttgcactgcctttaatctgcaaagaggttaaatatgtcaccttggcattgtatctgagctctcctctggcccagggcctaagcacattgaatagaaatgttcactcagtccaagtcagcagaaatcttttttttttttattctcccctttctcgtagacaccagcttttttcagttcacagcttactcagtcaaacctgatggttgtgactattgttaactatgattttttttttattcaaaacaccctctttggaaagatttaagttaatatttctgttcatttaataagatctagcaaagcagagcagtttatttcatctacttatcgtccaatcaactagtgccactttccacattttggagaagaatattcacatgttatttatgaaccttgcctttttctttcagagaatttttcacacagccattgagcaattagagtgctggcatttccttcctaggtcttttgagatttaatccccagtagctcctcatggcacagattcacatatcaactaagtaaaaataatagtgatgacagaaataaaatgaatagtgatgcatctggacaacttgaaaacattatttatttcatttcctcttgactgttctttttactcagttgacttaaacactgctattttacttaagtttagcaccatatccagaactggttgggaacatttttctaccgagaagggcataaacaacttgttagaagatctgaagtgcacatagtcctcacttatccctctagaatgatcttcagtggagaaggagacccccataaataaatccagtagaacttcccagtaggcctggcttcctgagagatgtccaaccaggccagggtctgtttcttacggggctcacagggcatcttctgccaaaggctgagttagcgatgatagcattacctagggctagcctggcttttgtcttagtcatcaaaagatggatagaactttgaaaaacagagtgcatggtcttgatgattgttccaaaggtggggaggcaatctaataaagtgaataaggccatgacctgtggtttatatctgaccatatggaccctgtttatataagaccgtggtttatatccaagctttaccacaaaatagctctgtgactttgggcaaacaacttcatctctttgtgcctcagtctcttcattcatggaaatgggattataaaatcagtagctacctcagagatttgttgtaagaattaagtgaagaaaagagccatgtttggtacattaaagcaatcaatcaatcgtagataatatgaaagtactggactaactatatgtccctattgaaactccgtagaacgggaactgactctagatattttctcagggtttcttccttgtacttatacgttttgctctataataaaatatgaatgccaggtgtatgcctctgaggcagcacagcagagtggacagagcatgggcttcagagtccaatgcatctgggctagaatcctgactctgcttcttacaatcagtgtaagctttggcagttacttcccacctgcatgactcagtttactcatctgtttagcaaaatggggataataatacacacaaatgaggtcgttgtaggaatgaaatgtgatgtttattaaatgccaagtatagcacctggcagagaagtaaacacataggaaagttgactggttgctcataaggaatctcgtatatcagtgaggcctctgttacatacttgcaatgatttctctggtagtaacaatggagatcaagaaggaaatattctttgaattgccttttttatccaaagaaatgtaaaagtaaatcggacactactattttcccctggtggggggcctcaacacgaggtatttattactatgagacttcactgctgcatcagttagtagcttcttaatggccaagtcaaaggaaaccaaagaaagtgttctatgccagcttgccattacacagagtgagaagaaatgctgctttgctgtcaattctgttttattggcccacttggacaagagggaaagcccccaacatttcttctttcttatctcttctaaaggcaagaatagggcttttgacttgctccaggggatattttttcctctctaactgaaattcaagtgaaagagtcttttttttgtttttttgtctttgtttggtgtttttgtaaacctctcccctatgttcctagcattgaaatgtaagctgctttttctggctgcatgtagcaggagcaggctgtcgtcatagcaatgaaagggtgtagagagactcctgcttcatgacctgctctgggaaataactcttagtctgctttaaaatccttctttagaaatgaagtctccagtcctggcttgtttccttcctattacacaaccaacttatgtacacccattgcagtagctaaatgtttcctttaaagatttagtgaataggtattttaaaaatcaacaagagagctgctaaaacagtggctagtttactgtggcatacaggggaaaaacaactgggaaggcaaagaaagagaaatagaaatggcctcacatgatacacatactgcagcaaaccctgcaataaatccatttttcaagttcccactgcttcctcccatcttcacgatgtgctatggtgtagtggttatagaggggaattctggggcagactgcctggacttgaatcctggcactcataccttctagttgttttaatctaatccattctgtgcctctgtcttctcatctgtgaaatagatataataacagtcataaaattgtcatgggaattgaatgagattgagcatgtaaggcatttattacagtatctaacccatggtaaaggttggctgctaagctcaggagcctcagtttcccccacttgtgaaatgtggataacagctaattcataagatcattgtattttttttttttttgagacagagtcttgctctattgcccaggctagagtgcagtgacatgacctcagctcactgcaacctccaccacctgagttcaagtgattcttgtgcctcagcctcctgagtagctgggactacaggcatgtactaccatgcctggctgatttttgttgttttagtagagatggggttttgtcatgttggccaggctggtctcaaactccaggcctcaagtgatctgcttgcctcaggctcccaaggtgctgggattacaggtgtgagccaccatgccaagatgatcattgtatgattaactaaaataatgaatgtacatgctcaataagtagtagttattacaattctttttcatggttttgttattgaaacagcaaggttccagtctaggtcctgctgctcacttcgtagaaagccaatcactgagacaacaagtattgccaatgaagaaggctttaatcaggtgctgcagctgaggagatgggagcacagtctcaaatccatctcactaactgacttaaactaggggtttacatagcaagggaaaaatgtaacaatgtgtaagaaaataagaactaggtaggggtaaggaaacaatcatggtgaataagcggtcaggcatctgctgcagtgatctggtgagtttccattcttttatacttttttagaagcctgaaggtcctgtcctgaggaaggaacttagataaaacaaatataagtttcacactttaagaccaggagggtcaacttctatgtttttcaaaaagatctgtctgtgggactattgggtaagtttcagtttgatctaactctgacatgaatggcctttttgaacttagaattcccagtgagtcaaatataatgaatagaggcctcagaattatcattgcataaatgtgaaccatttgatttctacagggggaaaaaaaagaattgtgactttttacatttataaagactcatctcatcttgattaacaccagggtaaaaagtattaaaacatcttatctttcattaactttttattacgtttctgtttcagttcctccagtgttttctaggtcatgcaattatgaaaataagttagcatttttatcttacatctcaaacaactaatgtattcagtgttctatcccatgcaaaattccagaaatgcagcaaggagcaaaactagagaggggctgagctcttgtggtgcttactatgtagttatgaaaatggtcattaatcaaaccatcacaataatgaaaactgcataggaccaaacataaggtgcccccaaatacaatgccatcttcatctttctagtgagaacatcctcaaccaaagtgtttggccaaacagcatgtacaaatgggtaatatattgtaatgtacacttgggatatttaatctatggttcacatacatatttaatatgttactttaatttaaatattttatacttattaacatgactttttcctttctcacatttcatgaaacaattttgttaaaactcttcatacgcatctttaacaccaatgtgtatgttcactggatccacgctgtaattatctaatacagagcacatcatcaatccttctgcaagttgctaaacatctgctgatgctgcaaatttaatccccaggcattagtcctcactcgtggtcatgttctccacactttcattactgactagattgtttttccagtgctttttaaagggcgtatttaaaaaccacttgaaactgtaagtgtggctttctaaaactatgtgattccaacttgcaataatgaagtcatacctcaggaataatgactaaacctgctttaaatatctttatctattttttcatccattttgtcaaggtgaccttcctaagaataaaaataagcattgcttgagattttttttttttttgagacagagtctcattctgtcacccaggctggagtgcagtggtgtgaccttgggtccctgcaacctctacctcctgggctggagcaattcttctgcctcagcctcctgagtggctaggattacaggtgtgcaccaccacgcctggctaattttttgtacttttagtagagacagggttttgccatgttggctaggctggtcttgaactcctgacctcaggtgatcacccacctcggcctcccagagtgctgggattacaggcatgagccactgtgcccagctcttgagatgatttctaattgtttttttgaatagtactttgctgctcaaaatgaagaaactttggaagcacttgaatataagtcaaatccctcttttttacggcaggatttggtggcgtgagaaaaaacacattttatttgaacacatgccatatataatgatacactgaaataagtgttatgaaggcaaaacacctttgttccaagagagtatataaggatcctgacctccactcaggatcaataatggctttccttgatctgaagtctgaatagaggttaactctgtgtgtgtgcgtgtgtgtgtgtgtgtgtgtgtgtgtgtgtgtgtgtgtgtgtttggtggtggtggctgggaggagcgggtgctggagagagaattctgacagcgtgaacacttgtgcaaagaccctggagcaagagggatcgtggcctatttgaggcactgagaggcagccagctcccgagagcaagggcagagcagtggaagatgtaaatctccataatactcccttccctgagcactaaatgtatgtgccctttgcttgattcaggtttaatgtatacttttaacgtctggatggatttctggttagtctcaaagccccaacaggcatgaccatgtctatccctagctcagactcttatggtggtaggttcaattaggaaggatgatgggcagttgaaggtcagatgcccagaaaagtcttaagtcattgactctgagtatatcatatacactcacagggctgggacaccttgatgtcagatggtgactcagcagagaactcaaaatagaagaacgtctttttcacccttcagatgactttagggccaaaccatagagctctccccagagactcattaatactttaaaagctctaaagcatcagtgttaacactggatcaggtaacagcacgtatatgttagccaaaatatgactaagagatttgctctctgataacaaggcctttgactattatgtaaaaacaaggtgaacaggaacgttctgagtctgtttataaagtacctataataattgttttgtttactacatttcccagaaaggaaatttttccatagttgtaataattgctaaaaatagcagtctacaggcttcctctgatataaacaaattcaacagaagatacctggccttatttggatgcatggatgtacatactccaggaaatgataggccaagagtaataagaaaaagaaagtaacaagacaaacctctcctttttctagtacacatggtatgtctttcttagttcattaaactttagacaaagtgataaacagatcaagttgtcatcatctgccttgaaacccaaaaatattgaaacaagttccctaggcccagaagggaaggaagaggacttgtaaattttgctgaggctgccacagaaggagctaaccactggagggttcagactggagggttcagaaaccaggggaatgctaggcaacacaaggaaaattcaattagaaagacttgaagcaataactaccagcactaaaatttccagggagtcactgatgtggccaatatgaaagaggaatcctgttcctcctttcagaggtatggatgactgcgtttacagtctggttcagtgttcagacagcttattaatgcttaagagaaaaggaaagagaaggaagatagaaagaagaagtacagcaaggcaagaagtgcccaggggagcaggtgtgctaagttgatttaagtggcatggcaatatacagaacttcaaaaataaaatttatcttttaaaatttaaatgtaaattaatgttctaaaaaactataggaactgaaaataaatcaaatacaaatatctacttcgacctaatcttactgtaatttaagtttctaggaaatatcatagaaactgaagtggaaccaattacagaaaaagaatgcaaaataaaccatagtaccgaaaataaaaacatattctggtcgtttgtgtaggttccctaataaatctagacggagaatgatgtttttgtgttttagtgtatgccaaactttagacaccctcctcttttctaggagatacaaatttcaggagcgatatttagctattacacacatagcttttcatcagagatgggggtagctgacacacacatggcccattctgcccatacctttcaggtcaatctctgatggcttggctgggctgtttccagctagcagaaaggatattcaggccccttttccttgcttttccagggacagagcttgtagagtgctgagaaatccaattacaacttcctttcatggtgaaatccaattacaacctctcccatggtgaaagccaatctttttgatacaaaaggaaactaaacaaaagggcttcaggcaggggatatgcttgtgctctgccttctcactttgacaattatgcaggaaggttgcaatgaccttggcttgccttgcttaggaacaaaagtcataatcttctaccccctactcccacaaaaaggaaaaacgttttcatatctgattccaggagtttggggagtttcctcaaggatccattagtcaggcaaagcaaattttgagccaacacttgctccctcccacacacttttttttccggcaagatgacttttcttattgaacttggaatgccatgttaaatgataaataaattagtgaattatttaggccaatatcctcccataatctgttcccaacaacttttttttttttttttttttgagacagtgtctggctctgtcacccaggctagagtacagtgtgcagtggtgcaatctcggctcactgcaacctccgcctacccagctcaagtgattctcctgcctcagcctcctgagtagctgggactacaggcacctgtcaccacgcctggctagtttttgtatttttagtagagatgaggtttcaccatgttggctgggctggtcttgaacttctggcctcaagtgatccacccacctcggcctcccaaagtgctgggattacaggtgtgagccaccgtgcctggcctgtttctgctacctttgtgatatccaatgctgtgtgtcaccctttcagccaacctgtttgcttgaggttagtgagactgtagtactgcttggagaggggtcatcctaaattcctaaaacctggttgagataaacggaaacagttctcaaaacagtaatttatgaaaatagatattttatgagtacttgacacaagtctataattgctgagatatttaaaaataaaattactaaccacattctattcaaatctctgtcacttctgtataatcactgtactccactgaatgtgtgtaaaatatgtatttgcagcttatagggaaaaaaatttgcaaattttcagaagaatcatgcagtcaactaataggttcttagttgaagattagtggagtggggagtggtaaatggttatctttttcaaaacttaggacaaactttacactaggttcaaataaaagtgctatggctacagagttaatgaacccaccattcaaagtggccctaaatagctctgaaagcaaagcatttttacattatttgattcaacttgagttatctaattgcctatataatatgatagggacccaggccggacacaatggctcatgcctgtaatcccagcactttgggaggctgagtcaggtggatcacttgaggtcaggagttcaagaccagcctgaccaacatggtgaaaacccgtctctactaaaaaatataaaaattagccgggcgtggttgtgtgcacctgtagtctcagctactcaggaggttgaggcagaagaattgcttgaacccgggaggcggaggttgcagtgagtagagatcagccactgtactccagcctgggcaacagagcaagactccatctcagaaaaaaaaaaaaagatagggacttgataggaaggtaccctgagatatacaaaaatcagaagaattgacctttatgataggtaaataaaacatgtaaatggtttcatgacgtgtttggtcagatgttcatgctgtcttagctcattgaaatcatttttaactttcaagccattagttcagtggatcctcccaaccttttactggggaccaaacaattttgagctaattctctctaaatcaagggagtattctattagaattcagaagaaacaaagcacaaattcttaaccctaagtgtcttctttttctctctttttcttccctgttgcccaactccagctaatgggttttaaggactttataatgagaagcaggttaatgtcttactagaaaaacttttcaataatttcctaaaatatggggagaagaaaatagtggaagatgttgttataaaatagaaaaatgcttggttgaaaccttggtactcgtattgatcttgtactcattagctttttggataggcataggcggggaagagaagtatcagcatcatctcactgataaaaacagctgatgtcttcttacagtctgaaaatgaagccattgatttcaaaagcaaatgttttattatactttgaaaaacactctggattggatcattcaaggttatgatagcctgagataactgcagcctcaaactcccgggctcaagcaatcctcctgcctcagcctcctcagtagctgggactacaggcacgagccattaagcctggcttgaggggaaaagtcttttcccatggtgggaggagaagaattaacagctgtggaccagctgtgggcaagctgtgtcttttccttgcttgaaggcatcttcttaacattttctctctgaaggcataaataagcttccaggttttcaccctattttcaaagaacttttcaaactctagccttaaaatccattagggtttattacatctgcttctttcagaaaaggtagataataagtaactttgcaccactgaggtaagcaagcaattgtttcccatattaaatgtgttggccctcaccaaggtacatgagaagcttggaccacgatctgaatcctaaagggacttctgctgggactgaatgcttgcattagcggttcacacaagaactaaatgctcatcaaagtacaccattattccccagaaggtcccaacaccatgagaatgaggctacttggaactgttctttggtattatttgttgtttttcttaatcctagaagagaactaccccccaataaataattcttggtccattcacagagctgaaagcacttgaaattcctctcccaactagcagaatttaacaactgacttactctgttagcaaaagagaggcaatttccactgaatccaaaggagttttatattatactggtagagtttaactaataagggaaattcaaataagagcagtcagaggataaagccaagaactaggcattcaggggaaagaaattacaggggtagtagagaaacaaataaattaaggggtagggagaagagttaaaggcagaaaaagcagaggattaatctatctgataattacaggggctaggctttaaaaggtgtattgtcttactattaacaacatgaagccaatcattcagatattattaagttactgcaacgtcacaaacgccaggactttaggtgagccatcctaagagcagattcagggtttgtgaagccaagagtttatacatatgtttggaaccttcttttttaaaaatataaaagtcaaaatcaagtctagaactttgtatggaggctgcacaagtgaggggccttgaaactcaagcttcctagttttatggcacgtctatcctggccatattcaaatgtctataccccaaatacaacaaaaagttcagaaaaataaataaatgtaaatatgagaaaatcctgtgttctctttctctgagaaagagaaaatagtagcacagataccatagtaggacttgagcaaagaaaaataaatatggccaaaataatgtctcccactataacacaggacagggtgtggtggaccctttctgaaggattggcaaatgtctgagaaaaagaacaggcaactgtctccctggatggatccatcccatctggagctctggaatgagacacagtgagattagtgagtggtatgataagacgagaaactctgaaaggcatgattaagagatggtgaaaggtggctattgcacaagcttgggtaagataagcctgggggatcctctaaatataattaaagtaatccctcaattacacattatagaaaaggaggaatggactagtttcgcctgagcaagaaagaaacagacctttaagaatgtgtctgaaaagctgtgcctccgggtgccctttggcttccatgctcctcactgctgaccaggcacagtggcaaagagggatggtcaggaagcactcactgaatggtagttctgtgaaatggaggtgagggtcacagatgggagtgcatggatggtacacaggtgaagtgcttagcatagaacctggcatatagtaaaatctcaggaatgtatatgccattgaatgagctactattaaatggtctaagacaaaaatgtactttttcaataaaataatactttgatgaccataagtgattctactactgagtacatttgagtgctattccacacaaaaatatttaatgtttacagccaattatatatggcttcttacaaactcagtgactcaaagcaactgtttcataatgtctcgagatctggtgggtcagaaatttgggcaggcctctcagaggtactcagctaggagatgagctgatctggagtggcacaggatctctccactcacgtgtcctgcgcatttgcaaggacagatgcaaagctgggattggtagaactgttgaagtgtcttctgtgacatgacagactcagaaaatggctcaaggctcccaaaatgagttttccaggagattaggtaaaagttccaaggtttcttatgacctagcctcagaagtcccagaacatcatttctatctcaatcaattggccaagtaagtcactaaacccagtccagattcaagggaaggagaattagactccacctctcaacaggagaaatagcaaagaatttatagcaatctctaccataatatttatacctattaaataagaaatgtaagaaattgtctcaaggcagttactcatgtgagttagaatagagttgacatttgtgggtgtttggctcttaatgggagacctatttctgccatgacaaatgattcctctggagatttgttttaatggtacatgggtcagccaatagaaaaactctaggcatttgaaattcaaatgctggatgttctctataaaatgctgtctagctatcatcttttaaaattccagctgaggttctcctgaaagtttggtaatgagacaccctgttcctaacagaaggaaagggctctccttccagttacctatcatccctcatctttaacctctctaaatccataaaaagaaacagtgggatgaagaaaagaaagaaataacctaaggactctagtaaagggatgaattaaagtgtctgaattattcattattggggttattaagccattttctgccttatgcatgtttcaaagatatgataacatctttcatttcatttttacagttggtgaaattaccaaataactataggatcacatttgaatctcaaaacaactccagaagatagataagaaaatgtaatattacctttcctgttttgtagatgaagaaaccagtgacttgatcaaagtctcttagctggtaaaaggcagttcaagtctggaacttagatcttccagttccgtaccaactgtcctttaaactatgcagctgcctttgaataagctcacgcatttgagcaaaataatattgatttagtttcacatcaatactgcatatttaagtctttgagaataataattctgtgaattccaaaatttgtctcatttttgcatttttcatctggagttttattttctatttctgcaaaaataatctgtattttgtagtcagtgcacaccaaactcgaatgtctcaaaataaatgactttttactcatccaagaataaatggtattcatcatacttagcaaggacatcatggttttgatttttcaaagtactttgcaagcatcagctaattaagcctccctgagtcttcagtatgacagttgttttcaaaatatctctcatttcccaggaaagttctccattctgtcttatttatacaatcagcacatttgctcagttcttaaaataagaagctaaaggccatgaaattatttttgatcaatatgtggcaaatacaattagctcagtgagacaaaaatgcccagtgactagtctaaaggacaacgtggaacacaatggaagaacacaaggcgttttaaagtctagatactggattgtcccacaaggtccttcaaaaataaaacacaggcatcttctttataattgaaacttgaaggggtttcctgcttggatcattctaaatgacatgaccatactctgcgtttaaattttgttttcaattacaggatggaaaaaaactcttaaaaaatagttccatctttggactcagtaaaaatcagggaccattcagtaaatgttggctctcaaaaagcctgcacaagtggccatctgaggttatatgacaatccctagacttgttctatgccttaaaatatcttccatacagctacgccaggattctcagcattcgatagctctttttgggttaagaacaatgtgaacatacctcttacctgagaatagaaatacattaattcaggaataatcttttttcttttttttgagatggagtctcactctattgctggagtgcagtggctcaatcttggctcactgcaacctccacctcctgggttcaagaaattctcctgcctcagcctcccaagtagctgggattacaggctcatgccaccacgcccagctagtttttgtgttttcagtagagacggggtttcaccatgttggacaggctggtctcgaactcctgacctcaagtgatctgcctgcctcagcctcccaaagtggtgggattacaggcatgagccacaatgcccagccctaattcaggaatattcctatttcctcggtatggtttagatgcatgcaaaaaacaaagatttaaaagtatagaatataggataggtgagtttgtgtttaatgagtgaactaaaagtaaatatgttctggaactagctcctgggaagcttgaaatcccctaggggaggaagatacggaaaaggggaggagaaacactaaggttcttttcccttatatcacacttaatacaagacatatgtagttaatacaagatataaatgactctaatgatattactgatgacaggcagcaggcagaacaatgaaaataataatcatttgcatgtgtaaggtacttcagagtttgcaaagagcttcctcacctcaccttgcaaggagctacctttgacatcggaaggaactggtattcccatcctatatatgaagtttggagagagaaagtaatttgttcaaggtagtatttagtacttggcaaagccagggcccaaagccagaacttctggcttctagtctgtagcctgttcactagtctgtttggggagaatattggatactgagtccaaagctcagcgtttctaattcttgcccacctcttaagccttgtacatttggccaaataatttagactcttcaaatttctgtttctttacatttaaaaattctgtccctcctttcttcattgaatcaaatgagacagtatataagaaaacactttataaactgtgaaatgctaaataaatacaaggaatgtataactaaatccatcttaataagttaatattccttggaaccctgcctcaagacatccttacagttaaactttcctcccttttgtgttaaagaataaagagttcctccttctctttggagttaaacctttcacatgtgctttaatagtagaccagtaaatatgtatccaggatttaccaagatggtattgtctcacttaatcttcatactattttatagacaatgagctgaagcccccaaaagctacacaatttgcttatttacgcaaattaagtattacagcctatgacatcctgtttcagaacttatgcctttaattgttatgaaatattgtcttgctaatggttttggcaactggtctgttttgccttattttggttttcggttgctgtaaaacagtatgctctcacattaaatggcttaaaatcacatccctgtatttgctcataattctccaatctggattgggctccactgcatgattcttctgctgattttgtctggagttaattcatctggcttcagtgagctaggaacacatctggggctgaatcatccaggagggtctgttatcctgcaaggttccagccacatggtctctcatcattcaatagtctgggtcaagcttttgtacagcatggctgatagcttccaccaagaggaaaaactccaatgtgcaaaggtttaccaagtttctgctggcatcatgcttgctaatgtcacattggtcaaagcaaatcacaaggttaaggcccacatcatagggaaatgaagcccagaagttgtggtttactgggggtcatcattgtttaccattatctcctctcttaccctttatcttcaatttttccttatttacctgtcttttcccttcagcacagaagggaaatctggggccgggcatggtggctcatgcctgtaatcccagtacttccagggggctgaggcaggtggatcacctgaggtcaggagtttgagaccagcctgaccaacatggtgaaacccccatctctactaaaaatacaaaaaaattagctgggtttggtggcgcatgcctataatcccagctactcaggaggctgaggcacgagaattgcttgaaccctggaggtggaggttgcagtgagcctagatcacgccactgcactccagcctggaaaacagagtgagactctgtctcaaaaaaaaaaaaaaagagaaagaaagaggaaaggaaaggaaaggaatctgaatgatcacattcaaatacaaatataaatttcctgtaactgcatattccctttaagctaccacgttactctcctttgcacagccaatcatttttagagtggtctacactcactgccctcacttcatcactgcctgttcattctccaatcactgcaggctggcatccaccgacaccacagcaacaaaactgctctccctgagatcctcaataacctctgcacttccagaggcaatggataatttcctgaccttgtttgctttgaactctctgtgacatttaacacttcccttttctcatgtgactcttctttctctcactgtttgtatctttagctcttcccatcctctgatggtgcctaatgatcttcactccccagggttctggctccagctctctgctcaactggttgaataactgctcatgctacagcatgcaagctacatctgtaaccccaaactccatgcttacctccagacctatctacccaagtatctactagatatctctactcaaattcaacaagcccaaaactaatccaccgtctgtcttctaaaaccaaaccttcctcctataatccttcaccttggtaattaataccaccatttactaagttgttcatatgagaaatgtgactcaagacttttccttctcatattcctacaatatctaattcgtcattaagttttatctgttctttttttaattatttcttagaactatccagttgtgttttggtaaatgagcaacccattctctgagagagggagaggtgggtgacacttgatggttttcatggtgtgactgatcctcccaccacaactgattttgatgcaggatattttcttgaccccttcacggaactcgcggcaggggtgccttgtttactcagcccgccctgctcaatcccttgcaggagggagtgcgcaagcgaatgactgcaggaacctgagcgagcgaaggcaggaactggccactttggcaccagcaggagcaaactccatgtgggcccctcaccagcgtccaggtgtgggcaccagccacgccaagccccagagggcgtgtaaccatactcttagctccaccgtccgcagacagcagtgtgttatcagctcagtgagccctttgcctcatcacgtagggcaactgccttccgccagcaagggcaaagggccagtgcgaccgcctttttggatacctgcacgtagtgtgtccgagttcttgtccagtgcccaagaggaatgaggtcacacagatgaattgaaggatggcgaatgtggagaattttttttttcagtgacgaaagcggctctcagtggagaggtgagctggaaagggaatgggaagggaagatccctctcctctgaagtcaagccacctctctcctatgtccaggcgcttcttctcgacatcaggctgcttcttccctctgctggctgagttctggggtctttatgggcacaggatggggacggggcaggccgtaggtagttttggaaaaggcaatattcaattggtaaaaagacagtattcagaaataaccaatcgggagagaatggaagttctcactttgggctgtgggtttcaggcttttcggcttgaaggtgggattttgccagcgacccgcccctgtatgcctacagtttctctgcctcctgttgctatcaattttaagctaccaacatgacgccactgaacagaatcgggaagagacatgcggaacacatattatatagtatttccaccaacagatataatagatgtaaataacctcaaaagagtagataatagtaaaataattatgaagtgatgagtttctactattttctttgcttttaacataattaaattatacatgtatgtaatttaatttttaattgatgactttaacaaccaactcaaaaaagtcttgaaatgtaacaaacagctctcacaaaccagtacaggttggatctatccctcttttctccactcctaagaccacagcccaaatgtaaggctctgaccacctcaccttgatgttacaattgtctctcacaggtcatgctactggtctgtcctccacacagctgtcacacatacaaatctggttatatcatcacccctgtccacacatgtgtgcacacacacagacatacacacatgcgtgcacacacagacacttacaataattctttgggtccctatagctctatggctggaatttttaattccttgtttaatgcactatgacttttacaatatggctatctgcttacttttgagccttatctaccccagcccacttcccctattgacagcctagagacccaaatattaacatcctagagactcgatgcttctgcaacttcacccatgctgctgcctgccaccctctagagtacatctagctgtgtgagaacatccttcatacagctaactactgtttattagttttcaaacctcagatcaagaattaccttctctggaggtcatctctatacagtagttaagaacactgtagttaagaacacagacagacctgatatcaaacagaagtgttaaatatctgctgtgccacttcctagctgtgtaaccctgaacaagttacttaatctttatgcccgagtttccttactagtgaaatgattacaataatgtgcttacctgatagaactgttcagaaggtttaaagaatatgtgtgtgcaaagctcttagaatagtgcctagaacttaagtactttggatgtagtaaagttagctattatcaactacctaatttaaaaatgcctcctatctctctttccattgcattatgtacataatcatcacattacactatatgattttatataaatatattatatatttatagatacattattagtatatacatatatagatacgtgtatataatacatatatagatacatgtatataagtatatagattatatatgtacacatatagtatacatttagccctcaacctgtgggatctgacactatctccaggtgcacatacatagtatatacacatatgtatactatatatatatatatatacttatatacatgtatctatatatgtatatatttatctatatacgtatctacattacatacatatatgtatctatacacacacacacacacacacacacacacacacatatgtttcatccacggttcctgtctcataattcccatagacctttttataatgttataatgttggtgcattttaggcctcataagcggacctcagaataacaggatttctctctctctaatcttctatttttttacctgctactttttctccccaaggcaggactctaatcttcctctgcctttacctaccttgtgtgattgtaggtcataagacccccatttcagaaggggttctgccccatattctggaggaaggaatgttgcatggagaggccaagaagaggcccagcacagtgatccatgtctgtaatctcagcacttttggaggccaagatgggacaatcgtttgagcccaggagttcaagaccatcctgggcaacataggaagatcctgtctctacagaaaaaaaaaaaattaattacccaagtgtggtggcaatcacctgtaacctcaactacttgggaggttgaggtgggagcatgcttgggcccaggaggtcaaaatcacgccactgcactccagcctcacagtcagagtgagacccacctcaaaggaaaaaaaaaagaggccaaaaagaatctgaacagatgggccttaccgggtttccccactcagcctttgagtactaaagcataccctttttgtctaaacacatttctatgtggttgtcaatggtgcctatcctttcatgaagtctccataaaaggcccaaggggacgaggtttgaagaaattacaagataactgaacctatggaggttcctagagggtgtgttccggggagggcttggcagctctgtgccccttcccccatacctcaccctttgcatctcttcacttgtatctttttgtaatatcctttattataaaccagtaaatctaagtaggtgtttccctgagttctgtgatgcactctagcaaattaatcgaaccccaagagggagtcatggaagcccaacttgaaaccagtcagccagaagttctggaggcctgatcttgtgactggtatctgggaaagggaagatgtcttgtgagactgagccctcaacctatgggatctgacgctatctccaggtacacagtgtcagaattcatttggaggacactcagctggtgcctgctgcagagttgattgcttgcatgttgatgacaaaaaatctcccacatttggtcacagaagtcttctgtgttgattgtagcgtggtgtgagaccacaggaaaagcagttagagattttccacacccagaaactcttaagagagaaactatgtgtccttgtgcttaggcagtgtctagtaagtactcaatgaatgaatttaaaaaaaatggattagtgatgcaagttctggccaactggacattctttccttttgattcattcagctacatttagatttagggaaatgaagggaacttgtgagatcatgtgagatcatgcggacagattaaaagggaaatattttctcaaatttaattagttatgcatgttgctgcaacaaacaaaaagaaatgagccttatgatgcaaaacacgtttgataattcttactccccttttaagttgtaccatttgtaagaaaatagggtagcattccatgtgcctaattccactgttatgtgtgatgaatgtcggaaatactcctggcattaaaaggagcctaaatgtgtggccagaatggactttaatgttccactggacaatttttctgacctcacagcaaaacttaaattacattattttctgagaatctaagttgtttattcaagaatcacaacttaacttatcaggaagatgagagaaaaaagaattaaaatttattgagcatctcctaggtatcaggcatttttaccagtaccatttcttctaactctcacaaaactgaattagatgttttattagtcaaggttctccagagaaacagaacaaataggagataggtaggtaggtaggtaggtagatagatagatagatagatagatagatagatagatagatagatgatagatagatagagatatagataatgaggacttagtttacattaatggagccagtcccaagatctgcagtcagcaaattggaaagccaagagagccaattgtatagttcccgttcaagtctgaagacctgagaaccaatgatgttgagttctagtccaagtctgaaggcctaagaattggagggctgatggtgttaagtcccaatccaacagcagaatatcaatgtcccaactcaaacagataggcagagagagagagggaattctcccttcccctgcctttttgttctattcaggtccccagtggattgaattatgcccactcacattgggtagagcaatctgctttattctgtctaccaattcaaatgttaatttcttcagaacacaccctcagagacacacccaggaataatgtctaagtagatatctgggcatcccatggtctagtcaagttgacatataaaattaaccatcacagatgttatccccatttttagatggggaatctgaggcttagagggctaagtaacttgccaaagatcatatagatggcaaatgttgctccagagttcaaatgcatgtctctctaatctgaaagcaccagtctgcttccgctaaaccaatggttctcaatcagggcgattttgccccccatggaacatttggcaatgtctggagacatttttgtttgtccctagctggtgggggatgggggctcgctactgacatctaatgggcagaggacaggaatgctgctaagcatcctacaaggcacaggacagccccccacaacaaagaatcatcaagccaaaatgttaacagtgccaagataaagaaacccttcactaaaccatactattttgtatttctatagttttcaaaaccagtagaatagtaataacatactgatctaaaatataaggctaggcacagtggctcatccctgtaatcccagtactttaggaggctgaggtaggaggaatgcttgaagccagaagtttgagaccagcctgggcaacatggaaagaccccatctctacaaaaaaaaaaaaaaacaattagctgagcataatagtttgcacctatatccccagctacttgagagtctgaggcaggaggatcacctgagcccaggaactggaggctgcagtgagctatgattgcaattacactccagcctgagcaacagagcaagaccctgtctcaaaaataaaaataaataaataaaataaaatataagtgactatagttccataactctaataaatatttgtggaataaatgaataaataagtaaacattgaatttaaaatgtagaggaaagaaactgcgtttttcaatgattctttacaattagcattcactaggaggatagaatgttttaaattatcatcgctaatagagtccacatatttactttaagcatgaattaccatatataaaatattttattttaatacaataaaaatcatggaatatattttagtgggtttagtagtttaaggggaaaagatagcagcaatttaggattcatacaattaatggaattattttcaattttagaatcctaaaatattagggttagaggatcatctaggtctcactcttcattgttcatcacttgagaaaactgtatctaagaaagggcaagtgactttcccaaggtctcctggcagtcagggacactgctagagccagaatccagctctcctgacagtttaatgcttttcttgttttaaggtgtttttcaatgtattagagttttggggcagcggggggaggttgctccatgtttttacttaaatacatttttctttcatggaaaattgaattcctatgctttttgccttgtttaggccataagatgttttattgaaagaaactttcaatatcaagtaatccaaccaaccttctaagataagccttttccttcaacacaaagaagtgcattttgccaagtacgtaccatcttactccttaaaatgtttggaactttttgtttaaaaactcaaactcaaagtgaaatctcaatttgtcacaatggtggtttttttgtttgttttgggatttttttagtttttgtcccccttccttacacctttgtgtaagaggtaaaatggagaatttgcaaaataactagaaaaaagctggagtgggagccaggaaatctagcttcaatcccagctccccttctacagagctcagtgatctccagcatgtcacactgtaggctttctaggcctgttcttcatctgccacatcctggggttgttgtaaagatcaaataaggtaatatcccatttgtaaatttatttggtaaacccaaagcactatggcaatagaaatgtcaagtatattttatatgccattacccgttctaaataaagtaaacacccattccattgttaatattctaaatttctccttgttatatgtagtcattttcagaaggatcacttagaagaattatacttgagtctccaagtacatgtccttttcattaaaactgggaattgattagtccagactagtaaggttataaatgatttaagtttctccccacacccctgattcaaccctcccacccccaccccaccacacacacacacacacacacacacacacacacacacacacacacacaataccaaatcactttctatgtgcagctttactctctattcttccaactgactgttccctggtccaggtggcccaccctggaccacctggatttgaatagtgagataggtaaaaatgtgttcttgttcccaatatgatgaggaagtctatgctatagccctgttttcttcaataaaaacttcatttgctgctagtttgagaggccgaggcaggtggaccagttgaggccaggagttcgagaccagcctgggcaacatggcgaaacccctgtctctactaaaaatacaaaaattagccaggcatggtggcacatgtctgttattccagctacttgggaggctgaggcatgagaatcacttgagcctaggaggcagaggttatagtgaaccaagattgcgccattgcactccagcctgggcaacagagcaagactctgtattaaaaaaaaaaaaaggaaaaaaaaaaacttcatttgctgagttagaaccaaagacccacaaagacccacaggaattcctatgtgtcacactaaaaatgatgatgataatgacagaggaaaatatgaagaaaatatgaaatggaagtcatctgttgtgaaatggagatgaaacatatacatatgttgccactccctgctaaaattccagaataatgataggaaaagaatagtaataatatagactcacagtgactgagataaaagaagaggagacaaagaagacaagtgtcaacacatctttagaagatggaagactgacttagaacagggaaagcttaaacctaagagtctgcagagaaggatgccatagacaaagaaggaagccattcacactgaagaacccatgcaagtttccagaattggaggcaccaggtgatttggaaggcagggtgaggatagaggctgaaatctggagtattggttgaaagcctatcagattaactcttagattcaagatccttcctcctgcctgcacagccaggggacttccatgtttcaacacaaacaggaaaaagcttattctctggctctgcactcagaataaacacaatgtcaggtgggaggtggagccatacagaaacctagggactaagtgaaaaatcagtgtgtgcactgagagaactccagtctcttcactgatttcacagaatgctagcaaccaggtttatatttgcttctcaaggtaagaggtatgaatttctcctctagagaaaagaaaatctccctgtaatatctgtcaatgacatttggggtgccccatcaagactgtcaggttactgctccttggaagccctccaatgctccatggaactattctttggaagccctccaagccctgtccataaagttctaattggctttctagtgactcactgcaaagtattaatggacagccaaatacatcagacattagagaaaagctttcaacaggaaaaacaaagatcaaaacaaactaactggggaaaaaaggaacaagaaggaaacagaaactgcagggtgcagaggaaattttcaaaatatttgattaatatcctcaaggagacaagaacatatgtcacactaataaagaacaggacaatattaaaaagaagccttcgggaaataaaaaattaacagtatataagcatattctcactcatatggaagcgaaaaagttgatctcatagaagtaagaagtagaacagaggatacttgaggctgggaagggtgaggagaagaaaggaatagggagctatttgttaaaggacgtaaaactatagctaataggaagaataagttctagtgctctataccactgtaggatattatatatttcaaatagctagaaagaagacactgttcccaatacaaagaaataataactgtttgaggtgatggatatgcaaattatccttatctgatcactatacattatatgtagtgaagcatcactatgtaccccatgaatatgtataattgttatttgtcaatttaaaaataaaattaaaaaagaaaatgaagtataaaggtataattttttttaatcaataaaacaggccaggcacagtggctcatccctgtaatcctagcactttagggggctgaggcaggcagatcactttgagctcaggagtttgataccagcctgggtatcatggcgaaaccctatctccaggaaaaaaaaaaaaatcaataggagagatgtaaggtaaaagtgagaaagtttcccagaatgatagacacactgttgaagagaagagcaaaaatgattagcaaatcggagaatcaaccccagaattctgatatttaactaatataaattctagaaagaaaagacaaaaaatagaagggcaaaaatcattaaggaactaacacataaaatgctccccagaactgaaatatataaatttccaaattcaaagggcctaatgagttcctaaactaaatgtaaaagtatccaaactaaggcagagatggtaatatttcagaagactagggccaaatgtaaaaacataaaagcatccataaagaagaaaaaaatactatgttcataaaaacattggggaaaaactcacatcagagttcttactagcaacactggaaattataagaaaatagaccaatgttttaaaaaaaattctgagaaaaaaatactccaatctagaattctatatctattcaaactatgtatcaagtaaagggtaaaatacagatatttttctaatatgcaataccttaaaaattctgtctcctgtgtgtggtttctcaagaaacttatggagtatgtgcttcatcaaaatgagggagaaaactaagaaagaaaaatatatgggacttaggaagcaagaaatcaaacagaagaaaaaagacaaaggggattaccagggcgtggtgaccccaggtatggaccccaggagaaaagctgcccagcagccggagatacaccagtccaaaggaagcaagaactccgaggctctgggagtgccacttccaaggggcgaaatggacacgagggatttccttacggggttgttgatgtagctctgttgttgttattgttgttaccatattaagaggaaattttaaattttgttggaaaattcaggaagaataagtgatgggtgcacaaaaaagtacgtaaaaagctttaaaaggaaggcaatttttaaatcaaaaccaaagcaaaatatcgttcaagaaaataaatgtcagtgtggttcaacacatgaaatgactacttggttcagctgtgaagaatatttacattgtcatgaatgttaaataaaaatttaaacaagaattatgataaaattattttaggaagagaaaggaggaagagaagtgtgtgcgtgcgcgcgtatgtgcgtgcgcgcgtacgtgtgtgtgaagtgatagttgttgcaatattaaatccctagagtaatatttaatatattttaaaatatccatttaagcacattgtttagaaatattggaataagtagcagaagaaactgctcagtttctttataaacctcaaagtcttacttaaaactctgtgaatgtgtttatgtttgcaaaaaataatttaaaggagtcatctagtatttctgggcgatccataaaacctctattaaatactaaaagctgcagccctaatcccagttacaggtcagactaccagacttagggatatcctgcaaaaaaatgtaggctgcccactactttcaagaaccacaataatataactggtgtgtgggaaaagccttagacccagagttcatctggagacaacttacttaacctctctgagcctcacttgtctcgtttctaaacttaaagagttcgttcggaactaactaaactcaaatgaaaggcaaataccaaaagtgagacagatcaagcacaaacgccagcatcccttacagaggacagtctcaactcagatgcagccaactgctgtcatgaagacctgttgttgctaagaggtcagatggttcaagagaaactggaaatttggattttgacatgaaacctctggaatttaaaatactagtttaaaatgcacagtgcctaccaaaccaaacctatctgcaggccacccctaactcacagattgccagtaaagacctctaaatcagatgaacattaataccctctaggtctattactctgtggcagtgcagtgctgcatgactaaaaatcttcactgaatgaatgtgtttctttaccactaaacaggcagcgtgtttttactcaaccttgacatatgacttttttttttcattatgaatactcatgaatcttaagacctgagatctgcacagagtctttactcgaagaagtactgtcataaacagagataggttctgccgaacatggccggaccgaaaaatcagggagcaattttcacaggtacacaatcgagtaagaactgccatcaatctgtcttttcagacatattaatccacaaagatagaaatcacttttatatgccaaggacaatatcaagctcagtatttgctaagactatctttcagtttttcatgaggaaacttttccctgccactgataattatcttcttggttcacagatctggaaagcatgaagactgggctttttttcctatgtctcttgggaactgcagctgcaatcccggtaaatttcctttcttctgttattacatctctttctcctgacatttaatgcagaaatcctccatttaaaagaaaatgttcttatataatggtttgaaattctctttttattttaattatattctttattgcccaagtaacaaacaaataactggaaaactcaagataaggtacttaaaaaaaaattttagaactatcaggttctacaggacacaataaatatgcagcagaaagtttgggctatcagtttattagccatagaatcagcccaaatacacaagagacaggaagaaataaattctcccagggaagctcatcacattgttattataaacccaagattttaggccaggtgcggtggctcacgcctgtaatcccagcacttcgggaggctgagatgggcggatcacctgaggtcaggagctcaagaccagcctggccaacatggcaaaaccccgtctctactaaaaaatacaaaaattagccgggcatggtggcgggcacctgtaatcccagctactcgggaggctgaggcaaggagaatcaattgaacccaggaggcagagattgcagtgagctgagatcactccactgcactccagcctgggcaacagagtgagactccgtctgaaaaaaaaaaaatacttagggtgcatatccacggtctccagcagcattttcttcaagatcaaatagatgctggctgagaaattttgagagtctataatgaaaacagaaaccaatggtttaggcaggaaacgatatggtaatcataaatcagctcctaattcacccttgggaggctgtccaagcaagtatgctgaaagtaggcagggctagaatattctcttcttcatggtcagatatattggccccatttgcacagcaataaagcagctgtacacaaatcagatcatttgaaaccgtgtcagtggcctcaaaacaaactgaaagttaaaaaacaaatgaaaccatagcatgaatgaccactggagatgttctgcaaatgattcatgtaatccttcattaaaccaaaggattcgtgccatattttttttctttttcaccaaatggaggaatcagcctcctttaaagagacaaaacaatttctcaatcgtccctttcctcccttcttctctaggtctaaaattctgtccttgctttttggataagttgttagctagcttctggttgacaaatgtgtcagcaaaaacaaactccatggcacccagaccaagctgttcttggaagacagagtttatacccaccatcaggaatcatgcttaagtagtatggagctactctagctgaaattatacattacaccctgaaatcacaaaagcgggacaagttaatgttcaacactgaaaggagttcccacaaaaccgttgttttctcctgaaaatgtgctttgtccttgtggctgttgctgttatgtaaataaacattaaaaagtgtctttgggccacgcacagtggctcctacctataatcccagcactttgggaggtcaaggccagaggatcgcttgagcccaagagttcaagaccggcctgggtaacatagtgaggccacgtctctacaaaaaaataaataaaaaattagccagctgccatggcatgtgcctgtagtcccagctacttgggaggcacaggagggaggatcccttaagccagggtagttgaggctgcagtgagccaagatcgcacacagcactccagcctgggtgacagagcaagactgcctcaaaaaacaaaaaaagtgtttgaaccaaatgtttgaatgacacacttgcatttagacacattccagatgtttcctttctgggacaatttgatatcatgtaaacctagccaaactgctagaaagctaagtatcttctcatagaaatgacctattaaaaatttgtataattttccctgcctgcctgaattctccagatgaaaatggattctgtgtagttgggagattccaaatagatttccagagttaaataaatagaaatatgcccatagtgataaaacataatttcaattgcagaatatttctgaaagtaaaagagctgccattttttgtgtgcatttcttcctgcttgggcagtaggcggatggagggggagagagagtgaccagttctccactaataagcctaaaatctcccccatccattgccttctatgatgccccctgctggcagcttaccaaagtggccaccattctttctccttttcccccttctttaaggcttctttataaactttttcaaattcattacccatcttaggtgaaaaggagataagaagcaaaggagcaaaccaaacctaatatgaatcctgtactttggccagaagccgtggctcacatctgtaatcccagcactttgggaggccaaggtgggcagatcacttgaggccaggagtttgagaccagcctggccaacatggtgaaatcctgtctctactagaaaaataaataaatacaaaaattagcagggcatggtggcaggcacctgcaatcccagctactcaggaggctgaggcatgagaattgcttgaacccagcaggtggaggttacagtgagccaagatcaccactgtatttcagcctgggcaacagagtgagactctgtctcaaaaaaaagtttaaaaataaaaaataaatcctgtactccatgactattacacagtcagcactacaggacctgctaatggaataaaaataagttaatccaaatagaatctcagtttcatacttacacctggataggccatctgagtgtccagagtatctctctaataaagatccatggtgaatatctgcctcagatactgggcagtttatattattgacacagtgtgacattagtactagaaatagtaattttcagttgggcaactccttaaaatttataacatattttttatacataatcttattttgatatttctgctcacttgatatttcttgccaccttgagagatggcagggtagaaattaatgaccttggccggtcatggtggctcacacctgtaatcccagcactttgggaggccaagacaggaagattgcttgagttcagaagttcgaggccagactgggcaacatggtgaaactccatctctacaaaaaatacaaaaattacccaggcatggtggtgcctatagtcccagttactggggaggctgaagtggaagggtggcttgagcctgggaggcagaggttgcagtgagccgagacttcatcactgaactccaccctgggcaagaggctggagttaattaattaaaaattaatataatgaattaattttattaatgttttttaattaataaaaaatattaacgacctgtcaaaccacagatagaaagtaaatagcagaggcaagacttgaatggaggcctcttacctccaagttcagttgttcaacttccccatcatgcatcactgcccagctctttatccaagtctccaatcttgctagaaataggaccatccctctaatagaaattaatactccagacatgcccttttctacttaggcttagtgccctgtctcacacagtctgaattaattctaattttttttgtttttgagatggagtttcactcttgttgaccaggctggagtgcaatggcacaatctcagctcactgcaacctccgcctccagggttcaagtgattctcctgcctcagcctcccgagtagctgcgattacaggcacccaccaccacacccagctaattttttgtatttttagtagagacggggtttcaccatgttgtccaggctagtcttgaactcctgcccttgacctcaggtgatccacccacctcggcatcccaaagacctgggattacaggcgtgagccaccatgcccagccccattaagatttcctgaccaacgttaaggccaatggcgttaagaaatcaaataaatattgataaaaagtttataaatttttctgctaattatcggtgggtacttaaattaggcaaatgtacaatactatatcctatggttaattttatttgacttcaactttctgctaaacaacactttccaaaattgtaaagtacaaatgctttgcaaaagtttaaaaaacacagaaaataatttcaaaactcaaagttaccattatttaaatgcattttgttttattttcacccagtctctgcataaataactttttcttaaacacaattgagattctgcttccacttaacattctgttctaggcatctgcttatatcctcaaaaactctagagaatatttttaaattgttggtataaatgaagtatattgctactaataatgatgacaacaagagtaactagcaaatttgtaaattagcatccagacatgaataacaaaaaccagtttttaattttttcagacaaatgcaagattattatctgatcattccaaaccaactgctgaaacggtagcacctgacaacactgcaatccccagtttaagggctgaagctgaagaaaatgaaaaagaaacagcagtatccacagaagacgattcccaccataaggtaaaagtaacatcatttatattaatacaattttttaattctccaaaggtcttagtttcaaagcatggtaaaagagattatgttatttatgtctcagtttaatttttttaaaacatgatgatcacctcaactgcctccaatcactagaagaatgatgaggattaatgagttttactacttgggctgagctgctgtatacttgtttcattttataaaatccaaattcagtttaaacctgtggctacagagtgtgaggaatattataaacatgtttacatgatagtgtgtgaagaaaaagaataatgaatattaaatgttaccttaggcataaatatggttacattatcatttgtttgaagaatgaacttttttttcttttaaggctgaaaaatcatcagtactaaagtcaaaagaggaaagccatgaacagtcagcagaacagggcaagagttctagccaagagctgggattgaaggatcaagaggacagtgatggtcacttaagtgtgaatttggagtatgcaccaactgaaggtacattggacataaaagaagatatgagtgagcctcaggagaaaaaactctcagagaacactgattttttggctcctggtgttagttccttcacagattctaaccaacaagaaagtatcacaaagagagaggaaaaccaagaacaacctagaaattattcacatcatcagttgaacaggagcagtaaacatagccaaggcctaagggatcaaggaaaccaagagcaggatccaaatatttccaatggagaagaggaagaagaaaaagagccaggtgaagttggtacccacaatgataaccaagaaagaaagacagaattgcccagggagcatgctaacagcaagcaggaggaagacaatacccaatctgatgatattttggaagagtctgatcaaccaactcaagtaagcaagatgcaggaggatgaatttgatcagggtaaccaagaacaagaagataactccaatgcagaaatggaagaggaaaatgcatcgaacgtcaataagcacattcaagaaactgaatggcagagtcaagagggtaaaactggcctagaagctatcagcaaccacaaagagacagaagaaaagactgtttctgaggctctgctcatggaacctactgatgatggtaataccacgcccagaaatcatggagttgatgatgatggcgatgatgatggcgatgatggcggcactgatggccccaggcacagtgcaagtgatgactacttcatcccaagccaggcctttctggaggccgagagagctcaatccattgcctatcacctcaaaattgaggagcaaagagaaaaagtacatgaaaatgaaaatataggtaccactgagcctggagagcaccaagaggtaaaattattttaaatggtccttgtccaataaagccagcattatcaataaacagtcatgacctttctctgtgctctcacagtgtcctgtatggatgtctactagtacattactaaaatatattacagttatttctttttaggtctatctctatcattaggctgagaatgcctgttttatttgagttcccgtagatgcagatcttggatttgagtgttgtttatttaagaagcacagggaacaaagaggagtgcagaagtaacacaagaaggaaaggaagctaataaaaggaacatcattcaagccatgtaaagacattttctcagaagtattccatttggcgactgaaggagctagggtacttcttttggctgaggattgctagaggggtattaatttcccagcatttccagcctgtcccttgagtgagccaggtcaatttccatgatttttcaggcacggaaatgcagatattggccattgaaagtccctggaactagctggaatgataaattatgacagatctgaaggataggagatactggcaactgctgctctaatgccttgaaagcagatgccatattgttttcgagttgaatcaccagtgtccaacaaaatgtctctgacataacaaaagagccaacaatgtttgttgaattagttataaagattaaggtcctactttattaagcaaacacataccaaaatgataatctggaaactacagcaggatcggggcagggaggaagcatatttggagctttcattcaaaatcctggcagccacaaagtcctgtgccagcaggacttggcacagattttggtacacaaggtcaatggtaacctcagttactgagaactctgctgccactctaacgtaggagttttcttataccttaaaagcctggtatgaaagctttaccaacaaattcagagagatttccaatgtaactctggcttaactacaaaatcacaagataatactacatttctagtgttttctcaaatccaaagaggagactccaagtcttattgagtaatccccagagataacgcactaaatctcactgataaagatagaaatgggtcctgttctccaagggttactgtctacctccacagttgtgactgatttccctttcttttttcttttttttttttttttgagacggagtctcactccttcacccaggttggagtgcagtggcgcaatctcggctcactgcaacctctgcctcccaggttcaagcaattctcctgtctcagccactcaagtaggtgggactataggcgcctgccaccatgcccagctaatttttgtatttttagtagagacagggtttcaccttgttggtcaggctggtctcgaattcctgacctcaggtgatccacccacctcagcctcccaaagtgctgggattacaggctccatttcttcttttttttctgttttgttttgtttttagagatggagtcttgctctgtctcctaggctggagtgtagtgatgcaatcacagcttactgcaacctcaacctcctgggctctagcagtcctcccaccttagcttcctgagtaaccgggaccacaggcatgcaccatcatgcccagctaatttttttttttttgggggggggggtgggtagagatggagtttccctatgttgcccaggttggtcttaaactcctgggctcaagtgatcctcccaccttggcctcccaaagtgctgggattacacatgtgagccaccacacccagcctggtttccctttctgagatttgaaatgatttgagcatgaaaaatactcgtgaaagtatgcacagtggaaatataaattaagtaatggctctcctcttagtagattttaacttttgctcttgttattctaaaggccaagaaagcagagaactcatcaaatgaggaggaaacgtcaagtgaaggcaacatgagggtgcatgctgtgggtgagtatgcatgaagcaagctgtttgtgactatatcaaggaagaaatggaatctgccactttgggcttgtccctccatcctttgtgaatgctgcacagaattttttctctccccagtcctccccaaggaaatgctcccataaattgttgacattttcttgtgcatacttgatatacaacaatgggtaaatgtgtttgcaaactggaagccctgttgagatattagtgaaagggctagagttcttccttaaatccttttgcttctgaaaagacttaattctatcttatttattctcaaatctgtaacttgctgatgaatttatatcccatacttgataaaggaccttattcctccccctatcacaaacattttgaatttcagccttatttcacttctgaccagcttgcacaacgttgcactaaggacttcagactatgaccatctcaggcatagaagagctgtctgttctttgcacatctccaatccaaactgctgcaagaggaaatctagattatcatgtaaaataatcagtaaaattatcatgtaaaatagaaggttccatctgacattaacacatcaattaaagaggattccaatgtcttcccacttccaaatttgcaaatttcaaggacttcaaaatttccccttcattagtgaaaatgaaactagttgagtgaatttgtatttacatactcaatttaactttgtccatgcttcctgcccaatcttttctgttagattcttgcatgagcttccagtgtaaaagaggccacatctgtaaggcagaccaacagggaaaacctcactgtgtctgccaggatccagtgacttgtcctccaacaaaaccccttgatcaagtaagtattctgcaaaatagtctttaagtggctccaaaaggttagtgactgaaataaaaatatttgccattgaaatttttgcttaaaaaaggtagatacctaggttatcatttggttatttgggatatttggaacatctgcagttttcattctactgagcttatctagagctaaattgtcatcaccgttggtacagtttagttgatttttttgatgccaaatggaacaattacgattttaatagtctcacctacctgaccacatctttggcacagcgctgttatcagcatatgagctttaaggagcagagtgtcttccagtgagcatttggctctatcagctttttcttctacttatcttccataggtttgtggcactgacaatcagacctatgctagttcctgtcatctattcgctactaaatgcagactggaggggaccaaaaaggggcatcaactccagctggattattttggagcctgcaaatgtaagattatgtccctcctgtcaaccatcatctctgagagggcttggggtgaatctggacatgcctgaattatctatatgcaaacagggaaaagctgatgtagttctgaacacaaaaattatcaactggagaaacttaaaaaataagaactctcaggccttaaccgtaggagattctgatttaactgaactaggttggaatcctgacattgttttttttatttgtttttgaagtaacctagacaattctaatgtgcagccagggctcagaaccactatgataatgctatccacttaatcacagagttgaatcactggaattttgctacattatttgccctcttcccaatttaagttaagcctttgccaagaagtctctgacaacacatttttccagaagtgttttaaggctgtcttccttccccaggatattctcaattgtgtttggctccccttaccactaagtgattctccacattagcagtgctcactaatgtttccgggtctcctccccttccagacacaggagaggatgaaacatgtcagcctcctggacgttaggtatgaccatatatcttgctttgtccagggaaatgtgaaaaaagtcatctatgtgagttctgggcagaagcattcaagagctggggtatggttctccatcctctgctcctttgccaccacaaactctctttgagatagtggcctcaaaaaatggcaacgtcattggtggctggcaagatggccaaataaggaccactctggtttgcagctcccagtgagatcaacgcagaaagagggtgatttctgcatttccagctgaggtacccagctcattgggactggttagacagtgggtgcagctcacagagggggagccaaagtagggtggggtgttgcctcacccagtaactgcaagggatcgggaaactctctcccctagcgaagggaagctgtgagggactgtgctgcgaaagacagtgcattctggcccagatactacgcttttcccacagtcttcgcaatccacagaccaggagattccttcgggtgcctacaccaccaggaccctgggtttcaagcacaaaactgggccaccatttgggcagacaccgagctagctacaggagtttttttccatatcccagtggcacctggaatgccagcaagacagaactgttcacttccctggaaatgtggctgaagccagtgagccaaatggtctagctcagtggatcccacccccacagagcccagcaagctaagatccactggcttgaaattcttgctgccagcacagcagtctgaagttgacctgggatgcttgagtttggtgggggggaggggcatccaccattactgaggcttgagttggcggttttcccttcacagtgtaaacaaagctgctaggaagttcggactgggtggagcccacggcagcaccagaaagccactgtagctagactgcctctctagattcttcctctctgggaaaggcatctctgaaagtaaggcagcagccccagtcaggggtttatagataaagctcccatctccttgggacagagcacctgggggaaggggcggctgtgggcagagcagacttaaatgttcctgcctgccagctctgaagagagcagcagatctcccagcacagcactcaagctctgctaaggaacagactgcctcctcaagtgggtccctgacccccatgcctcctgactgggagaaacctcccagcaggggtcgacagacatctcatacaggagagctctggctggcatctagcaggtacccctctgggacgaagcttccagaggaaggaacaggcagcaatgtttgctgttctgaagcctctgctggtgacacccaggcaaacaaggtctagaatggaccttgagtgaactccagcagacctgcagcagaggggcctcttagaaggaaaactaatgaacagaaaggaatagcatcaacatcaacaaaaaagatatccacacaaaaaccccatccaaaggccactaacatcaaagaccaaaggcagaaaatccatgaagatgaggaaaaaccaacacaaaaagcctgaaaattccaaaaatgggaatgcctcttctcctccaaaggatcacaactccttgccagcaagggaacaaaagtggatggagaatgagtttgaggaagtgacagaagtaggcttcagaacatgggtaataacaaactcttctgagttaaaggaacatgttataacccaatacaaggaagctaagaaccttgaaaaaaggttagaggaattgctaaccagaataaccagtttagagaagaacataaatgacctgatggagctgaaaaacacagcacgagaacttcgtgaagcatacacaagtatcaatatccaaatcgattaagtggaagaaaggatatcagagattgaagatcaacttaatgaaataaagcatgaagacaagattagagaaaaaagaatgaaaaggaataaacaaagcctccaagaaatgtgagactctgtgaaaagaccaaacctacatctgattggtgtacctggaagtaatgaggagaatggaaccaagttggaaaacactcttcaggatattatccaggagaacttcctcaacctagcaagacagaccaacactgaaattcagcaaatacggagaacaccacaaagataatcctcacgaagagcaactccaagacacataattgtcagattcaccaaggttgaaatgaaggaaaaaatgttaagggcagccagacagaaaggtcggaatacccacaaagggaagcccatcagactaacagtgggactctctgcagaaaccctacaagcaagaaaagagtgggggccaatattcaacatgcttaaagaaaagaattttcaaactagaatttcataaccagtcaaactaagcttcataagtgaaggagaaataaaatattttacagataagcaaatgctgagagattttttcaccaccaggcctgctttacaagagcttctgaaggaagcactaaatgtggaaaggaaaaaccagtaccagtcactgcaaaaacataccaaattgtaaagaccatcgacactatgaagaaactgcatcaactaataggcaaaataaccagctagcatcataatgacaggatcaaattcacacataacaatattaattttaaatgtaaacgggctaaatgccccaattaaaagacacagactggcaaattggataaaaagtcaagacccatcagcatactgtattcaggagacccagctcacatgcaaaaacatacataggctcaaaataaagggatggaggactatttaccaagaattggaaagcaaaaaaaaaaaaaaaaaaaaaaaaaaaaaaaaaaaaaaaaagcaggaattgcaatactagcctcagataaaacaggctttaaaccaacaaagatcaaaaaacacaaagaagggcatcacataatggtaaagagataaatgcaacaagaagagctaactatcctaaacatatatgcacccaatataggagcacccagatatataaagcaagttcttagagacctacaaagagacttagactcccacacaataatagtgggagactttaaaaccccactgtcaaaattagacagatcaacaagacagaaattaacaagtatattcaggacttgaactcagctctggaccaagcagacctaatagacatctacagaactctccaccccaaattgacagaatatacattcttctcagcaccacattgtacttattctaaaattcaccaaataattgaaagtaaaaactcctcagcagatgtgaaagaatggaaatcataacagtctctcagaccacactgcaatcaaattagaactcaggattaagaaactcactcaaaactgcacaaatacatggaaactgaacaacctgctcctgaatgactactgggtaaataacgaaattaaggcagaaataaggaagttctttgaaaccaatgagaatgaagacaaaatgggccagaatctctgggacacagctaaaacactgtttagagggaaatatataccaccaaatgcccataagagaaagcaggaaagatctaaaattgacaccctagcaccacaattaaaagaactagagaagcaagagcaaacacattcaaaagctagcagaagacaagaaataactaagatcagagcataactgaaggagatagagacacgaaaaacccttcaaaaaatcaatgaacctaggagctggtttttttaaaagattaacaaaatagatagacagctagccagactaatagagaaggaaagagagaagaatcaaatagatacaataaaaaatgataaaggggatatcaccactgatcccacagaaatacaaactaccatcagagaatactataaacacctctatacaaataaactagaaaatctagaagaaatagataaattcctggacacatataccctcccaagactaaatcaggaagaagttgaatccctgaatagaccaataacaagttctgaaattgaggcagtaattaatagcctaccaaccaaaaaaagctggggaccagacagattcacagctgaattctaccagaggtacaaagaggagctggtactattccttcagaaagtattccaaacaatagaaaaagagggactcctccctagctcattttatgaggccagcatcatcctgataccaaaacctgaaggatatacaaaaaaaaaaaaaaattcaggccaatatcactgatgaacatggatgcgaaaatcctcaataaaatactggcaaaccaaatccaggagcacatcaaaaagcttatctaccacaatcaagtcaccttcatccctgggatgcaaggatggttcaacatacgcaaatcaatgcgtgtaagccatcacataaacagaactaatgacaaaaaccacatgattatctcaatagatgcagaaaaggtcttcaacaaaattcagtatcccttcatgctaaaaactctcaataaactaggtattgatggaacatatctcaaaataataacagctatttatgacaaacccatagcaaatatcatactgaatgggcagaagctggaaacattccctttgaaaaccagcacaagacaaggatgccctctctcaccactcctattcaacatagtattggaagttctggccagggcagtcaggcaagagaaagaaataaagcgtattcaaataggaagacaggaagtcaaattgtccctgtttgcagatgacatgattgcatatttagaaaaccccatcatctcagtccaaaatctccttaagctgataagcaacttcagcaaagtctcaggatacaaaatcaatgtacgaaaatcacaagcattcctatataccaataacagacaagcagagagccaaatcataagtgaatgcccatttgcaattgctacaaagagaataaaatacctaggaatacaacttacaatggatgtgaaggacctcttcaaggagaactacaaaccattgctgaaggaaataagagaggacacaaacaaatgctcatggataggaagaatcaatatcgtgaaaatggttgtactgcccaaagtaatttatagattcaatcctatccccatcaagctaccactgactttcttcacagaattagaaaaaaactactttaaagttgggaaccaaaaaagagcccatatatccaagacaatcctaagcaaaaacaacaaagctggaggcatcacgctaactaacttcaaactatactacaaggctacagtaactaaaacagcattgtactggtatcaaaacagatatatagaccaatggaacagagcagatggctcagaaataatgccacacatatacagccatctgatatttgacaaacctgacaaaaataagcaatggggaaaggattccttatttaataaatggtgctgggaaaactggctagccatatgcagaaaactgaaactggatcccttccttacacttcatacaaaaattaactcaagatggattaaagacttaaacataagacctaaaaccataaaaaccctagaagaaaacttaggcaataccattcaggacataggcatgggcaaaggcttcatgactaaaacaccaaaagcaatggcaacaaaagccaaaattgattaatgggatctaattaaactaaagagcttctgcacagcaaaagaaactatcatcagagtaaacaggcaacctacagaatgggagaaaatttttgcaatctgtcaatctaactaagggcttatacccagaatctacaaggaacagatacaaatttacaagaaaaaaacaaccccatcaaaaagtgggtgaaggatatgaacagacacttctcaaaaagaagacatttatgcagccaaaaaacatatgaaaaaaagctcataatcactcgtcattagagaaatgcaaatcaaaaccacaatgagataccatctctcaccagttagaatggcgatcattaaaaagtcaggaaacaacagatactggagaggatgtgaagaaataggaacgctttcatattgttggtgggagtaaattagttcaatcattgtggaagacagtgtggcaattcctcaaggatctagaactacaaataccatttgatacagcaatcccattactgggtatatacccaaagggttacaaatcattctactataaagatgcattcacacatatgtttattacagcactgttcacaatagtaaagacttggaaccaaccaaaatgcccatcagtgatagactggataaagaaaatatgacacatatacaccatggaatactatgcagccataaaaaaggataagttcatgtcctttgcagagacatggatgaagctggaaaccatcattctcagcaaactaacacaggaacagaaaaccaaacactgcatgttctcactcataagtgggagttgaacagtgaaaacacatggacacagggaggggaacatcatataccagggcctgtcaggggctgggggactaggagagggatagcattaggagaaatacctaatgtagatgatgggttgatgggtgcagcaaaccactatggcatgtgtatacctatgtaacaaacctgcacattctgcacatgtatctcagaacttaaagtataattaaaaaaaaaaaaaaacggcagtgatcctgagctctggggagactgcaatgagcagagccctcctgccaacttgtattggacttgtagcaggattgcaaaattgacttctgtttctttaagccactgagatttagcattatttcttactgtagtatcagctaatagctacctttttctctattcaatagcacttgtgccctccacctacaaatttcaactctgattctacagcagtgattctggggcctagctgcacatccaaatagatcttggagctttaaaaacatcctgatgcccagacttcacgccagaccaatcacatcagaatttacttgattggaagctggcatttggtatgttttttaaaaccccaggcaattttgttgtgctgctgccagggctgaggaccactgtcataataatggggacctgagaaagctctgtcagttgccagaagtcgttaagcttcctattatgaggacttgccataggacacaaataagcccaaagattacagtacattttctgcttgtaacagctattcctacttgtacggactttgaagtgattcagtttcctctacggatgagagactggctcaagaatatcctcatgcagctttatgaagccaactctgaacacgctggttatctaaatgagaagcagagaaataaagtaagttatccacaggttagcttcttcaatgtctgtctacagggcatgaggaagaaagacgtggtgggggggctacctacctctgcatactggcaaaagcccactatgcttccccatgcccggttagcccatgtggcttaacagaataatagatgtcaccattcacgccacaaggtttcagacaccaccaaaccgccccattcttcccaatggtcagtggcctgaattagggctcttcaattcctacctagagcaagctctggttgagcaaagttaatataaatttagcattgatctagtcagtccaaacatcttatttaaatctaagcatttgttttgttctcataggccagacatagatgtatgatataaagtaaatccattactcaaaatatcagtaatatattaagattaaaaagcacagaacattgattccaaaagcttccagagaaaattcattcaccagatagttattgagtgtatcctgggtgccagaaattgacctaaatactggagatacagcaacgaaaagaaaatctctgccttcatgagtttacattctgggtgaagagacagactctaaacaaataagtatatatgtgtgtgtgtatgtaatgtttgtatatgcatatatttgtacatacatatatatgcatatatgcaattatatatagtaaaatgagcatttatgtaaatataaccaaatcagcaaatatatgtataagtatgtcagttgggattaaacatggtgtgaagacaaataaaacaagaaggagggtgtgcattaactgtgtcagatgctgtttataggttatgagttgaagactgagaattggccagggatttagcatgtcaaagtcatagctgaccttgataggaactgttcctggggtgggagcatgtttcaggagggaagctccagtggacagagttcaacagagactaggaggaatggatgcagcaagtatagacaatcctttcaaggagttttgctatgaagagataaagagaaatggggtggcagctggagtggaaagtgagtacaagagtcccacctagcagtgggagatggtagaggatgtttgcacgcttctggaaataacccagtcaagaaggaaatgttagtggggagcagagaatgcgcacaactgccagagggcgttcttcgatacatgtcccacccagaggagagggattggacttaggttaggagcacaggaaggtcgcagggagcaaagttgtggttctgggagcaggtggaggtcctgtttgcttccaattactcagtgaaataagaggcaacatcacaagctgagagtttcacaggcactgctcaagaataatttctagcccccgtcttgaataccttgtcacagagagccttgagggtattagctatgaaacagggaaatttcaatggggctggccaagcaataacacaccagggtgaaagcaagactgagtgggcactggatggatgacctagaagactaagagtggactctgtcatcgggggaaggagcagcacttttcactaactaatcaccttagtcaattcagcccttttcattaaaacctcatagtttaaaaaaaaaaaaaaaaagcagcgaacattacttggttaaaagaaagaggcaaaacatacttaaaatatttaaaagtttaaaaaagaatttaaatttcttctaaaaaccagaggtttcttacatcaggtgctattctgtgtagacatgagaaaggcctgtagtattgattggaaggaatttcatttagttgcacatgatgtcctgagcttgttttcccctatcgtgttactgtcactcttcaagtaaagtttatagcaagtgacaagtccattacatttgtctgattctctgacagtcttctgccttcctaatcccaggtcaagaaaatttacctggatgaaaagaggcttttggctggggaccatcccattgatcttctcttaagggactttaagaaaaactaccacatgtatgtgtatcctgtgcactggcagtttagtgaacttgaccaacaccctatggataggtaagaactctttacctttccatttctagatttatctctctgataaaatatctacatatctatgcaaaaggaaaatctaaacagatttaggacatttcccagttccattttagaatactgaaatgcctggttaggagtctaaacacaaagctgctgtgtatgatgtactctagaacttaaggtataataataataataaaaaagtctgaaacttgatagagcttatgttgataaagtttatgttttataattttatcttttaattccatttctcaatgaactttttgaagtccccttatcacaattatcaaagctatgtaatattcattaaaaaaaaaaagctgctgtgaagatagcagaatatggctacaccacagctcccaagtttacatgttaaggtccagcttcccacagatactcctccaactttctcattcttgatcgtaaattcccaagattggcccaatgtgggtcaagtgactacatctaaaacaatcaggtatggccagtagatgagaaccaggttgtaccaacatgactgctgggtacacccctatagatttagggtgggggaaggacagttcctgtgaagacagaaaacttgtgaatcaacatcccaaaagctgtcaaccttacccacaaatactttatttcgttggcagtttttatctgtattctatttatatcacatatacagcaaccttatgggagaaaaatgtccttggtgagcctgagagttaaatcttcatgcacaagctactcaattaataggatgccatgtatttcattgcagagtcttgacacattctgaacttgctcctctgcgagcatctctggtgcccatggaacactgcataacccgtttctttgaggagtgtgaccccaacaaggataagcacatcaccctgaaggagtggggccactgctttggaattaaagaaggtaaattcatcaccagccaaagaagagggatgtcttcttcctcagacaagccctaagccctgcatgcttcatagagaggtcctgccacatgttcgaattggaagctagaaaaaaaaaggtggcagcttcccagataggactcccttggtgcacatgctgtcattgcgaagtcacttcttactacctttatggcactgttttcaaagggtagcaagggtgaacatgcattgaggtctcaacagtcagctaagcctagaaagacgtgtgaatccagaattgggccaaatctcagcaggctttgtgtccttccttatttcatatcctaccttaacctgggccttgggccaaacttttcaaaattacacataaagaataaaaaagcaagcccatttctgacaatgggagatgtcagaacatctcagaatccattaccaacacactaaagactggattttacatcacaattagtgctgggataatcctttaacccaaaactcacccatggcttcaccctcaatgaatgggagctgtgggagggtagatcagagtattctttctttactcctgcagtggaggaaattaaatttagatgcttgttttgctgggttatgtcttaatatgtttccttttctttccttaagttaggcttgaattttatgagcaagtatgttttcaataattaagatatgaaaggctgggcacggtggctcatgcctgtaatcccagcactttgggaagccgaggtgggtggatcacgtgaggtcaggagttagagactagcctggccaacatggtgaaaccccgcctctaccaaaaatacaaaaattaggcgggcttggtggcacacgcctgtaatcccagctactcgggaggctgaggcaggagaattgcttgaacccgggaggcagagtttgcagtaagccaagatcccaacactgcactccagcctgggtgatagagtgagactcggtctcaaaaaaaaaaaaaaaatgaaagatgttcaaacaatgagcattcaaatctactcgcaattctcaccacacacacacacacaaaaatgatagtatgtgaggtaatgcattcgttaatcagatcaatttaaccattccacaaggtatatatattttaaaaggtcatgttttacatgataaatacataccatttttatttgtcaattaaaataaataaataagaaaaataccactcacagaacataaattaacagtgaacatcaaatctctgaaacagagatttcattcatgtttacaatatacccttgggataaacatgcagctaagccgttaaagaaagtcagttcatcaaatgtcagaagttcccaaaaagaaataacttgtgcatacttcatttttaaaatatcccccatgcatatgtagaatgccttgaaattagagaggaagaggtgaaagtatgaggatttacttattaataaataggtaagcagagagggtcagtccttttccttgcaatatcattctgtgaaataaacattctgtgaaaggatgtatatttttgtaagtacctagttctgtgtattagttgtctatgctgcatagtgaatcaccccacaacttaacaggttaaattctttctcacggtttccaagggtcaggaatctcacagtaactaacctggatggctctggattaggatctctcattaggttgtggtcaaggggtcatgcagtgcggcagttatctgatggcttgactgcagctaagggtctacttctaagcccactcccatggctctttgcaggagccttcagtatcccatcgtgtaggcctctggtctacagggctgcccacagcatggtatctggattcctccagagcgagtgaccaggcagaaagagagaaaaagccaagactgaggccccaatgtcttttataacctaacctcagaagttatatatcatgatttctgcctcattctattggtcacactgaccaatcctgctacagcaggaggaggagaaggagaccacagggggttggatgtcaattgtctttctaacatctatgatacaagcagagtacttataaaaattcaaatatatccttctgtcctgccctgcccaccattatctagaggggaaaactcagctgggataggatgtatttatggatgcctgtttatatgacatgtgattttaaaggactgataaaaaggcaaatttaaacagaggccattttacttaagaaaaccagttgcatctcattcttccttttgcaaagcttctggcagctcttcagtgtgtaagctcacccaggctccgctgggcggttgtctgggaggagcaggaagggcttaaaatccagtcatttacaaagctgctaatgatcttgtttgtgcactgtggtttggccatcattgccttattttgaagaaaggaaaaaattatcacataataaaccaataaagcagatattaaatattcagtcagaacacgtaaacaacttactgctttggaatgtagctaaagaaaaacaaatttatttgtaagtatacccttctttccttcaaggctgagaaatctacaggagaagataaagtttagccaatgttttcctgaattttaactgcctgtgatagacgtgctcatatattcctcacatagctgttattaactagctgtgtgaattagggcatgttgcttagcctcagtgagtctcattttccttatctgtaaaaatggggttcaggtaacaggtgcaggaatcctcatttattttgtgcccatgcataccatgcattgacacatacccatgctaatcgtcagaaaaccctccaagtgagactaacagggtaaacaactcagatgacgcaagttcccctaagccatttaaagacattatcctaagagtactggggggccaccaaagtgtttcaaacaagccagtgatttccctgggtttgtatttaagatggattctcctggttacattgtggtggggccaaagaattgttgagagaatactgtggtaaacccaggcaagagctgatgagaacttgaactaggggagtgaccaaaggggaaaaaaagagagaagtaaacatattcaagatatattttaagatataagcatactcaaatatatagcatgtggaaataagacaatatttgataggaaatatgtgggagccgagagcagacaggtgagagactgaaaagagaagtgcaatgcctaggtccctggctcagagcaggcagggtaaatagaggtaaatagaggcatcttccactgagaaaacacaagaacagaagtggatttggagtaaatgacaaattccattttagatacgttgaattgtaaagtattaggttgcctcctaagtgttagtttcatgcaaaagtaattatggtttggccattatctctaccactccatcaaaactaccattatccctaccatgcccaccactgatgggcacctacattgattttatatctttgctattgtgaatagtgctgcaacgagcatatgagtgcatgtgtctttttagtaaaatgatttttttataaatatacccagtatgggattgctgggttgaatagtagatctgttttaagttctttgagaaatcttcaaactgctttccacagtggctcaactaatttacattaccagtgtctaagcattctttttctctgcagcttcaccagcatgttgtttttagactttttaattacagccattctgactggtgtgaaatggcatcttattgtgagatggttttgatttaaattttcctgatgattagtaacgtggaactttatatatatttgttggccgcttatatatcaagacagggttttggaactgaaatgcatatttgaggattataagcatacagagaataattgacaccagggaagggaattaattctcccaaggaaaacgcattgagttacatgaaaaggggtctaggattgaacactgcactgagaaacaacaacatctagatgatggataggggaggaagaaagaattcagtaaggagaatgaagtttctcctgaaatgaaggaagaaaaccaggatagtgccatgcaaaggaggtgtttcaaagaggaggaagagattaacagtgccaaatgcgactgagatgtcaaagaagttgaaagaaataaggatatcctgggtagccttggttagagtagttctggtggaatggtagacatggaagtcacattctatgggttgagaagaaaagggagattagaaagggtaaggagtggatgtttgagtgcaggaaagacctagaaaagctacagagcattttctaaaaaaggggagcattttttagaataaaagagatttgagcactcctttcatttactcattcatttgctcaagaaatctttacaggccaggcgcggtggctcacgcctgtaatcccagcactttgggaggctgaggcaggcggatcacgagttcaagagatcgagaccatcttggctaacacggtgaaaccccgtctctactaaaaatacaaaaaattagccgggcgtggtggcgggcgcctgtagtcccagccactcgggaggctgaggcaggagaatggcgtgaacccgggaggcggagcttgcagtgagccgagactgcgccacttcagtctggcctgggtgaaagagcgagactccgtctcaaaaaaaaaaaaaaaaagagagagagagaaatctttacagatggtctacataaatgcaggcactgttctagaggctaaatatgaaacatatttaaatgctaatggaagggtctagtaaaaaaggaaaggtggaagaaggatgtaagaaaaaaagaggaaagtaaaaggagaatcttgtgaaggtcagaagagatcttgagcataggtagaggaattagccttaacgtcaagaaaaaggacaatctcttatctgagcaacagaaagaagacaaaggctatgggtgcaaatataagtaaacgtataactaatgaagctattatctccattttacatatgaagccagtactcaaaaaaaaaaaatcaaagtccataatctttcccattctctgggctagataaagattattagcaggaaaattacctagtgcccacacagagtagtataatagtttgttagggtgggccatgttggtaaggagtgatcttatatttgctagaggatgctgtcttcttccacaggtatggcgacaatttctttcacaagctactcaattaaaaactggaataacctagcactacacttctatttatttccattatttttcagctcaccttctagattagtatactgggcacttcttggctggacctcccgttaacctgctcttcctctatcagtggttctcaaccctgcagccaaattacctgcagagttttctaaacgtctacatgccattagtccacccctagggattctgattctagagtccagaggtgaggcctaaaaatacatatttgtaaaagttcatgagtgatgttgctgtcctaccaaagttgaggatcaccattatactgccttattagatggtttctctaatcccccaactctaatattgtttgtgctactactctggctactttctaaaagtgtcattttgcttcttgtttttttatagaggacatagatgaaaatctcttgttttgaacgaagattttaaagaactcaactttccagcatcctcctctgttctaaccacttcagaaatatatgcagctgtgatacttgtagatttatatttagcaaaatgttagcatgtatgacaagacaatgagagtaattgcttgacaacaacctatgcaccaggtatttaacattaactttggaaacaaaaatgtacaattaagtaaagtcaacatatgcaaaatactgtacattgtgaacagaagtttaattcatagtaatttcactctctgcattgacttatgagataattaatgattaaactattaatgataaaaataatgcatttgtattgttcataatatcatgtgcacttcaagaaaatggaatgctactcttttgtggtttacgtgtattattttcaatatcttaataccctaataaagagtccataaaaatccaaa

SEQ ID NO: 84 - DNA, 121726 bp, Homo sapiens
acttggctaaggcgaaccgccccagacgcgtccgcgcgccggcagctgcaggctcaggccatctccagtcttcctgccgcgcccgcctctcctcctgggattctcctcctcctcctggacttccccgcagctgcccacgcctcggcggccgccaggtgctcctggagtgcagcgcctatcgccggggcgtgtgggggccacaccgagcaccagcttctccgacgccgggaagccgctgtcgccgccgctacctctccctgttgccgccgcctcaggtcagcctggtttctgtcccctttcccctacccccatcattcccagagacaactcgggaaacggcgtctagcttgcaccttgcccggagcggtgaagaatcctgggcgaggacagtttggacttgtaatagtgtaggtgggctagagcgttgccttgtatactgggatttggtgattctttggggtttttgagggagaggggaatgttgcttttcttaagagctgagcaaggttttgtgcacgcaaagcatcccgttcagtgtttccgtttctagaggagtttcatctgtagatgctgtcgatttcaatggagggcgcgccgggttctggggcagcagggccctggttatctcgcggctgtggctttgtcggggagggcaggcgtgcggcgggggcgctgggaaggtattttggtgacgcacggtgcggaattctttggagggcccgctgagtgctctgcagctcgtcgaggctgcacgggtgtgtgtggcatctcgtaacagattcctagtggagtgttctggctccttcctcccctacctttcagagcatccgagatggtgggttaggcagcactagggtactcattcttggcggacttttcccagctccgggagaaagtcccctctccgactccctcccggtgcattggtggaggccctattcggggtctgtgagatctccgcggcggtttcccactcagatcctagacttgtggggatcagaaagcgtgggtcgccggactcgttcagcgagcggaacaggtacccccaagcgggcgacctcgggagcccttcagtgaccagttcagggctccctgggactctgggccagggagactctcgatccggactctgtagtcttctagtgaatgctggggaaggatagggcaggaaaggaaataaacgctaagctctcctttggctaatgccaaggtcgtggtgggtgggagaggaggtaggcgacgcgcacgcggtgtgtgtgtgtgtgtgtgattttctttttaactggacgcgggagttaaggaattgggttcttccagcagggaattgggagggggcgagttggcagaaggggacgagtccacttagcccccactcccaccccagtggactcatttttattcatgagggtgaagtgagggagtcctcgctgccacgtaggggcggccgctttcagatatttatgtctgagaatgctcaatgaagtgttgctaagcattcaaatgaatgttttggctaaaaaggagagaaagcattttcttttttaaaacatatattgacgggatgcttggctggctggcgttccgatatcccggcgcgagatgattcattcttgcagctaagtcgggaaagcgacaggtggcgatcgagacccagcaaaagtgttaccactcaggttttcgttgagttcagctgttaaaaaaaaatctgcgcacagcttttcggtgggtcgattgttcgcctttaacttctcgcgagcacgactgccaactgagttggaaattattataccaaagttaaggcaagatgattggaacaatgggccagtctcacctcttgcttttcactgatgtagaagagggttagaaatgtcaaacagttgttaattaggaagaaagaaattgctagaccccttagatacttagggcagtgccaaaattttaatcttggcttcataaaaaggagctccaggcaatttggcacgcctgctcatcagacatttaaaatgcaatttacacacaggctgaggaaagctgccctcatgctttgtgccaataatttggaaagtcatcgttggagattgtcagtttcttttctcaaagaggcctcgacctttggctcatttttgcattccgacgcaggacagtctcctatccccctccatttttcctgaggcctaggctgttggcttacaataaattatgtacttcagagtcaactctttttatgttttgccactggcaacttcccagttcagttccttgctagtagcttttgtctttgggttgaaccctagactattttaggagattccattctgtagacatgggttaagtacctactgtgtgctgggaaaccacaaagatgaataagattctttgtctttaaggaattcataatgtaattacaaaattagaaaaaatcggaacagaacatattctcctctggggtatgtatactaataatcttccagcttaaataaacagttaaatacaaagattattattgataatttttatttaaaaacacgttggaaaaacagacaagggtgtcttgcttcttccattttgctgccttatttgttattatgtattttggagttgtttttccctcatctcaggtaaaggatttatcagatgtgaaaacaacacagttagcaggagggtcaggtttcagctgggccttacatatttctgtataatccatttcagatcttaaagagctgcatatttgaaagcagaacaaaatgaagaaaaaagagaattaaaaaggtttattatacttttccaaattaccctgagaccactaaagtacagttacctaaagagttcatcagctaggaaaaaagcagtcaaataaaatccccagctggaagagatatttagttgagtgagggataaaatgacctctgaattagccattacccaggcaggatgaagtcatgtgagggctggtaaaggccttcacccgggatgctaagcaggaccagtctccaggagaacaggaccctttttaaacttgaacttcctcctagggccatgattaaacttctgtagacgaacttgacttccactgcttcacaataggcccattatgtgctggagtaggccctgtggtttttaaggcagatctggtcgggttctggactaggtccaggctccagttctaacctggttcaaggcctgcccagacccagttctgatgcagtcactacttcctcccgcagatctcttcatgccgctgtaagctcggaggccaaggatgcggagtaggcttcccccagcgcttgccgccctgggcgcggccctgctcctgtcttccattgaggcagaaggtaaaaggctcccttccccttcaccgagtgacaatgcaaaattcgagaaaggaaaaaacacatctttcttgcttctattgcttgctctgttttccctgcgcttcgtgctttctccggtggtttctctccttcagagaaacgcccctttctcctgaggtttgtccatttcccagctctcaggtccagctctttcgtattctgcttaatgcattccgtacagtgctgtgtggtcttcttgagcttgtctctgcggtgtgctgtccacactgccacctgcactgccgcctaataagaggaccagccgcccgagagggggcgacggctctaatcagcgcaaccaacaggacacctccgggtggcacccaggagccccgaagagcgggcgcactcgctcgcttggctggtaaccaaccacctggctcggggctgcgacctcggtgacagaacacaataaaagactccaacagcgctggctctgcgcctctgtgtgctttgtggggagctcagtcggcggggcggacggtgcgggcagatgagccagcagccaagcagcctgggggatgatggcaggcaagcggagatccgggaccccaggtgttcgcacgacctagggtcgcggctgtccctgttggttagcagggctccaaggcgcgtggcctggactggtccagctcagacaggttgagcctgggccaaggtttccagcctgggaagcaagcgcgcgccggagttgctgggcaccacctccagtgtcctgcccttgctccatcctgcctccctcagggacagccgggtgcgtcggaccttcccgcggaggcagtggggcgctccgagatgggtttccaaaacggcgccgtgtggcccctcctctagaaaatggagggcttttgttagatgtcccacccaattttatttgttgtgtgcacttgatgtcttaatttctcagtgttcattaaacaagccatttcaatatgtcaaccccatggcggcttctgtggcccctcagttgtcactggagacctgacaaattagttttcttattctgcaaagaaaatggggtaatgtcatgaaagatatcttttttttttttcagtaaagaaatacccctgatgaagttaagggaggaaaaaaaacacttctgccaagtgacagctgtggaagttctgggttgaggtgtgcttttttagaggctgtgagaaagtatggttgtttgcatgattatgccaaggttttcaaggtttctatagtgttggattttctacttcaagactacaggtaaaaaaaaaattaggggaagcagagtgtttccaaaatgtatggcatgttaagaaaagtgacagaaacttgctgacttttcttagctgatgaatattttatgaatgtagaggcttttcagagtggcctctgtgaagtaatagtcagatgaagttgcttttaatgttcctttctatgtcgttgttaggaaggaattttatttgaggaacttctggaggccctactacagatatttttagataattcactgaagtggcccatttattgctcattaagaaaatagttatttgaaaatcagaaagagttgagaattcttagaaaaagagttaggctggaaatgatgtaagtggaaaaaattgattctgaattagatattggctggttagcaaagtgcagttagaaagaacagcttactatctacatttctgattattcccatattatattttatcttttaaatttgtatttatttccatatggtacagctctttttttttttgcttcttaatctgtgtcttttcttgtatcccatctccttaagttagtatttaataattatattttaataggattcattttttggccttattctctagtttggcattgtcaaatagaaatatggtatgagccacaaatgtaagccacatatgtaacctacatttttttctggtagccatattcaaaatggaaaaagaaacaggataaattaaattttataatgtattttatttaacctaaattatttcatcatggagccaatatgaaaattattagtgagatacttgactttttttgtactaagtctttgacaattgggtgtgtattttatacttacagtgcaatttattctttaagttatttttatttttcctgagacagagtctcgctctgttgcccaggctggagtgtagtggcttgatctcggctcactgcagcctccgcctcctgggttcaagtgattcccatgccttaacctcctgagtagctggtactacaggggtttgccaccatgcctggctaatttttgtatttttagtagagacggggtttcaccatgttggccaggctggtctcgaacccctggcctcaattgattcacctgcctcggcctcccaaagtgctgggattacaggcagcacagtttatttcgtactggccacattttaagagcttgctagccacagatgtctggttgcttccgtgtcggacagcacagctctgctgttgactactaagtggtgctaggggcctttgaagggctaacaaaatttggggccaaagcctttctggggtcactgggctggaaccagaatttctttgaaatatttctgttgggggcatttcaaaatttcaacttgggactccatttggtaccatgccattttgatctgagtcctaaagtagccacagttacgtttcttttcctttcatgactcacacttgcactcttatattcatactattttattaccattttctatgaccttaatgttttatatattaaaaacccaatacctttttgaaaacattaaaatgttttggtattcactttttgcctttcttcttttttatagtggtaatatttttgtcttgtttttcttctgcttatttgtattaggagctatatttttcatactatgttatcttgtcctatagaaataagagtggaaatgattttttcacttcagtatctataatttttagccactgcagagactttatcaaccgcatcactgcatagactttatcaactgtatctgagtggcctagaatgtatgaattatttttggttcatgtatgatacagtatgttaattatcctgtagaaaacttaacactttgcatataaagattaatggtcagtattccctgagaactgggcacttttctaattaatctaggattagagatgaatacaagttttctgaaaaacagagtgttaattttggttagtctgatttatagtttataatatataatgaacaattgaatattatcaattcatcggtgagttgtggctatagctttgtcttgtgtctaggttgagactaatttgtatatatttttataatcctatgtctaatttgtgttataacagaaatttcaaactagaggctaacatagagatcatctattctacttctctcgttttccaaatgagaaaatgaggcccagagaggctgaatcacttggtcaactaatgcacttacttagatatgaaaaacagacaagaccccagtcttctagtcctaggttagtgctggtttggtcacactgtgctttgtttgtgcttgacaactggttgatccggaaagtttaatgagagggcatgttttgtaatgtgtacaaaataatctgtagcttattctaaaatattattttttcaactgattatttatggtaccttgaaaactcaaatgaaatggatttctatatcatggcaaagataattaaagttatgctaattttgcatggcaaatgtaaattaatgcctatagaatatagttaactcatcacttattgcacacttgtcaagatttctcctattaaggtagtatcctttccagtgttgttatcacagatatcaaactaaagatcttagtagttcatcaagatattttagtagtgtattcttagttttgatatatctatagcgcattatgtatacttaccaaaacttattagactcctctactccctctcatccattttcccacctgtctatccatccttcccttcattcatctctgcagtggccggtaatttcttggacatagcccctttttgggtgccctattaaaaatgtttcaaaaagttatatatcaagatggacactttagttttaaatgcttgaacaagtgtataaagttaatataccaaatttcatctatatctgaattggagatacctgaataccacatatttatgtatatatgtataataatatgtaatatgtaataacaatattacatatgtaatacatatgtaatatgtataatatatgcacatataattatacatgtatgtatatataaatcagctacatataaatattgcttatatttacaaatataggtatatattaaaaatacgtatatattaaacccatttatgcctagtgttccactattggaatgctaagcatgtgggagtgatttatatcctactgctcaaggtcattgccaaggtctgattacaaaaattcaaaaaattgcaacctcaggtataaatgggttaaaagtaactacatataaatattgttttctaaagttaatttttgatggaaatatttcttctactttgcatttaatctagtacagtagaaaactgtatgttttgtagtcagaccatgtaatccaagtgttgttgcctattggctgtgttaatctctctgaatttcactgatttatctgtaaagcagggataataaggcccatcattgggttcttataaggaaaaaagcagcaacacagtaaccagctctctgcctgttatagagaacactcagcaagtttcagctattattatcattcccaaaatgtcctaaatcctgccagtttatgtaacaaaaatttcatcagaatgagtcttcgtagcatagcgttttgataacaaaaaacattatctgtaaatatgaaattaaactataagaataaaaatacttaaaattttagtctctttactgtcagtattcaggttttttgaatatatgtaagattgttatttatttgtaattttcattctgtttctcttggtttggattctcatcctatgcaactatggctctttgcagttataatcaatatgcagctagtgcataattgaaaatttccgggctgggcacagtggcttattcctacaatcccagcactgtgggaggctgaggagggcggatcacctgaggtcaggacttcaagagcagcctgaccaacatggagaaaccccgtctctactaaaaatacaaaattagccaggcatggtggagcacgcctgtaatccttgctactcaggaggctgaggcaggagaatcgcttgaacctaggaggctgaggttgcagtgagccaagttcgtaccactgcactccagcctgggcaacaagagcgaaactccgtctcaaaaaaaaaaaaaaaagaaaagaaaagaaaatttccagcatcagcattgtcttagggaacacttagactctgtgatgatgtgatggtgtttatgaattatttttatgtaaaagaaaatatttttaaaattaataaagtacatttttcagcactgatttatgttgacacgggtcatacacttacatctgctttattattattttttcatgaaacaaacaaatgtacaaatagaatggcatgcctgaaaagctgtacatgcaataaaatcggccagaagaaaagtgaagcgggctctctgttgtacccatgcgggttggccattcttttctactttgattctcacatatcacagtttctatgaacacctcaagatcctctgaaatgttaaagacttttccccacagtcaatttttcagtttatctggaatcctggtcatttggatatcaacaaggggggctgctactgcccttcagcagttttaacctaatgtccgctgcttcaggtcattttccttccaaggttggtggtactgtttttccatgtactgattttttttaaaagcatgctcaggccagtgtgtctgcctttgcattaaatttgtcctgagccattgctactggaacaatattttataatgatattcttaatacccgttgtcctattaacatctgttgcatgcatgttatactgagtgatgagtacagctaaacctcaaaatatgattaaagactgaagaatgttgagtaattaaactatgcatgtagattaatagtctaatctcactgcctgtgtatggatagtaagaatataacattcattccaatactagtgtatccaataaaaataaaaagccatctcctacagttggacgcagcagtccactaaagcaaatgtttgcttaattatttccattaaaacatattattaatattacataaatctttaaccccagttaaattctgtgactcatgtctcaaagctgctagtgtattttaattgacctttgaaaaaacctgaaaggaaattgtaatctctcaaaacagatgcaaaaattctgactcacaaggaatactttcagactaaaacattttaagaagagtgtggctgaaagtcatcttaatttgttgacctgtttcaagagtaataatttttaattcatcaaccatgcactgacagtgagtcagtacaatgctgcatgatgaggcatgaacattgtagagagaatatcattataaaatatttaggaaacgtctttgtgtaatgactactgtacatggaggcttttgttcattgtgggaaactaaaaacaagtcaacatttcattgacacatgcatgatgctctacagttttgtatgtaaactatttctgtacttttcagttattcctgtcattgacttttccaagtttttatgcgcagtcatgtcttcagatcactgatccttcttcactgttttctttaagttctgtaaataaatgtccataaatatacattgatgttgtcttttcataattaaccattgttttgtaaaggaccatactggcattttaatctaaaatgccctttctagtatggagtatacctgctgcaaaggaaataatagtgttggtttacaccctggaacattcagcaagctggtgtaaacaggcagaatattagtttaataaacttttgaatatcgctatttatatatttataaattaacatcacttatttttgaatacttgcctatgaatatgaatatacatttaaatgtatatttccttgtcagatataactttcccatgattccttattttcattaaaatatatttttcatctctgctacatattgagatttatcaaataacaatgaataattacaaggcaaataatgcagagaatgaaccaaaaccatcattgtttcttgtccatattgtgggaaaaaacatattatgtcaatgttttgaattaacttctctggttgtaagcaggttgtgatttggcatgcttgttcaaaatgcactcagcatgtatcgaaattcctttaattgttatgtgaattgtttgcatatgtggttattatatgtgatttcattgtacttgtatgtacttgtatccaaatatgtttctattatgcttgattttgctggccattcttgaatgacctagcaactcaagaatcaaaagtgttttgtgctgtcttctgtaatatgtacactctctgatgttttgtcagcttttagttttattcttatccaacaacatatcttttatatttgttggaaacaaatttatgcaaagacaattttagaaagctttgctcaacacaattctttattaattaaattgaccattttgtgacattgaaaagtttaataatataaactctctcttttgcagttgacccaccttcagacttgaattttaaaattatagatgaaaatactgttcatatgtcatgggcaaaaccagttgatccaattgtgggttacagaataacggtggaccctacaacgggtaagttttgagactggggttttaggacagaagcatcatgatgatataactcaatctccacctcttctcccctttcatcatgaagaagctgtgctttaggaagcctgagggatttgatccatgtcaccagacatttgctgaactcaggtttcagatttccagtctagtgtccactattatattttaatgttattgagtttaacatgttttgctgtggtaggttgttattattaaaaattgactctatttttacctgatcagaatattgttagtaacctttgatcttatagaatcaaatcctcattctttggcattcttcttgaattacttaatattttcaacatttaaagtatcagctgatgaagtaagttgttacaccttacccagtgtcctacacatttcagtatccaggaaacaccattctgtgataatggtaaacaaccatgatgacagataagaatttactttggctaggtggattccatcgacactaggctgaatccttggaaaactaaacaaaacttgttttgcttgttctcaggcattatctttagtgttaataatgttgccaaaatgtggagaaccaaactctattgattaatttttagttctaaaatggaatgagaaaataaccatttccactgactgtaaactagttcaaccattgtggaagacagtgtggcgattccttaaggatctagaactagaaatatcatttgacccagccatcccatttctgggtatatacccaaaggattataaatcatgctgctataaagacacatgcacacgtatgttcattgtggcacttattcacaatagcaaagacttggaaccaacccaaatgtccatcgatgatagactggattaagaaaatgtggcacatatatgccatggaatactatgcagccataaaaaaggatgagttcatgtcatttatagggacatggatgaagctggaaaccatcattcttagcaaactgttgcaaagacaaaaaaccaaacaccgcatgttctcactcataggtgggaattgaacaatgagaacacttggacacaggaaggggaacatcacacactggggcctgtcatggggtgtggggaggggggagggatagcattaggagatatacctaatgtaaagagttaatgggtgcagcacaccaacatggcacatgtatacatacgtaacaaacctgcacgttgtgcacacgtactctagaacttaaagtataatttaaaaaatagtaaaaaaaacaaagaaagaaaataactacttccactaacattggctaaatggtaggaagaagtcttgactggctgacagtagagatggaagatgtcaacacaacttattactagaactgtgtttatttatcttttagcctttaaaaataccaatgattttacatattgatttaccaggaaacgtagctttttttaaaaagatgatttaaaaacttaaaaaggggtaaaaaatttacttttttctctttcaatcttttctccccaaatatatttgcagttaacatattcattccaaatcagaaaatcagttctaacagggtccatccagtttctagatgttgggaataactgacacctaacacttccaaaactggcactggggctacccaacctggcagagtctgagtgtcttgatgtcctctggggatcttggttggttttgcatgttctacctgcaaaccaagagcatttttcagtggtctgttgcacctgttatctttcctaattatttatattttgatgaaaacaatataattaaaaatatcaggcacgtaattcccaggaaccaccaggtttcctgattgaattgagaattaacagaatctagaagggagtacataactgccaaaatataagtaaacacctagtatactggaccttgaaatatttgatacctgcttaagtcaatgcagaggtcaatgttacccattaaggcatgtagccatttgagtatggaatatgcactgcttccacacagattttttcccactaggggttggtcttaacctatggggtttgttttctttgagtttattttcatctcttatttctctctctctgctctcctccaatgcataatttaaaattaaattcattttctctgctttatctctcatttataaaactgttatctaccattagtctccaaaaccaatgaaagatttttagttcgatattctggtatacctttaaactagaaatgtcttgaattctcaaacaagtattaaatatgattgtaacaaataaaagcaataccagtccatttattaaatttctaaaattcaaaattttagttttggaaggcagtaaaaaataatgtttgagtgtcctgaaaaaatgtatatactgaatttttcagattttgagtacctctgggaattacaatgtattgtgttatatgtgaaaaatgttttgttgcattcatatttttcctttttatatttccagatgggcctactaaagaatttaccctttcagctagtaccactgaaactttattgtcagaacttgtacctgaaacagagtatgtggtgacaataacttcatatgatgaagtagaagaaagtgtaccagttataggacaactaacaagtaagcacacatataaaataaaatatttgtataatttttattttgcagaaggtttttccaacttcagatttaatcttttatgatacaaagttaatttacagcagtactaactatttttttctggtatcctagttattagtggacatgaataattcattcctgatttataactctggtctctggaaacagcaggaatgttatgaatgaagaccattaaaaatgttaaactttgctggacaacaatgtgaatatctttttgaaatatctcaaaaatatcactaaaataacttacttgtaagggaatgattatttggcagtattctatgaccagctgggcagagccatacatttaagagacaataacaaaaactaatataatatatttattctattttaaagagaatatctgcttgggttcatttccttttgtaataataaagttttaacttagttcaaacaggtagttcgacaaagccagtggagaagaaacctggaaaaaccgagatacaaagtgagtgtttctcttactatttttgcttagattcatggaagtcataaatgtaggatagaacagatgttccaattatatacatagattgatcttattcctatattaatttatataagctttatctggaaggagcacagacaatataagaataatgtataactaagtcattataacctaagttctgacattctagctagtttttcattctatttactagatattcttttcaatgggagtgttttgaaattgtgtgtgtccaacctttcctgcaggattttggcaataggtgaaaacaaagcacatctcaggactcaactcatttctcaaagacaaactgatagcagtaggtggtacttaggaatatatgagaaatacagggctggaacatgagagggatgccctcagctagtgttcaaagtaatacaattgccatgaaaatacttttctaagtctgtgtgtatgttatgctcttctctaggttatttacatggccttagttgatggtagttgtaacctttttgagagtctctgtaacacacctcttataaattggtgcatttgtaatcagatgaaagcaattttatttagtctagatcttgcagttattagcctccttttgtcttatattgcttttctgacttatggggatagatccttaaggggtttcttggacttctaattttgtcatctcgtaaaacttggatttatgacccagaatgacaataaaaagattataaacacaaaggtctctttatctggaagtatcccctccagatcactgtttatcattatttcagatgctaatattttcaacaattattatttattttaaattgaggtattatgccaagtattgactttttaataggcttaaattcacctattaaatagtgtgcaaaacttatttaagcatacaacttgtatttatttggcttgcaaaatttttcagcaccctctccttctcttcctagccaaatacttcttttattacctatcagctgactgcaagaacaaaatcatcatcagaaaattcacttggtattgcattacaaatacagattttcataaaaccaacctgacctccaccatagagagaaggaaagataacatattcagttacaaaagctgatcattgtattttgataatttcaggataccacatggatttttaacttttgaataaaaataattgtttaccctctttgttcactaaaagtaggttttaattgtcaaatttaaatatattgataattaggactatatattttggctattttgcataattttatgcttgtttttacttctatcaggctcccttagccctctagactaaccctaatgcaaactttagacaattatattgaaaagtgcaagagtatattaacaaattaggtcttcaactcaactgcacttccttgaatggtacagcaattattttgtatttatttgttgataaataccaaggaataaaaaccctttgcttatatttcttttgtatgactcctaaatgttttataaaatttgtacttgtaaagaagagtgagggtatagtttataaaaatggataggttgatagcacgaatacttggactttatgctcccggagagcagattatagatctatttatctctttttgtataatgtcttataaagcaatttaaagacatctagttccatgaattcatcttgataaaggcattgaaaatgcttctatgtgttgttagtaaaattgtatatttctttgtgcatgtgggtgaagaacaattggtgaatatgttctaatgaacagaatgatttaaggagccaacatttttgcaatgttaacatgtattgatgagttgatttaataaagcatcatttaaaaagatatcaaatgtatttcagaatgctctgtcagtgcctggactgatttggttttcctcgtggatggctcttggagtgtgggaagaaataatttcaagtacattttagacttcattgctgctcttgtgtctgcttttgacattggggaagagaagacaagagttggagttgttcaatacagctctgataccaggactgaatttaacttaaatcagtactaccaaagggatgaacttcttgctgcaataaaaaaaattccatataaaggtggcaacacaatgacaggtatgttctacagatttttttaaagttaaaaataaatgaaatgtctgtttcagaaagaaatgatgcattgcctattacatattaaatatttttgacattgttcacatagtttttgactttggaaaaattgtgtagtacagagtaaatgaacatgtttcttttccctttaggggatgccattgattatttagttaaaaatactttcacggaatctgctggggcaagagttggctttcctaaagtggcaattattattacggatggaaaatcccaggatgaagtggaaattccagcaagagagcttcgtaatgttggagttgaagttttctccttgggtaggttaagttcagttaattatttccattttacaactcctacagtatacttaatgtttaggaagatgaaagattgattcctcaaggaaggatgctattagaagtgtttactgcatttttatagtgtaatattaaagacttaaattgtctttaagtaaaaattctgcttatctatttccctcatataactcccttagcatatgtatttaggaaggtggtattcacattctttgccagctctctacttttcaaagaatgctgggccaatgattctaataaagatcctccttgtattatcattaagtgttttttatgtgtttcctatattatgtaatacttgaagaattcagagggctccagcttattgaggactctggaagaaaaaagtattatctttacagatggcaaagacatacgatggtatggttgggatgaaagcccactctgtttaaccaaccacttttttcctctttggctgaccactatatgtcaaattacaaaatgtttttgtcatctgcacagttgcatgtgcaactgttatgaaacaaagcaattctggcttatgacttaatgacgatttgaatatgtcttcagttgtgaaagatggagaaaacgaagaacttctccaagtcagttggcacatttcccatttcaatatgtccttatccttttgttttgaaggcattaaagctgcagatgcaaaagaactcaaacaaattgcctccacaccttcactgaaccatgttttcaatgtggccaactttgatgcaattgtggatattcagaatgagatcatctcccaggtgtgctcaggtgttgatgaacaacttggtgaattggttagtggagaagaaggtgagtagactgtgtagcattccccatgtgttagtcttttccattgtttgagtatttatagttatcttagaagtagacatatttatttaaatatttcttccagtgattctacaattgtatactccactgtattgttttttagcaactcaacttgttgataccatttgtattgtttttccttctagtggaacattcagtaaaatgtatcattgcacagttcttaaaatttttttggtgggggacaagttatgatttactcttttctttaagactcttttgtgtacattgaatgtctatctgattatgctattctgctacttgctttaattaccttgcactctgatttaaacattgatgggctggaaagacatttgcaacttaaaataataacaatgtttctgctaactagctaaggacaagggttttctatcattatactctgagtaatgttttgaaagcttttaagaatatttcaaagatcagtcaatgtgatcctccccttagaaaattctcccatttctattagttattacttctaaatacatgggagaaagaaaagacatttcaaaagcatccttttgaacattaaaaataacaacccaaagcctttatatttttccatcattgttctcctctcagcttgagaatcgataagtgattaaacataaattctaaatagtgacatcttcaatcatacaaactctttaatcttcaatctctgaacattttgtcaaaatgttcattggccctaattctgtctcagaacctctcattacttcatgggctctcaatctatcctttgttttactgtctactgtctaacctttttgctttgtattattataaaatccatctcactcacctccacttttctctgattacttctcttcactcagtcttttaaacagtttaattcttcctggggtgcagttgcatgtatgcaagggtaggccagactttttttctgccactgttggaactttccctgtgtagggggctggggctacatcacaggtgttcacatttctctttagtgtcttctctcttctgctggactaatctaaggcttctctcttctgctggactagcctgtactgcctctgtatccctcaggtttggccagatttccatgtggcatctctgtggcttccctcctactattttctacttaaacatcattttaaatatatatatatatatatatttatttatttttaaaattattttcattttttaaaacttttaagttcaggggtacatgtacaggtttgttacatagataaacttgtttcatgggggcttgttgtacagatcatttcatcacccaggtagtaagcctagtacccattagttatttttcctgatcctctccctcctcctaccttcaaccctccaataggccccagtgtgtgtgtcgtttccctctatgtctccatatgttctcatcatttagcccccacttataagcaagaacatgtggtatttggttttctgttcctgtgttagtttgctaaggataatggcctctagctctatcattgtccctgcaaaggacatgatcttgttctttttcatggctgtatagtattccatggtatatatgtaccacattttccttatccagtctatcattgatagggttttaggttaattccaagtgtttgatattgtgaatagtgctgtagtgaatatacgtgtgcatttatctttataataggatgatttatattccttgggtatatacccagtaatgggattgctgggttaaatggtgtttctgttcttagttctttgaggaattgctgcactgtctttcacaatggttgaactaatttacactcccagcaacagtatataagcattcctttttctccactacctcaccagcatttgttattttttgactttttaataatagccattctgactggtgtgagatggtgtctcattgtggttttgatttgtgtttctctaataatcagtaatgttgaacttttttttgtatgattgttgaccacatggatgtcttcttttgaaaagtgtctgtttatgtcctttgcccacttttaaatggggttgtgtgttgttttcttgtaaatttgtttatgttccttatagatgctggatattagacctttgttggatgcatagtttgcaaaaattttctcccattttgtatgttgtctgtttactctgttggtagtttcttttgccatgcagaaactctttaatttaattagatcccatttgtcaatttttgtttttgttgcaattgcttttggcatctttgtcatgaaatctttgccagggcctatgtcctgaatggtattgcctaggttgttttccaggattcttacagttttgggtcttacatttaagtctgtaatccatcttgagttaatttttgtctgtggtctaaggaaggagtccagattcagtcttttgcgtatggctagccagttatctgagcaccatttattgaatagggggtcctttccccagtgcttgtttttgtcaggtttgttgaagatcagatggttgtaggtgttcagtctcacttctggattctctattctgtaacattggtctaggtgtctgtttctgtaccagtactatgctgttttggttaccacagccctgtagcataatttgaagtcagatagcctgcacctccagcattgttctttctgcttaggattgccttggatattcggattcttttttgttccatatgaaatttaaaataggtgtttctagttctgtgaagaatctcaatggtagtttaataggagtagtggccaatctatagattgcttttggcagtatggccattttaatgatattgattctttctatctatgagcatgaaatgtttttccattgtcatctctgatttctttgagcagtggtttgtagttctccttgtagagatctttcacctaactagttagctgtattcctaggtattttattctattattcacaactcccattgtgaatgggatttcgttcctgatttagctctcagcttgactgttgttgtgtataggaatgctggcaatttttgcacattgattttatatcctgagactttgctaaagttgtttatcagcttaagaagcttttgggctgagacattgcagttttctagagggattatgtcatctgcaaacagggatagtttgacttcctttcttcatatttggatgctttttattcctttttcttgcttgattgctctggccagaacttccaatactatgttgaataggagtggtgagagagggcaacctcatcttgtgctggttttcaagtgaaatgcttccagcttttgcctattcagtataaacatcacttttatgtcctacatctggttgcttttttgaggaggcgatgtgtaaatttgggcctgtttttacacacacttcctgcaggttgatttgtgaaaaattataactatatcttccgggaagttgattccattgacaaatccagaattttgatattgtctgaaatatcttaaaatactttacgttaactgtcaaatacatgactatgttctatgttgagtaaggatcaccattttttagaggactgatatgcatgcgttaatatgcatgttataagccattgtttcccctctgtttggtggcactgtgaacatagttgaactttttttcttaccctgaaactagtgaaaataaaattgtttaaaattataagaacctgtcatttaagaagtactaaatgctttctctttcttggcatattataaagtatcttttaaagattacacttttatgatgttattaagagagaaaaattccctaaagaattgaatgaagcattgatttaacaaatatttatcaagtgcctactttggtgcttgagaatgaagacaatgagtgaataccaaaaccagaatggaaatcttggtttcagagaagaattaggcatgaagtgtcccaacattaatttcttccaaatactttcttattccattaacttctcagcaatttgactaaaagccaagtgttgaaccacttttggtttgatagggacatgtgaaattggggactgaggcgggtattgggcaactcttttcaatgtatttaggatgaatttgaataaggagatttgaaggtccaaacctaaagaccaaattagtaaggttacatctcactgttattaatcactgtctgcttgtaactttttagttgttgagcctccttcaaatttgattgccatggaagtctcttcaaaatatgttaagctaaattggaatccatctcctagtccagtgactggctacaaagtcatcctcacaccaatgactgcaggaagccgacagcacgctctgagtgtggggcctcagacaaccacgctcagtgttcgcgacctctcagcagacacagaataccagatcagtgtttccgccatgaagggaatgacatccagtgaacccatttcaataatggagaagactcagccaatgaaagttcaagtgggtaagtcaatgtgtgcatcattgtatttggaatatgtgaagatctgtttgacagaatgccttacttgtttggacttagttttgaatgaaatatttgcaatagttttttttttaaagaagcacgcttactaagaaagctagatatgtatattttaatgattaatatgtattgaagtttaatgtactttttttctctttacagaatgctcacgtggtgtggatataaaagccgatattgtgtttttggttgatggctcctatagcattgggattgcaaactttgttaaagttagagcctttttggaagttcttgtaaaaagttttgaaatttcaccaaatagggtccagattagtcttgtgcaatacagccgggatcctcatactgagttcactttgaaaaaattcaccaaagttgaagatataattgaagcaataaacaccttcccttacagaggaggatctacaaatactggcaaagcaatgacttatgtcagagagaaaatatttgtgcctagcaagggatcaagaagcaatgtgccaaaggtcatgattcttatcacggatgggaaatcatcagatgctttcagagatcctgcgataaaactgaggaattcagatgttgaaatctttgcagttggtgtgaaggatgccgttcgctcagaattggaagctattgcctctcctcctgcagagacccatgtgttcacagtggaagattttgatgcttttcagaggatatcttttgaactcacacagtctatctgccttagaattgagcaagaattggcagctataaagaagaaaggttagtagactttgagagtaaaagttatttcttcatgaacaaagaatttttggttctaaaattgtggataatatgcttgttcaattcttcttatagacacgaaaaagtaactttcctatgttattgaaaactattgaacttagttttcttagctctgagatatgactttctcctggatatggatcatattttagttggtgaaaaagctgtttagttacaagagtcatgagatgtttctgttcctagattgtcaagcaggtttaggaacaagttttatcatatgtatgtgtcatttacaatccaaatcccatgtatggggtgttcactatgtgctggatactgagctgggtccttcaactcaaaggtgaagagaatatagtcttgcacctttggattctttttatgcatttcctttcctgaatcattttgggcatcatttgtcacatctggaattttcctcatttgtctgatctacttttcaatgtgtagttaaaagtcccatcccttgagtttgtgtccttttcagggacatggatgaagctggaaaccatcattctcagcaaactaacacaagaacagaaaaccaaacactgcatgttctcactcatatgtgggagttgaataatgagaacacatggacacaggggtggcggcatcacacaccgggacctataggaaggtgggggggctgggggagggatggcattaggaaaaatacctaatgtagatgacgagttgatggatgcagcaaaccaccatggcacatgtacacctatgtaacaaaactgcacgttctgcacatgtaccccagaactcaaagtattataataataaaaagtcccatccttttcattaagccttcctaaactgtaactgtcctagcactatcatgctatcactttcactcagttggctttcctatgtactgtttttttttcttttttttttttttttgagacagggtctcactctgtcacccaggctggagtgcagtggtgcaatctatgctcactgcaatatctgcctccccagttcaagcaattctcgcaccccagcctacccagtagctggaactacaggagtgtgccaccacgcctggctaatttttctgtttttttttttggtagagacggggtttccccatgttggctagtctggtcttgaactcctgacctcaggtgatccacctgcctcagtctcccaaagtgctgagatcataggcgttagcccccatacccttcctgccttttttttttggttgttaataatgttgcattctctcgtttctctattttgactgtgtgccccctaaggatttactgtatgtgttaaacattgtctctttctatgatttagtttaataactgctaagtttaatacatattttgttgttgggaaaaattccttaatttttactttgaaatatttgtctgcaaaccaccaaaggttaatatccaagtaccagggatgaatgggaaaatgtagatggttcattttaggtctgctatggtttaaatattccaattatgggcaaggccattctattacgactgctttaagaatctcaaaattcacattcaaatttaatcagtcatttaaataatagaagttagtattatagatagtcaaggtgaataatcaagatctcttgttgggttgtaagttgtggggggctttctctcaatggtcaaatgtagatgagatacccagtacagtagtctcaatgagcaccattctcccaaattaatgtaagccattttataaacattgaaatattggttactgttttgttttatagattcaagcatttttaactgtctttttttttttttaaatagcttacgtccctccaaaggatcttagtttttcagaagtgacttcttatggtttcaaaaccaactggtctccagctggagaaaatgttttttcatatcacatcacctacaaggaagcggctggggatgatgaggtcactgtggtggagccagcatcgagcaccagtgttgttctcagcagcctgaagccagagaccttgtatttggtcaatgtgactgcggagtatgaggatggcttcagcattcccttagctggagaggagaccaccgaagaaggtgtgatggggtttctgccactgttattcagaaaatgaataatttattgcactacaaagttacagtttgtaataaccatctgctttatagttcagaattgccaatgcctttgtaagatttggcatctttaaaagacagcttttcataaatctttttaaaaagagaaaaataacttttaagtaaaaaaccttagacttcttttgatgaatttgaagttaggagacctagagaactgttgataattatggaattaacttttgaaatactgtttatccatcttttttggtcccaaatttcaggaatgtcatgtcttaaatctttctgaaattgtttactgtacttacagagttacggcaaatatatatatgtatatataggtaataagtatattataaattatttattttctttttaaaaagttgtggtaaaatatacatatttaccattgtaaccattttttgagtgcacattttagtggcattaagtacattcaccttgttgtgctactatcaccaccatccgtctttagaactagcaaaactgaaattctgtacccattaagcaataactccccattccctccttccctctactcctggaaaccaccattctattttctgtctctaggaatttgattactctaactacctcacttgagaggaatctttcagtacttgtcttgttgtgcctggattatttcacttagtaaatgtcctcaaggttgatccatgtcgtagcgtgtgtcagaatgctctctctacttatggttgaataatattccactgtatgtatacaccacatatcttttaagatggggttcttattatgttatccaggttggcctcaaaatcctaggctcaaatgattcttttgcctcagcttcctgagtagctgggactacaggtgtgtggcatagcgccctgcttcacattttgtgtatctccattcatcaatggacatttgggctgcacccaccttttgtgaatattgctgctatgaacatggtgtgcacattttgccaaatgttttaagcagtatttgtttacatgtgtactccttactggatagaattgaatatatttggacacactttgttatgtttgacatttaaggcaccaatttaagttggttagtggaagactaaggcaaggcaattattctttaacataagcatagcaaagtatcacaatagatgtcaattgttctttcctcttttgactgggaataggaggtaaagaccatgaaagaatagtgtgaggaatttaagatagttataaggaagtatttgctgacagggatggtgcacattggcatactatactgataaaagctagagaatcttttttctgtgaaacatttttcagataagattgctatttttcctttttttttttttgcatggtttaggtatatttcttcctgaagtccatcacataaactaaatggtctaagaagtcctttcatcttatgacttgtggtcatataagggagaaggctgtactcagatatttctgagtttctgatgcttttcctgtaatgcccacactgctgctcgatgaccctgaccctttcttttcagcattttgggaggggaatgggaaatctgtctcaagagaggacttgtctcagggtttttgagtagaagtcactccattcatacacactctagtttttggtcattggtctactacaatggagtttggtaaagtcttttcagttatattgtctgtaatggaatctgggatttaaatttgctttagttgataagaaagtttccaatgtaatactttcattaagctaacaattacagagctcctgctatgtgtcaggggctctgctaaatgttttccatagattatctcatttaaccacttaaataatcctataaatagtcatgttttgctgctagggtaatctgtggctcagaattacatatctgttaagcttcagagctaggattccaacccatcagtctatctgctgatttgttctgactcgtttaatctttttccttccaatacaaaatgaatcatgggtgtaagttggccaactaccatttctttctttcctggagagatatacttccttcctttctcttctagagagatatacttccttcctttctttctccctggagtgatctattgatgtgttgaatatttaaataaacttctaaatgtctgtgtgttatttgccaggcgtgttgtgctaggctttcaccccagtggactgagaagacaaagacctttagttcatctttcctgaatatgttgtctgtataggcagttggccccattgagcaagaaggtcatttaaacatgtttactaaacacaaaaccaaatgatgttctcatttgggcataatgaaaaatgcatttaaaattatgagtctgtgggtgttacccatagtgcatcttagcttcaagatgtagatctaatgagcattcattaagtacctattctgtgcttgttccatcctgtgtatggttgaattattctccaagtcaaatgaccatacagataaaaagttagtgtgggacggactggataagacggtttggttgggtgggttgatatggtagagctgggtgttaggtgttattttcctagtttcgtgagaaaatgtagtaagagtgaaagtcttggctgcttatattcaaagaaatgacttgtttttattcttgaagtttatagcagtataaatttagcatttgatagaatatttattattttaaaagtttactattatatacatctttatgtaattaaaaaattaacagtacttagtttctttctggatattatagaattcatatttgctgtttcagaatttagttaatctctggctaaatgagtacagaaaccaggatgtttgcaaataaattgctcatggatttctttagagaaatggtataatttagtaataaaaaggtaatttttgtatttttcatataaagtcagtcaatttatggtttaaaatctatttttccttttttatttcagtaaaaggagcacctcgaaacctaaaggtgacagatgagactacagatagtttcaaaattacttggactcaagctccagggagagttttaagatatcgaattatatatagaccagttgctggtggagagagcagagaagttaccaccccacccaatcagaggaggagaacactggagaacttgattccagacacgaaatatgaagtatctgtaattcctgaatatttctcaggacctggtactccattaactggaaatgcagccactgaagaaggtagaggaaatatgcttatcatatggtgacaaccaaactcttagactagaggggaaaattgggacaactatccagataaaaaactaatgagacactttgtttcaattgtttgagtatgttagaccatagtccttttagatttaagttaaaattttttttttacttaatcatgacattatttacttgtgtcaatagatttatttgtttaattaattatttaattaatttttttcagacagagtctctctctgttgcccaagctggagtgcagtggctcggctcactgcaccctctgcctcctgggttcaagtgattctcctgattcagcctcccaaatagctgggattacaggcgcgtgcaactacacccagctaatttttgtatttttagtagaaagagggtttcaccatgttggccaggctggtctgagactcctgacctcaggtgatctggccgacatggcctcccaaagtgctgggattatagacgtgagccaccacgcccggccttgtgtcaatagaatttaaatgctaggatatagtctcaatattcttttaaaaataatattattaaatgttttagtgtgaattgaaggatgactaagaattaaaaatcaaactgctatgcaccattgaaataaattgtattttacttcttaagaaagatttttaaacattaacttgttttctttaaatgggatgattaggatcccagtatacattctgatgtttgttgaaattattaatgtttaatacgtgatttcattgggggaaaagtgaggcattcataatttttcattttatttcctagctgtaatgtttttaaaatagcagtaataatgccaaggacacattagcaataatgaaaagttactgagtacctgtctggtgtcaggttctgtacaaagagcttttcatatattttgtttaatctctgcatagactttatgttattattatcatcatctcagcttgataagagaattgaggctgaggaaattaaataataaatcaagaccacacagctaataaatggtgaatctgagtttgtggattttactgtcctactgcagacatttacaaggagtatccattatctcttggtctgcatcacccttctctgtcccactgccctccctccctctacatcactctccccactcctactgcattcctctccctcctcccccactgcgtcatgctcccaccgcccactgccctccctcccactgcatcactttccctcctcccactgcatcactctcccacctcccactgcatcactctcccacctcccacagcatccctctccctcctcccactgcatcactctccctcctcccactgcatcactctcccacctcacactgtatcactttccttcctcccccactgcatcacgctcccactgcccattgccctccctcccactgcatctctcttcctcctttcactgtttcactctcctctcttccccctgcaacctagctcattagcctgttctgctatggaggctttctctttttacctgcttccttcctcctctcttccattggtgaagtgtgactacttcattggttttctctcttgctgagggtctagggctctttgtgctgggtaccataatgtgacccaatacctctttatctttctattttctggagtaaaactagctggcttttatatgctcagtggagagtgacatagggctggattccttaggaaccttcaaagaggacatgaccaatctacaaagaaagtcatgaaatagcagacatcacagctacaaaaggatgggtggtccctcgggatttgtacccaaggctcggtctcacttagctgttttttctcttactttttttccccctagggaaagcaatatgtttataatttatcatttttattatatcagaattcgctcctgttacctttagatgttcatagcattacactgattaactgtttttactgaagatttcttaaaggaattaaaatctgcattgtaatactaatcaatgtgtatatattttatagtgctttgttccacttttaaggaaatacagggaaactattttataggaaatattctaacatgaaagattttacatggaagattttaacctttgtaaacacagaaaagggactgaatatctttccccttgtttctactaacatatagggtctgattcagagatgcttaagctttgttggctggtcaacagttaaaattgtcatagtctcacccaggatataactttgatgtagtgcacatgcataagtaaagtaacaaagtgtttttcaagtcatttttttaaataatgggttttgatgatgttgtcattttttaatgaagttagagggaatccaagagacttaagagtttctgaccctacgacgtctactatgaaattatcttggagtggggcaccaggaaaagtgaaacagtatctcgtcacatataccccagtggcagggggtgaaactcaagaggtcactgtgaggggagatacaaccaatacggtgctgcagggattgaaggaagggacacaatacgccttatctgtgacagccttgtatgcgtctggggctggagacgccctctttggtgaaggaacaacacttgaaggtaattaccatcatattttctgaaaatccaggaacttgtttgtggtgctgcctctaggaagcttaaaatgtcttcagacaatgaatctagaagtgtgcaatcctttctcttaaaaagaatccatattgaaaaacaaataaccataaagctctctgttattcagagatgtagaatgtaagcaactgaaaaaattaaacttgattcagaagtgccttggggagctggatgcataataagaccaaagagatgtgtttatagttccatgggttggttgaaaggagaataggtgtatgacattcagagcgagaagggaccttgggaaacatctatgaaaaaaggtttggattgcccaagtttatgcagctagttctatctttcagatccagataagagccattttctgacttccattcaagtgctctttccatttaccatgcataaaagctcaagaaatataagaatccaagtttctttttttttgtgagacagagtctcgctctttcgcccaggctggactgcagtggcgctatctcggctcactgcaagctctgcctctatggttcacgccagtctcctgcctcagcatcccaagtagctgggactacaggcgcccgccaccacgcctggctaattttttgtatttttagtagggacggggtttcaccatgttagccaggatgatctcgatctcctgacctcgtgatccgcccgcctcggccaccaaaatgctgggattacaggcctgagccaccgcgcctggccaagaatccaagtttctatttgttttctaagtgatttctgaaattccgttctgtattaaattttcaaagtgattgcgataaagtacttagtaagaaacatcagcaagactggagcagtttccttggttctttagagttaattgtcagaggcctttatattttttaggatttttgagatataatcacagcttaggtttaactcaccacagctactaagtgaataatgcaagggagagaaaatacaaatttaattgcaccgcaatgagaatggattgcaatgctaaaaatcccatgatgttgactcagtcctataactgggggcctacatggactatcagcaatagctttccttctcctatcattatattttatatgatttattttaaatgattataggaagaaaatgaatctgaagtatcttctaatatgaaatcacagtgactaagcaaaatatccatcaaagttgatggctccaggagcttggaaggttgtagatattgtaattaatgagacaggacatacaataggcagttcttagaaacttcaagggttaagaatgaaaaacaaataaataaaaaatactaatttaaatagtagtgatcgggcaggcgtggtggctcacgcctgtaatcccagcactttgcgagaccaaggcaggtggatcacctgaggtcaggaattcgagatcagcctggccaacatggtaaaaccctgtctctactaaatacaaaaattagctgtgcgtggtggcgcatgcctgtaatcccagctacttgggaagctgaggcaggagaatcacttgaactcgagaggcggaggttgcagtgagccgagattgcaccattgcactccaggctgggcaacaagaatgaaactccatctcaaaaaaaaaaaataataataatagtgatcaagagttaaatttccatagtccatgaaatctgtttctagaaaaagatttaaatgaaagattaaataccagtgtttaaagtacttacaactagaagagtcccagttgtactgcttagctgtgtgacctggagtaaacctttaacccctctgggccttagtttattcatctataaagaagggatgattatcctccctctttcttcccagagttattgttgagatcaaatgggagaatgtaagtgaaattcattggaaactgtaaaatactctatgtctacaaaattcatcaagaggacatagcttattaactttagatctgatatctaaaagcctcttggtatactcagggttgggggctgcagattggttccaagacgcctgcatataccaaaatcccctgcatataccaaagtcctcttatactcaagtccggcagtcggccctagggaacctgtatatgtgaaaagttggcccccggatataggtggctttcgcatcctgtgaatactgtatttttcgtctgcgttttgttgaaataaatctgcatataagtggaccttcacagtgcaaacccatgctgtcaactgtatagctttagtatttcaaatataattggtaacacaaaaagttttgaaaaaaatagtagaaacagaaattgccttaaatacacagacataatccaaacaaaaaaagcttgtgatctttacaatctggggcaacatccagaattttggagaaatttgtccttttctttggaccttttgaagttctgtttctccatatgctttccacaatcttttagcataggttgttcataagatttttttagaggacaaactttcactctttattttttacaggatagatgtagattgtatttgtgaacatttcttctttataaggagtatcttggaaataatttaatagtttttcttctggttgtgccttttagccttctggtattcatttgtgctttcttgcttttaaaaatatatttatgctcagtaaaaatcttctcgattctaaaaattaaggcatttttgccaagaataatatattacaaattgtatttaacaaaatgtactttttaattttacaggaagcacattctactaggctgtgatttttgtaagccagatgtattgctcaattgtttataatattatagctcttcacaagtggtatcaaaaacctatcaacttgtacgcatgtgtgagtatacacacacgcacgtgtctttgataagaaacaatctctaagggaaacacatagctagtaaaataaattttaaaagctattgttttctatttcctgagaagaaggaaagctagataatttgcaagtttgcttaaaaaaatacagttaattcctaactaaattgtagtaatttacaatggacattttgttcatttatgctaaagtgctttactgcagtgaaggattaccgaagggcctccagcctgattttgttaacatatttatcccattgcattatgtgtggtaaacttgacaaatatgtgaaagcatagttgtgactaaatgaaaataatagaagatttttgcccctggttattccatttcattttattgtattaactcagccaaatccacataccatatacaggaataggatatgatggtaaatgcagggagtggaaagcccagaaacagagccaggcaactgcttttgagggctgctgtttttctaatttgtttttctcttgggagaggaggtggtaagagcagaacttgaaggaatgtttcctttatccagaggcatggtgtcagccggcaggagcattctgtaggttggacatcttatagattacctcaaatgcattatggctttcaattcaaaaggaaataaagttgttgttgttttgtattttgaaaaaatgtgtagtgtggtctacaaccatccctaacttgaatctatttcctagtactttttttgaaatgcagccaatgatcagaaaattcccttgttgctggaagagagatttattagcactggcattggggaagttcatggttggctgtagtactgtatgcaatagaatcacaaaggcagagtttattactatttcagatccaaacttcagaggaatgtgagcatacatcattaggtttgatttacattgtttttttcccctgttgttgttagagcagttagacaatgtaattacaacaaccctactgtatatgtaattgaacttcaagtcttgaaagaacctttaattgctgctgttagtgcttggaggaaaatctgtttttataaacctctcaataaatactgcccattttaattcagcgattgaccacaaatgaaggagaatttcaatttgaagaataatatgttttcttgttaaatttttgagtgttgttttttggctatggaaaatatgactttttagaatttcctttgtttcagttgctatagcaacctgctaatgtcctggatatgaatggcttcctacagatcaaaccaagtgtattcagttgacattttgttacaatgaggtttttagcacatctcaggaattctgcatgatgttgagtaacatgggccccttaaagatggactaaacaaggcctctgtgttttccctgatttactgctgtctcataatttgaaaaatcatacattctgggtataataactctgacgttgccagggaactttagcacagtcaccaaacaataatttctatttcctttttctgtgaattaattgcttgtcagataaaaattgaagtcaatgtggagaggtgataattacggaagaaacacttttttgctcaagccgactttgaagttgaatggtaatttaattgttaagttgtttttaagaactgtgcatagcttaaagtaactgagttaacttatcaatagtgaactttgtcctttggaatggtggctctaattcattggttgtaaatcaaatgtatttccacatgaatgttatccacaagcagatcttctgtattgctgtggaaagttggatgacttttgagctgagctctaatggaaaagacaaattgatttagaagagagtttacgttacattttcaatttaacttctatttttgaaagtggtatatgaaactcaatgaaagctggctggaacaatctataagatgaaatgcagttttatttcatgatgattaatttttcatttatcattggctaatttgtgttataattatatttgaattggatgataatttgcttttcagaaagaaaatggaaaaggggtaaggaaacataggaaagttacttaaatgaggcattagttctttggcttggtatgtggaaaaaagcagtgtaggaatcaatcccttcaggatgttcagatcatgagaagtagacctgtctgaattacttcccacagcagcagcacagagacacatgcaagcacacactagaaaaatggcttttgaatagatgtaactatgttttataataaggacagaaatgctgagtagccagatttcaaaacctgatagagttttatacctttaaacttatgacatttatacctatactggtactatactaggaagaataaagtgtaagggaaaattgtcaagatagaatcaaaggaatggtaataaaggaatatcatcattgtagatgatgacttgtttgaaatgattgccagaatttctattaccagagataaaattaatagagagaacacaggcatatatccagaacagaagagagcaagtactatgagactaaacattattcaaaaaaaaccctaaacaaaccccagcaccataagacacatatttgtaaatcttggggaacagaagaaagaggaggacctcagaagggagggagcctctgctagagcaaaagtagatctaggttcagggaaaggtagtgactacatggcaaaaagtctactagggttgctttctgttcactgccactgtttctatgccttccccttttgaggagcagtaacctctcctagagatagcctacagactggtcttctggcatctttacgttcttctccctctctctttcctagtccctcttaggtactctaaaaagggactcttgcataaacccaatataatgaaactaaaccaaagcaagtcggataatttcttcctgtagttactgatgtctggagctcctcagattcaggacaaaaatgacaatgtattgaaccaagtaaatgccttgctaggtaacacttagaacttcattaatgtgaaaatgtgctcagctcttcaataagaggcatgcgtgtgttcagagccatttcctgtcgagacaagatggaggggagaagagagcagtgaacatcccacatgtgtccatggagatgtgatgaaaagcttaaatcatctcctctgttctctgagggtcagccttgagattattttgccgcctaaagcagtgattttctgtacatggcaatataaccacacaaaatacaagccacccagcagtcctacagagcatcatgtgtgtaatgattttgaccagtttaccttcaccatacctgtctttattttgaaggagcaccatttctatgtgaaagcagatttgaggttccttcccacactgacccagcacacctcccgaataaatgcttctctagacctcagagaggagaagtagaaagaagagcaaaaaggggaaagaataaagaattgtagaggttttggaatcacagggcagatttaaaagatatttagaaggcaccagtacttaggtgcatccccaaatattccaatttaattgatttgggtagggtccagcctttgttttttcaggcaattctgtttatcggttcaagtccagtccagttattttgctgctgagggccccaaggccccaggaggtgacatagcctgttgttgacctgctcagatggttgcatacctggccccaagaccagttcagccacttgccagcttccatcctgccaactgtaccacagggcgcaatccacttgcttcattttttggtaatctaatgtttggccaaaccaagatctcattttttaaaaattcaagggctatacatttacttgtcatgagtacaacttattctcaaaattcctggttgtaatgtaacagaatattcagccctcctccctaaaaaaaattatcaatgtgtttggggagcaggatggatttaatatttaggaatattcttatcaaactgactgattgacatgtaagaaacccatatgaagcagtttatcttctcaattgtggtgtctcgattgaactatctttctcctttctttggagtctatgttgctatgtcactaacatggaatgttgtagtgacagtgcctgcctttacataccacaggcagaactacaatttttagtgagtttttttctgagattgagaacttactcagtgttcactcaaaatagtgttgtcatgccattaattagagcttaaaaatattttttagttgatttttaatttgcatcttaaaaagtgctgttgtagattattttcaggatatcgataaaccttgggaaaggtcttcattgcattttactagtattttgttctagctttacaagtcttgagagtgttaaaatagttgattaaaatccataggaagacatgtcttgtgatcttaaatccttttgttttaagcccagaaatatctttgtgaatgtatttttgcttcaaccacaattctcttcctattatttttctcacagtgaaatcattagcctgtgtttatgagattgatgtctgttgtcatggaaataaacaatgtcacaaatttagtgctgtagaaagaaaaataggttgagaagcaaaacctttgggaaaaataaaagctgaaattgttttaaaattaccccggtgttaatttgaaagataatttccacattctagttaaccttatttgtctgatacttttttgaaacgtcgttaatgcagctcatttaaattcaaaattgctttcaagcaaggtcatttcacaacagctgttcctgactgcaatctaggaaatttagaggaaaaggcacatattgaaaattgtatatatcaagcaaaggaaaaacgtgctgtacatttaaaacttagagactagttgttgggatatcgattatcaaaacaaataaaaaacaaaacaaagaagcccacagccaaaccaaataaaacaaacagttttaaattgtacttttatattccaagtagagaaaatagaaaggtgtatgaccatttacatagtaaagacagctaaagaagactttcaaatgggaattaacctcaagagctgagggtaaaaattcaatgtgctcttaaaaataagtattctttgttccagtgaaatatgtaactaatttccttccagggatgagatgtgctgtcagcagttaaagttatttataatggagttagaattttccatttgggcttggggtctggtaggctgcccagcttctgtttcatttattttttccctctaaatcgaccatatatgataggtttttgtccacctagatttctttttcattcattgttacctttactttttgtgttgaaatataattgttaaattatgactgcgtttaagatattcattttaactctttgagttaagtaaaataatagtttttaaaattcttgtaagagcattatatatcatttgcatgaatatacaacaattactggtaaaatgtatgctgggaagcagatagatttgtatttatgtcatactgtggcataaaccctagtaaaggtagacaatataaagtgacctgtatatttatcttacatttaaaatatggagagtgagggttttattgaaagacatttgtgcctcctgttaagttgaggtttccatatttttccacttgggttgtatgttttttgaatgaaagagccaaaatttagtagcagacgtttttgatcagctagaacaagtggtatgttttattttggtgactaatcacttttaagttttccagaagaattggttgttttcaattttgttagggttaagctatattgaaagtttgcactgctacgttttaaactgcatgagcaaataaaagtttcaccaataaactgttgttggcattaagttttgtaagtgatatgagattgttgcagttgttgtaaatcatgcattgaaactgagtttatttaaattagatcagagaggaaaagatcatggtaaggaaataaagatctttgtgaacaatgggccatgtcacaaggcagacaaaaatgtgataaaattctgggacttagatacattttttttcctttggaatttttttttaaagacaaatactccttcaaatttggatgtcaatcttgtcctgaaggacaagattatctgactaggcatatgagggcaaagttaagaggtaggaatcaaatagaattctaaagttttattgcatctatctattccacagacagaataggatggacaactcaaaaagaagaaatgggcaattttagacaaattgagtgtgagtccagcaagtcagaatctctaccaggatcaatgaatataatacttaaatacctactagacatttttaaaaaagattcccttttaatttctgttctagaacgtggttctcctcaagatttagttactaaagacatcactgacacatcaattggggcttattggacatctgctccaggaatggttcgcggttacagggtctcatggaaatcactttatgatgatgttgacactggagagaaaaatctgcctgaagatgcaattcatacgatgatagaaaatctgcagccagagaccaaatacagaatttcagtatttgccacttacagcagtggagaaggagaacctttgactggagatgccacaactgaatgtaggtaacattatgggtgtgtttgggtgtgtgccggtgctacccaatagttatcagctcaagtgacatgcagtttaatcacttgaatgttttttctttacatgataaatgaagactgaggaattaggatctttaaagaatttggcttaaattcagagtaggttagtgtctaaaagtatatcaaattttgaaatatcgaatctctttcaactacctatatttgtctttttttttttctggtgcaatgattgactagatagaatacccaactagtaaaaagaccagaagctatgaagcgaagagaatttgggcacatttgtatagctgcatgatctttgtcaagttacttaaccttctttgagcctcagtttcctaatctgtagaatgcagataataaatcttgtctcttagagttgtgaggattgtataaaatagcaatatacaaagtggccagcatagtgcctagccacttagagatgattgataaatgattgatcgctattgaaactatgattatcatacaaccaagacttaacttagttttttaattttttatttatttttatttttattttattcctattatatttggtaaggtcaaatcaaaagcccactcaattttctgatggctcagatttacctcactcttactgatattttttttttgtaaataattatgaattacctatcataatcatctggctggtgaaagatgtgtcaggatatcttaattcactatcctaaaaggttatttgtttaagtgataatcatgtgtcagtgtaggttcagcagttgtaacaaatgtaccactttggtgaaggatattgataatgcaggaggctgtgcatgtgtggaggtgggaaaaggtacatgggaaatttctgtaccttctgctcaatctctgtaccaaaactgctctaaaacaatacaaaatctattaaaaacaaacaattgaaaccaaaccaaagcaaatgtcatttgttaagcatgggcatttctaagcatttgtaggagaaaactttaatccttttgttttgggaaggttttaggaaaaggagaaagactgggcattcatgcatttccttctataaaaaagaaatagaggaatttggtgatttttctggcaaaggaagagagagggagaagtgccatgagcaatttcagttaagtcctatatcttgattttaagttgtccttaaactaaaatctttgtgtctaagttcattttctttttatcatttgcaagctcagttggatgttcaagtttaaatttgtatcttaattcaccagatttttaaaaatcaacttctttataggaaatttaaatatgtgagaagacatagttctcagatattcacatgattggtttctatggtagtaaataaaatcttgtgtctggaatatattggctgatgtagtttaagaacatggtagaaattcattctctacttttgaggaaattcacttgtcaagagaagctgtattgtaaacttaggtcatatatgacacataaagctaaatttatttgtaggagtacagatacagttcatgtggctgagaaattacaaaagtatatgtatttagagggatttttttcctccagaaattatcctccgttttgtctttttccaaaaagttggaggcttcaaataattatttggaatttaaaatgtctacaagagatgtgttgtcgccaaaagcaaatatggtggcagaaactaaataaatctctgtatctcagaagatgagcatctaagaaattttcaatatttcttggctaattgcttgatttaaacattgatgaacagaaagtcctatttttttcccaagttaactttttttaaaattatactttaagttctggggtacatgcgcagaatgtgtaggttttttacataggtatacacgtgccatggtggtttgttgcacccatcaacccatcatctacattaggtatttctcctaatgctatccctcccctagccccctaccctactacaggccccggtgtgtgaggttcccctccctgtgtccatgtattcttattgttcaactcccacttatgagtgagaacatatggtgtttggttttctgttcttgcattagtatgctgagaatgttcgttttcaacatgatccatgtccttgcaaaggacatgaactcatccttttatatggctgcatagtattccatggtgtatatgtgtcacattttctttatccagtctgtcactgatgggcatttgggttggttccaagtctttgctattgtgaacactgctgcaataaacatacgtgtgcttgtgtatttatagtagaatgatttataatcctttgggtatatatccagtaatgggattgctgggtcaactggtatttctagttctagatccttgaggaatcaccacactgtcttacacattggttgaactaatttacactgctaccaacagtgtaaaagcgttcctatttctccacatcctctccagcatctgttgtttcctgactttttaatgattgccattctaactggtgtgagctgatatctcattgtggttttgatttgcatttctctaatgatcagtgatgatgatctttttttcatatgtctgttggctgcataaatgtcttcttttgagaagtgtccattaatatcctttgccaactttttcatggggttgtttgatattttcttgtaaatctgtttcagttctttgtagattctggatattagccctttgtcagatgtatagattgcaaaaattttctcccattctgtaggttgcctgttcactctgatgatagtttcttttgctgtgcagaagctctttagtttaatcagattccatttgtctattttggcttttattgccattgcttttggtgttttagtcatgaagcctttgcccatgcctatgtcttaaatggtattgcataggttttcttctagggatttttatggttttaggccttacatttaagtctttactccatcttgagttaatttttgtataaggtgtaaggaaaggatccagtttcagctttctgtgtatggctagccagttttcccaacaccatttattaaatagggaatcctttccccattgcttgtttttgtcagatttgtcaaagatcagatggttatagatgtgtggtgttatttctgaggcctctgttctgttccattggtctatttattgcactttacgtttttggtaccagtactgtgctgtttttgttactgtagccttctagtatagtttgaattcaggtagcttgatgcctccagctttgttctttgtgggtaggattgtcttggctatgtggactcttttttggttccatctgaaatttaatgtagttttttctaattcttgaagaaagtcaatggtagcttgattgggatagcattaaatctataaattactttgggcagtatggccattttgacagtattgattcttcatatctacaagcatggaatgtttttccatttgtttctgtcctctcttatttccttgagagtggtttgtagttctccttgaagaggtccttcacatcccttgtaagttgtattcctaggtattttattctctttgtagcaattgtgaatgggagttcactcatgatttggctgtttgtctgttattggtgtataagaatgcttgtgatttttgcacattgattttgtatcctgagactttgctgaagttgcttatcagcttaaggagattctgggctgagacagtgaggttttctaaatatacaatcttgtcatctgcaaacagagacaatttgacttcctcttttcctaattgaatgccctttatttctttctcttgcctgattgccttggccagaacttccaatactatgttgaataggagtagtgagagagggcatccttgtcttgtgccagttttcaaagggaatgcttccagtttttgcccattcaatatgatattggctgtgggaggcctcttttgaacaaggagcagacgtggcaggaatgaaatgttcatttttaggttacgattggccctccatattctcaggttccacatgtgcaaaagtaaccaactgctgatagacaatattttttaaaaagcaataagaaataacaatacaacaataaataataatgctagtaaaatacagtataataattatttatatgacatttacattgtattataagtaatgcagagatgatttaaagttaacaagttctcaaataatatcataacattgatgagaaaaaagaattggttcctggtgggggtcaccatctgtgtggagtttgcacatcctctccatgtctgtgggtttcctccaggtactctagttacctcccacatctcaaagatgtgcatgttaggtgagctggtgcgtccacgtggtcccagcctgagtgagtgtgggtgtgtgtgtgtgtgcctaggatggggttctccctttcgccctgagctacttggacaggctgtgtccactgtgacccttaactggaataaatgggtgaataattatgttactggttttcatttatctttcttaaatgtgtatatagctcacacatacatcagtgtttcttatgagaagtgttttggtttttattgagaagtttggtgatgtttttgtgatcagaaatatgatgtaggaacttaactcttgtttatatcaattaacctctggaaaattggtttctttatgtcagttgttcaaagttgcagttttcaagaaattatttaacgttaggtgagggcttactgtattagggaggatatgcataggtttatgcaaatactatgccattttatatcaggaacttgagcatgtgaggattttggtttctatgggagatcctgaaaccaatctcccatggataccaaagggcgactgtatgtgaaaactgctgaaatgtctaagtaaataagaaagaagtcatggacctttctttgttctaccaccactttgttgttgtttagaaagtattttcagaaatctgagtgagatctgctattcagatggtagaggaatcctaaggtgtggataactcagcagaaacccgagcccatgctcctagagtttcacatatgcttccaagagggcattttgggaatgtctttaagattgctttcacctgaaactcagggacatggtatgcagactgttgatacaatgaaacgaatacattgatacaatgaaaatcatgaattggggttagaaagccagcagaagggacactttctattgcccttctaatttatggcagctggcttagcagtggtacagtggatgtttgaaagtgtctggtgatagttactaacacatgaaaagaacttacaatgtgagagggtgtaacagcatttaatggcatgtggtatccaatcaatgatgtaaaaattcttgctctttggttatgggaaaccaacaagggttttttttttttctccctaaaatccagtttcccattaaaactaggatgagatatgctatactgtatttaatttcagtttctttattttgaagagttaattaaaaggcaggaatataagtgaggttgttaaagtatatcaaggtatgagatatcacttttggctgttattaacatgtttaaattttgaaacattttaaagcttggcatcccatttttttttgaaacttaagtttctttaaacattttaaagcttggcatcccatttttttttgaaacttaagtttctttttagatcaacattcataagatttaactttttatttttctaaattctgagttgtgtgaaattcgtttaaaaattttgtaagagagagaatgtcttgttccactgagtaaaaatttaagagatgaaacaaaagatgagaaaatgtattgtagcacaaccccttctagaaaactgttagacacccatcaacttatttgatatttgtgacaactggtaatgctaataatccaaatagattatttttctatatactattctttcttgtactattttcaaaactccaggtaaaagtctttagattttttgtttggaaatacatatatatgtttatataatatatatttttatataataatatatattttatatatataaactttttttcttttaatagttcacgtacctggagaataataatagcaaattgatgattaatctaaataaattttaatatttccagaaagtaatggacttcactgagagttctcttagtttctttaaacctaaaaataaaaattgcagccaatataattttgattgaaattatattttttatctctcagaagcataattcataaccatcataaccatatattgaatttgcttactttatcattcttatctttgtcctctatacatattatgtgtttttaaaaaaatatggctgctttacagattttatttttattactaattttaagcaatttaattatgatgtgtcttggtatagtttctttatgtttcttgtgtttggggttcactacacttctaggatctgtgagtttatggtttttataaaatttgaaccagtccatcccattattttttcaaatactttatttattacacccccactttattcaggtactccaattaattacacatatgttagtctgcttgaagttgtcacacagctcactgatgctctgttcattaaaaaaattttttctttccttgtgtttcatgttctattataatgccatcaagttcactaatcatttttttatattttctaatctgctgtaaatattatctcatgtatttttcattttagatttatctttatctctagaagtttaatttgagtctttttatatgttctatatctctagttaaaatgcttaatctttctcctaccattattacatatgaaatatagttataataagtgttttaacatcctttttaattctgtaatgtatgtcatttctagttctgtttctattgattgatttttcttcttattatgtgttgtcttagtttggactgtgataacaaaaggtattactattgactgagtggctgtaacaacagaaagttattttctcacagttttggaggctggaaagttcaagattaaggtctggcagggtttgatttctggtgagggctctcttcctggtgtgtggtcaccttcctttatgtcctcatatggccttttctcaggctgtgaatgtggaaagagagagagagctctttggtgtctcctttttttcttataaagtcaccaagcctatcagattaaggcttcactctgatgaccttattaaacccaaattgcctccacaaaggcctcatgtttaaatgtcatcacattgaaggttgagacttcaatatatgaatttagtggtgggagaccttcaatccatgatacaagtcataagtttttcctttttggcatgtcttgtaacttttattagatgtcagattttgtgaattttatttgcttgggtgctagatatttttatgttcttataaatactcttaagttttattctggaatacagttaagttacttggaaatagtttgatctgacatttgcttttaaactgtttcagtttaggactaattttgccccattattgagacaatcacctactaaatatcctacatgatctccctacagttgtgaggttttctcttctgggtagggggaacatttctaaccctgtgtgagctcaataaattgttccctgggctcctttggggtggttctttccctagttttgggtggttttcttacacatgtgcactgattatcctaggttgaagaccaagtattttctctgtggcactctctcattcacagtactctattcttcaagttctggttgctttgggctctccagacttgcaacaacatcttgacaattaagggaggccaccagcctccatctggattcccctttcttttactggggactggaaattccaagcaatagctgggcaatcatagaacctattcccctttgttccttatctctcttagggatcagtgtcctatgccagctgatgtcgtgtctgaaaattattgtgtttatttttcttaggtttttttttttctgggtttcttcattgtttcaaatggctcttgaccacttgaacacgaaattttctcttacaatcaggaaagattctttgctgattttgaattttgtttagcttaatctttttctatagaacatgtttatgttcttttgaacactgattattgaactgaataaaatggtcctgcttatgaactctaattatatataaaaataggatgttgtaggttatttgtggctgttggttacttatttcatatagcgttattaataattgtgaaatattagtaaacggaatttaataattacatattattgattacatattaagcaaacactatttacagatagtgctttctgaaatactcagcatataccagtttatctttagagcccctgagatattttgaagtgttagtttcctattcttttgtgctcatagtctgagatgtgcgtggcaatcataagaatggtgttaactacagtcactctggctagttatttatggattgcaactttttctgaaaaagttcaagtaaaatgtccaaccctgcattcataatttttagtattctccacagcattattactggataaattctttacagatggaaatataataaaaattctaaaaccttatctccggaaatggatgttttctttactaaagtctctagaaggcaaataggaaatctctgcaatatgaacttccattttttagtattagctagataaaacgaaaacatcttactgagatcttgatgagattaggctcacacgccatcatgaatttatgagagattacaatgctaagcaatggaacagtgtacatatttaagaagccacagagagtttcttttcacataaatgaagaggtggacatacattttttttcaacatggtatacagtttaatcttccttttatctcccagtatctcaagattccaaaaccctgaaagtagatgaagaaacagaaaacacaatgagagttacatggaaaccagcaccagggaaagtcgtcaactaccgtgttgtctatcgccctcatgggagagggaagcaaatggttgctaaggtgccccccacagtcacttcgacagtgttaaagcgacttcagccacagaccacatatgacatcacagttcttcctatttacaagatgggagaaggaaagcttaggcaaggatcaggaacaacaggtatgaaataataattatattttgagggggagagaaggtaatgttttaaaagatgactttggtatgtctacttcatttgtaaatgtttaaaactgattccgtaataagttaaattataattactagacaatgtctaaataacatgttatttttaccaatctagttcctggtaaaatgattctacatattaatgttcttatgcaaatctaatctgaattgtgagaattatttacacttctacttagctagcactctgttatctggacttctatggaacatgctattttgtgctaccggacttaaaccctttttatggatatgcatttttgtggggctaataaaaaagaaaccccaaagcctagtcttacagataatattttaaaaatctttttgtctttacagcttctcggtttaagtctcctagaaacctcaaaacatctgacccaaccatgtcaagcttccgagtgacttgggagcctgcccctggggaagtgaagggttataaagtcacattccaccctacgggggatgacagaagactgggggagttagtggttggaccctatgacaacacagttgttttggaggaacttaggtaggaattaactacgtttgtatcaaaggatgaaattaatttgtttacaaggttgaatagcttttgtaaattagtaggctttacacaaatatcacttatatgtctgtttgccagcaaagtatttaaaatcagctaaagctgttttcttatgcttggtgctgctggagttgaagttaggattcaggggtcagcaacagaatttaggcctgagcaggatttttttgtaatgtttaataatttttgtttgtttttaagggatcagaattggtgttttcaataacaccctgcttttaagaaattaatgttcttattacacaatgtcaccgaaattgtagccatgtggaagcatgggggttcctgtaccttttggcaaggtttgagggactcatgctgagatcttgagtgtgaatccccctccagtgtgccatacaggagaaagaaggcaggaccttgtgggtgccagctggcaggaaagggcaaggctgggctcatgaaaggtccagctccaggctgtgcagtgaaaaacaaggaagtttcagtttgaacagcaccctacattcattacagtaaaaagaatgaactactgtgtgtagtcttttgggaagtttgtttttcaatcattcattcaagactattgaaatctatataaatgcttgtgatttacttttaccagagtagggagtataaaatttattgagcttactatgtgtcaggcattgtgttaggcattgtcttatgttaccttgcaaggtacagcacttcaattattttcttaaagcccattgcttagaaacagtaagattaaagagtctgacccttcctgacatgctgaaaggcagggtagagactctgcatctgctagaaaggcaagacagaaaccagtgctgtgaattcctagtgttctctggaatgattgctgtctagtttctcttgacacctcacagggtaagcgtaagtgagaaagaggcggaaattatttttcttctcttataatgttgtacactataaactcttcatagtgtaagcttgtaaatcaagaaaaatgtctttaacaaagcaaaaaaaaagtgctaccacttgagcctatggttctcacaggctatatatatactttaacattttagggctggtaccacctataaagtaaatgtttttggaatgtttgatggaggagaaagctcaccacttgttggacaagaaatgacaaccctttccgacacaactgttatgccaattttatcttctggtaagaaattgagttacattccttgaggaaaacaacttaggaaactatttcaaatgtgaactgttagggtatcatacaatggaaaacaatgatacaaattttacactaaaatttatttcaataatttacatacttagcaaaaaaattcttcaaacatccagtcaagcatgctttttgacagtatttttttatacttcttttatcagcattgcattatttcatacttaaattattacataaatctatttttaagagtaatatataattattaatgtattaataattattagtgatgtaattaatgtagtaattttaaattatgtaataacgcataatttaaaattgtgcattaaatttattaatgcatttaaatattaaatttaaaattatgcattattgcataattaagctctattatttaaagagtttttactaaatgtagatattgtaccgttttctatttttaatgactaagatgcagttttcttttgttaaagtaattgcagaaatgttttatttgggctgggtaagcagtgttaggttacataaatgggtgggcaactatgacttgggaaggaaaatggtaacataagccccttagattttctgtccctgccacaattacagcctttatgaacataaagctagtttttaacattcttagagacggaggtggtggacagagtttacttctgatagttttcattattgctaaaaaagagtagatctgggcagagcaggagcaggcttgtaagggcttatttccttgggatagtatttgggaatccttaatcctgatatagtatataatatatgagtgacacatttgtattctgtagtgtgatgagcattatttaattttttccaatgatttcttttgtaatataaagaccaaatgctaaccttgtaataaactggaaaatttatagctggtaatataagcttttggaaaggagaacattaaaaaaatggatgtggacaaaatcaagtgtcaaatcttgctgttttgcattaatgttctattgtttctcttatgatgatattaactgacttatatttttattttgtagcttgtacactgaggatgttgggattattttctctttccaaagcttttcctatgtatcaatgtttgtgcttatctttacagctctcaatttgtatatttgtttgcatacttttctaaattgtcttccttctttcttgattctttaaatgtgcaaacttcaccatctatatttacatgatttttattcacagtagatcataaatttaaatgattaatagctagataataatatatcagggtttaaaaaatatatctttacctcaaaaaggtataattttaaaagttatgtgtctaatccttcatatatatgtggtagttacctaacagcttagctatttgaaaagataatttttggctcacaaaaacctttttttagtttacatattttatcagtccatctcattcttgtctgctatgaccattaaatattgcagaagaatgcaatatctaatgatttgactacattacaattttattaaagttattagtacttcatagttagacagctatacattctcatttatttatttcagcctttgaatttgtgagcccatcaaattttcaacaatggcttaattcaagtctccaggttctatgaaagagggcaggaaatcgagtcaaagataaaggaaagattggccactgaaataatctttggaggaactgctgactcttaagactgttaattgaggttaataaatcagatggacatattttcagagtcttatactccacatcactgagctagaccatagtactgagacaggcaacactgaggatccagggagtggtagaggtgtgacaaggaagtacccttgccaacaatttgcttcttactgtcttgtctcatgattgccatgtcagggatggagtgtctcaccagagctgaggcagacattgtgttgctggtggatggatcatggagcatcggccgggcaaattttagaaccgtgaggagtttcatttctcgtattgtggaagtctttgacattggccccaaaagagtacaaattggtaggttctgacaacattggagccatttagacatttttatctttctctttcacatgcactaatgccagtggtgtcattttagctcttgctcagtatagtggggatcccagaacagagtggcagttaaatgcacacagagacaagaagagcttgttgcaagctgtggcaaacttgccgtacaaaggaggcaatactctcacaggtgagtaaggactgtctgacagtctttcagctcatgcttctggttaaggtttgtggctgaatggtgatgtgactgattctcttttaaaaatcccactaggcatggctttgaatttcattcgccaacagaacttcaggacccaagctggcatgagacctcgagctcgaaaaattggtgtgctcattactgatggaaaatcacaagacgatgttgaagcaccttcaaagaaactcaaggatgagggagtggagctgtttgctattggtacgcactgaaaaggacagtgatgcccctggggttacaaatgtgctgaggatatttttcgtagttagaagttttatctgaagcatgaaaaaaaatacccatttttttctatcacataatttatcaaaataatgttccaggaagttaattcacttttttcttctttttttggggacaaaactacatggtttcttaaacgaaaattaatagatcaagaagaaaaatgtggtattaataggattcataaaaactcctacttggttttccacagaaccgtgtttatttttgatatccattattttacattccagaaaaaacactgaagagagtctttttggcgggaaattggtgctatatacatttagaagaagccaatttaaaagagctttcagtttgtattatcctttgtttctgttttattattgagaaaaataatatgtatgttttagttaactaattattaaaccttcatagttggccaaaagcagccatgaattaagaaagccgtaaatcatttgcttcattccattaatttttttctgagaagtgcttttaatttgtatatatccgtttttgaaggtattaaaaatgctgatgaagtcgaattaaagatgattgcaactgatcctgatgatacccatgcatacaatgtggcagattttgagtcactctccaggatagtggatgatctcaccattaatttgtgtaacagtgtcaaaggtccaggtaagtttaacccagagtttctctccctcagcactgctggtattttgggccaaataattattcttttgggtgggggggagggcactattttgtgcactatgaaatgtttagcagtgtgaaaggcctctgccggttggatgtcagtagcatcccctaaattgtggcaattaaaaagatcttcggttgttgccaaatgtctgctgcagaaaaaaactgtccccagttgagaatcactgcattagtcactgatttttttttctgatttgtttctcgtgatggcacctcaatgacttctagcttatttgaggatatatttagtttatatcctgcatacctgcaccctcccccacacaacatatatataaatgggaaggggtaggaagagagggaaggagagatgctttcttttctggtatatacctattgtcttaaagcatcttcactccatttagttactacattgctattggatggttgttcccagactcttgttttcctcagttttggtaccttttttaaatttcctagtgtgagcaggaatgaaagagcagtctttatatctgatttgctttgcctcaactgtagatgatcagatttgaaactttacacttataatccctaaatataaagagaagctacaattttacagtttagacatttagaaattatataacctctttttaccagtgaagaaactgagatctggagaaaaattacttggtctgggtcaaatgtttaaagatgtttttaggggtattaaaaaagtagatatagctaaggaattaggatattgaaataaaattatagaactggatttataccaaaaaaggatggtgcataatgattactctctgtgcaaatcatgggacaaaacatggtaatcaccaaatttgaaggttttttgaaaattaatgataaaaattatggctcttattatgtgagaaaaattttatttaagtacatgtagattatggtaaaattgtccttcattaatttaatttggttttggaaaagttggaataagtttaagaaacaatgtggtagaaatggttcacttgctctgggtgctaggggtatgtttatttgaatgttccctcttggctttctttctcctaacttttgcagattttcttttttgaattttgaacaacagattgaccttttccctggagaaatagaccagcctggcagccagaatttgtaggcttctggctcttgattagctgagagagttgtagttttattccattggagagaactttgagtgggatgaaaacatcttttatctgttttgctttttttaaaaaatgaactatgtaatagttgcattcattctagtttcccagacagtaaaattgcttgataattttgtaggtttgactcttacccaagtacaataaaagttaagatactaagaatggaaaggctttccccagttttggcttgcacaaaaagtagaaagagtttatacgagaatgatttgccatgcttatggagttattggattaatccctttctcttttaattattatttgggccattttcctgttagacatattgagcttaatatttccattttcatcagcatttattccagacactgttatgtattagtcatttcacctatatccacccacagggagcacaatcacaggcggtaggttgttcccagattgaaaaacatgtgtttctttgcactctctccagtgatacattgtcagcttcctttgttatgcaactagatcctgttagagaatagaatgaatgaaaaatcaattctgtcctcacagagcataacctttagttaaggagagaagacatgagtatatagaaacaaaatgataatgagggcagggaagttgtgtggtgccaatagtgatagggacaatggagaagctaaattgtcaggacctaaattcttatttactgattatatgtacaagggtagagagaggagaaagtatcaaaaggtgattcagaggtcttagtctgttctcatgctgctaataaagacctacccaagactgggtaatttataaaggaaagaggtttgattgactcacagttccatgtggctggggaggcctcacaatcatggaggaagagcaagggaggtcttacatggtggcaggcaagagagagaatgagagccaagtgaaagagtaaacccttataaaagcattagacctcgtgagacatttactaccactagagtagtatgggggaaaccacccccatgtttcaattatctccctgtgggtccctcccacaacacttgggacttatgggagctacaattcaagatgagattcaggtggggacacagcaaaaccatatcgggtcttgagtctcagtgacttgtaaattggtaaagtttgtaaggaagaggaggatcaggttttaaggaaagacaatgagctcatgttttaatcttttgaggctagaaaaccttttagttacctattcataacggtcttacaggtgatgagcctctaatacagatttattgtagctacttagtatgtgaaaagaagtgtgtgaaagcttagaatatggagcataatattgtttcaatgtcatttcaaatattgtcacctttctacaataatgagaaaagtgtataccctttatttccatgtgtaggtgatttggaagcaccttctaacttagttatttctgagcgaacccatcgttcttttagagtgagctggacaccaccttctgacagtgtggatcgatataaggtggaatactatccagtttctggagggaaacgtcaagaagtgagtaggaacacctataacttacttcttcctgatgttgagattgggtcctcctcattaggactctgagaataatgttaggtgaggggcaagagggatgaagaggggccagaaatgagtcaagaatagtgctttctattcttgactttgctaggcaggcatttccgtctggctttaattaaagggaaagagctttgcttaaattcttacggtttctaagaattgtagaatatcactatgtttttttcattaaaatctaattagaagatgcttgatttatttatgaatttgtagtagaatcagagagttagcaaggaacattgaagatgatctatttttacccattcattttacaaataaataacagctgggagaaaaattatatgaattgtccaagatctcattgtaatctgatagtttccaaatacaaaagacaatggcctaattgaaatatagattctaagctcactgcagttaactactttgtaagtatagtaggaaaaagggaactgattatacatacgttgttgctctgtttaatttttccccctagttttatgtgagtcgaatggaaactagcacagtgctgaaagatctgaaacctgaaactgaatatgttgtcaatgtgtattctgtggtagaagatgaatatagtgagcctctgaaggggacagaaaaaacctgtgagtcagattaaaaaattgtttctcattgctttcttttccaagataaagcatgatggcccatttttgcctaccttccaaataatttctttatttaacattcattctataaatatttactgagtgtcatctttgtgcaggtgcccagaaaatactcagtggttttctactcctgctggctgattctgccatcatggagctccactgtggaatagggggtcactgccataataatctagagggaaaacaacctttaatggagttattcacttcttagagtctttagacttttgctttcaagaaaatctcctaaaatgcaaatatacctttcagggggataattttacattttactctgttgttatatgttgacattttattgaggaataaagcacatcaggagtaagatatgaggaaggataccatgtggggagtgggactaagatcaggaagaagagcgtacagagataccgatttcacttttactaacggccagcgctcccggctgccagtgagatcttctcttttctttctggcatctggtctttgctagagaaactctaagtgctttggctttgagtagcgcttttggggtagatgttccttgctcctattcctggtaatgcttccagagacatatgaaattattctttcctacttcttgcttcttggttgggctctagggagaagaaggaaagccacttttaagaagaaggagtgcgcatcactctctagagcaagaactgactttatgtactgctcaagttttagatccttatctcttctcttatatccctttatattagactataggaggtgagaaataatgtattttataactggcaggattaatatgataatttcttaaaactttgaactcaatctttgaacaaaaaataattggaagcaatatgggtgttatagggagattgtaaactttttcctctgcttcatgggtttatcttcaagaagcctataaatccctgatgttccagttattaatgtatagtgttcttattttaaatttattttttgaagaaatataaaaaatagtgttgattacatatatataaagttctgtgattgaagaatagaaatagtcaacttagtgatgttccagaaaaagagagtaacgtatcaggaagttggtatctattgtagagactcactggaatgccatttgacacctgaactttaacattttccttctacaagatagtggtaacgtgcagtcttgaatatgaagtgcaatgagcaatgtaaattggattttttggggcaatgggaaggattatattaactcttattgatttctcacagtaacccactgtctagtatatacaaatatcaataattgagtacaaaacaatggttaaaaatgagtggaatgaaaggaactagactgatggtctgcttttctgttttggaagtgccagtgcctgtagtcagcctgaatatttatgatgttggccctaccaccatgcatgtgcagtggcagcctgtgggaggagctactggctacatcttgtcatacaaacctgttaaggacacagagccaacaagacccaaagaggtgaaagatgtttgtttctttaacattgggtcttcccaagactttatagctttatagtgcctattatactgcagttacttacaaactcatttataactttacgtacaaaatggaaaaatagaaaagtaggtttgtggtctgcaacacattgtagaaaacattggcatggactgcccacggtgactgacgcctgtgtaatctcagcactttgggaggcggaggtgggcagatcacctgaagtcaggagttcgagactagcccgaccaatatggtgaaacaccgtttctactaaaaatacaaaaattagtcgggtgtggtggcaagtacctgtagtcccagccactcaggaggctgagacaggagaattgcttgaacccgggaggtggaagttgcggtgagttgagattgagccactgcactccagcctgggtgactgagtgagactctgtctcaaaaacaaaacaaaacaaaccaaaaaaaaaaaaaaaaagaaaacatcagcatggaaaaggagatgtaatcttataaatgaaaaatacaagctgtattataatctagtacaaataaacttcagttgactattccaaaggtaaatggaaaagtttgatttgaatatcttatttctgctccacatatccatgtgcaggtgcgtttggggccaacagtgaatgacatgcagctgactgaccttgttcccaacacggagtatgcagtcacagtccaggctgtcctgcacgacctcactagtgaacctgtcactgttcgggaagtcacctgtaagctactgcttagttttatttcccttcttattgctgtgagcataatgttcattagaatttatttcatgtgatgctaacaataatttgataatttatatacaaagtcacagttattacttttgacaatcaaatttgagaataaatgtctcaattctagatttatggaggcatctcaaattcattcgaggatgtgtatttttttcacattgaacatgcctgaaattgaagtgttttacaatcaatggtgtcttactattattgctcttggctaggtgccaatcagaatgtacagcataagacaatggtgcatcttatgaatgatgttatcctagatccatgaaatatgacatatagcattgatgagaatgggaatgttgagtgagtgtaattttggaggaagacattgggtttaatatcaaggtgctccaagttcttgttgatgtagaaactctgtggcacatatgattaagtctgtttcagttaagtgaattaatcaatttacccaatgcaaagatatattgatcccctattatatgccagtcactgggctagatgttgggaataccactgtgaaattatacaaagcagtatagaccatatggactccttcctggtttgcatttctcttgtgtgtgttggtcagccttttgtgtacttctgacttgttttactaagcatttaggtgcttttttcttgaagcgtgacaatgattgcatttacccacttactgcctcttgccttacccagctggtattttgcttcatgcttggggagattgacatgctgggatagatgagctggcttaaatttaatgagtcttggcccacacttctgagaaaatgaagagttttgaaggcacttcaaggaggaaaaagggactaaggaaacagagcatgatggggcagagaagagaaagatcccctacaggatgggttagtgtaaattaattgacaacaaacaaatatttattaatcctcctttatatgttagatcttgtctggggctggtggttttgtgaaaatgggatagtggcagatggaaggaatggggagtcagccagggatagagactcatgttctgaaagtgctgagagaggagacccaaagtcacagtgagattaaaaacaaatatggtcacaaacttgggtatggtgctggactggaacagtagaggaatggagggcagagagagatacacaagataaaaatgttgaagagatggaggcgcagaaatgtggaagtggagctagagagttaggaagacagatgtaaagagtcagaatgagagacaagttaaactagtcaaatgggcagctggaaagagtgaaatacatctcatattacaggagaaaatctcctcattccgtatcctccttcccccttttataatggaaagttatgttagatttggtaaacatttaccatttggattttcttctaacaatttaggtgtctgggttttcttataagcttattggatgcttaatgttgggctcatcttcattcttcactctgtaactatttttttctgtcacgttcttgagggtgcataactctattgattttgttttctgtcttgagttaaatatctgataaagaaacatgagctgtacatttatgatgaattatgatttattatggggttgagcagcaagagattatttaaataatgtggaagaagagtaatatataattgagaagttagccttgtgataacaaaaaattaaatatattctatttttgaaaaaccttcttaagaagaattcagtctatctggtagaatcatggtacttttatcatcataatcatttttttcagttattttgccaaacacctttaaattttctccaaacaacttcttgaaagcttgcatggatgctttggagctttgtggttgagaagcacatctggatttaatatctcgtgcttctctagtgcctttacccagacctcaggatctgaaactcagagatgtgactcacagcactatgaatgtcttttgggaacctgtgcctggaaaagtgcgtaaatatattgttcgatacaaaacaccagaagaggatgtcaaagaggtaggttgaagatgatagtagatatgaaaatatttgttttcctagtaggtttaaaaaaagaactttatcaagtatggatgatagcatgttttgaatacttgtcactttgttaacacagtgttgaaaacttgtgatattaataaagcagtttttgaaaatcaatgatatattggactgtcttgtcaaaacagaaatgttttgctgtgtgatattaatctcaaaaagatcatcccttggtagataaaaagttatcaaatctaaatggtatttccttcccatccagattccttatatggctttctattctaagaattactagaaaatgtcatgtttctaaaaataaaaggtagcaagaggttgcagcaatgaagaggagcagtttgtcagataacaggaagataggacactagagaaggacacagagaaaggagaagtatgttgttagaggggtgtccttttgggagtgttcttttgggagttccgtgatgaccggattcaaagttagagcaaattagaagggcttcatgaaccagcaaaacttgtgtgtgcttgagggagtattaatgtcagaatctcagaggcatttttggaacataggagtcatttctctaagcactcagtgactggttctgctggtcatttgtggattatacaaaagctactttatacatgtgcacacatttatttcattctgcatttccatttaaaaggggtacaatggccagtggatctcacaagattcttgtgcatagcaaatgaagtaatgctgtgcgtaagagaccattgctgaaagaaataatgcagtgatataaagggaaacaggtggaaaaatggttaggttttttgaatacataggcagtaattattttctagagagtcatgtgccatatgatctagtacatacattttttttccagtttggaaatatttaaactgtgtccagtttctggattctcatgtatattggaaaacactgctcttttctgatcacaattttatattcttacgctgacaggtacagtaaacaacagagagatgtcaaaagtaaaccctttgtaaaagtagttccactgctctgttactgttataggtagaggtggacagatcagagaccagcacttccctcaaagacctcttctcacagaccttgtacacagtcagcgtttctgcagtacatgacgagggggagtctcctccagtgactgctcaagaaactacccgtgagttgtgctcctgctccactgataatgggaaacaacactttacatgcatgtgtaacacaatttactgggtcattttgtttcttaatgctacctttgccagtgtttaataatgcttggattcatagattgtttttcacttatttttttgtaacaaggtgtcccatcttctatctttgcatccattccttttatgatactttccatcagccactgtcattaatttatcttccaactacaactacttgatgtgcacctgtgtatgtgtgtgcatgtatgtgtagtggggtgggcaagttttcttgacgtatgttgcacatttgctttggaaaagatgcattatttataattttttggggtattttactatacgtgaagtgttatcaagggtaacaaaatataagcatctttgccctcaccagttcatgatttagttgtggagataagaaaaaattaactgagaatacatgggatcatgtaaggtaggtcaggtggcactgaaattgtgtgctgtcagatttcagaggaaggggcgactgcactgtaagtggagtgctgggggataccgggcagcctgcccagaccctgcttcctgctccgtctgctgcagctcctggagatgtcagttcctctccctctcatggtttctccatagtatttaacacagtcattattgcctgttggtcttttgctatggattctacttcccccttgctctctcctaatgaaggaagagacattttgctcaactttgtgtctccagtgcctggcacataataacttaatccagtgctcagcccattacataaagcaaatagtagtaaaaaaaacattgaggcctagagccagcagtgttccaaacaaaaataatgggagttttatatgtagttttacattttctggtgtccacattaaaaaaggcaaaaatagatggatgaaattaattttgataatgttttatttaacccagtatatccaaatatatccattataatttcaacagctatcagtacaataattattaacgagacattttaccttttttctgtaacagttcttcaaaatccagtgtgtattttacacttagagcacatctcaattcagactagccacattttaagtgttcaatagccaactacatgtggctagtggtttccattatggacagcacaggtctagaaatttaagcaacttgcccagccacatccagtaacctattgatgggactgatactatagtctggaaccttttcctcctttccagaaaattcctcaccaaaggctcaatggcatgttctttagtgcccagctgcctatacctaattagggcatcttgtcaaatgttataacctgctttttttttttttttttttttttgagacagagtctcgctctgtcacccaggctgcagtgcagtggcacgatctcggctcactgaaagctccgcctcccaggttcacgccattatcctgcctcagcctccggagtagctgggactacaggtgccgaccacaatgcccggctaattttttgtgtttttagtagagacggggtttcaccgtgttagccaggatggtctggatctcctgacctcgtgatccgcccgcctcggtctcccaaagtgctgggattacaggcgtgagccacagtgcctggccataacctgcttcttaacttcagacataaccacttctccctttttgactctgctattttcttaccatgtgagatctcttagcaatttcatttattttcctggcttaagttcttaccttgtaagggtcatggctggagctgagaattgatgcatatgcatcagtagacgacagctttgcataaaaataacgtaacaggtgtagtgaacagaaaaggaagtcaggaagaaaggctagtgagacaggtaattcagtatagtagattaatatttttaatatatattttcccttaagatttccaaataattttcagatacatttaaagtacattcttaatgctgctttgttttgcagttttgctggtggaaatagtaccactctctttatctcaatgggccttttcattgtaattattagaacaaatttttaatggctctggggtttgtgtaattagctttggttaccagaaaatagagaaataagtgacaatgaaagctcaggaatggtggcagacataaaaaaatgcttgtgctgcaaaacagccagaggacctggtcaatggaggggttgtgaaaggggatttcagcagtcatttgggtctccaggtgttcagttctctgaacagggtcagcatgttctgcttcatatcatgtttaaggttagtgatctataggaagaagctatgtgtgggttacctggatcgtaacatgctcagagttcctttcctgtggcaatattcctagattggaattcactgtatgtgtagcagtatgtatgtatgttctaatcaattgtcagagtgcaatacttttagtgttgtttacagctaggcagacattctcatttttaaactgcagtggtatgtgtgtttttaaaaaataaaaatgaaactgtttcctttgggtatcagaacaacaaattatgaacaataaatgaataactatttccttgagcatcatctttaatgtataatatattagcatacctagtttatgacattctcggttaataaggacttcttaacccagagtctatgtgtgtctttggggttattgatagactggagaaggtccattaactctctgatatgtggccaagtttgtgctttgtgtattgtgtattgctgtgtgaaagagtccatagtgttgatttgattcttaaaaagttggagaaaggtactaaatggtatcttaaaaaaataatcatttaaatagaatatccttaataacctattatatccacagaatgcttgcagtttccagagctctaggaattggtgaaatatttggttctaagcaatgtattcaatcagttttcagatgtccattaatataaaacaaggcagtttttattatattaaattgcatttgcagctcacattcaaaaacttagtctgcttgccttttctcatgataggacccgtgccagccccaacaaacttaaagattactgaagtaacatcagagggtttcagagggacttgggatcatggagcttcagatgtgtctctctacagaataacttgggcaccttttggaagctcagataagatggaggtagttaactctctttatctttctctctgtctttcatgtcccatttaatttgtagggaagcttagttcaaagaagtattactcttgttgtcaataagcatttattgacatttgagctcatgacatgcatcagagcaggaggaacatctggctaaataatgtgaataaactgccattgagtgtgtatgatgtaagtggagacttacttttgcgtgggtatgtttttgtcctctttctccaagaccatcttaaatggagatgaaaacactttggtgttcgaaaacctgaaccccaacaccatctatgaagtttccattactgccatctatcctgatgagtcagaaagtgatgacctgattggcagtgagcgcacacgtaggtgtttagctttcaaataggacattgatattttaaagttaatttttaaaaaatagggctacagctatattagtaatgtgttcccaaattctgttttcttttagtgcctatcttaacaacacaaggtaagaatttaatttgatgaattgtttgaatgaacaaataatgaatgaatgtataaatgaaaagtaccataagatacataataaataggtcatctgcttttaaatcctaagatgttcattgagaactcttttacataggcttttcttgaaaaactttgctttgctactacttgttttggagtgtattgatcagcttggggtgccataacaaaagattagactggatggcataaataacagaaatttatattctcacaattctggaggctgagaagtccaagaccaaggtgctattcaattcgtttctgggtggtggctttcctcccagcttatagctagccagcccctttctcggtctctctcattttctcactctctcacgtggaggagagagagagagaataaactctctcatgtctcttcttacaaagactaatcccattatggcagccccaccctcatgacctaatctaaccctaattaccacccaaaggccccatctctcaataccatcatattggaagttggaacttcaacatgtcacgtttgcagggacagaagcaaaatgaaagtccatactaaggagtcatttaagaatcaataaccatttttattaagggaacgaatttaattataaacccagaggcatagaattctctgattgccttgggagctgtatatattttagggggaggcattgttctgtctgcttactcagtttttcaacaatcttctttcagctcccaaaagtggcccacgaaaccttcaagtgtacaatgcaacatctaacagcctgactgttaagtgggatcctgctagtggtcgtgtgcagaaatataggatcacttatcagccttccacaggggaaggcaatgagcaaacggtaattttttaataaaaattataacttggattaattctaccatttctcttcaaactctttttccccctcagtgcttagttagtcatacttactttttaagggatattaagatttatcgcattggatggaataatctgactctttagctggcactccacgtggattgccatcatggagactcaatggatgttctcatgagagatgatagttgttcttcattacagccccaaagcatgaggcatgtgcttcaatgcatccatagttcctttaaaaactattagtgctggattatccatgacgatatccagatagtttttgagtctatgttgaccttccattcctctctctaacttaatcaactgctgaaagtttgctaaacttacctataatgtttattttctatttatctcatttccccctgttttttgcatgtcatagggtgtcttctagatctggtgtttctagatgtgggagcctgttaacctaatttacactgtttttcatttttctattatccaaatggaggtccccaagaaagatggtaggactcgaaactcagtcttcatcctctttctcttcctagtctttccctatttaatagaacctttgtccattttacctcccttactttagttgtctggttttgggctttctacaactttgccttttgtgaactatgtaattagaactgcatgtattatcctaggtcaggaagcctcatgatttttacataggtatgattatgttttctgattcatttcaaaataaatctccagttttggtgaggtacagagttttattgacttttttggctagaatattttcttatatagccttagagacacatgtgttattaacctttaatcatctgacttgccgagctcaagcaaatgggtcatttctcttatcagtttagaggtattagccaaggtaggggttggcattaatctaaggtgtgtggttaaagatctctgatactacccagtaagtaagcttagctgaatcagaaaccttcccatctctagtgtgactttgagttggtcttttgaggcttttatagctccagtcttaggtagtgtgatgcatttggactgagaatttgtctgttttaggtaaatagattataattaataaacttaatatcaactgtaatcaatagacatttatatgaaaataagacaaattagatggactgatatattaacttcagaaacagaacttcttttttttctgtggcatgccagatttcggtaaaactacaaatcaggagaagcttgttcttagcatttcccatcttgggggcattgatgttccagctgcttctcctaagtctcttttactgtctttcagctgtttgctatcataaagagtctcgtaaacttatcttctggaaagtatgaagcccttaagctttgttagtctttggggtacttggattttaacactagtccgtgaaatcatgaaaatgatgaataactgatgctagaattattttggggagctggatgggagaggtaggtagatgcccctctgcttactcataaaagcagttctcctaaataggctttcagatttgttatgtattaagtttttatcaaaatggcttatactggtattgatacttttctctcataacctcaaatatgaaatttattaaaattagccacggtagttcagtttgtccgtattgaggatgatgaccgtgattcactgggtttttctctggaattcagactacttgagtggatgagtgctaagttggaaacatctggtttgttctagcacatccagccatctacatgtgcactcattttgggcagtgtgccattttcatgcgattttaattagtatgacataaacatctgaattcggtagactgttaataaattgtacaaattttctttcaacaagatagctagatggccttaagtaacgaataaaaactttaagctccataattagagtaaattgaaaagcttcataccacggggctggtatcatggagacaactggaaacccctgattgagtgtggcctggcaaaaggtctggtcatgtcgttaacacagctaaggctgttagagtgacagtgttcttgggggaaacaccaagagctttatactgtatgctgaatcattttaatgtgtttctaaagcaaataaaaacatctgttaaaaaggtaagaataatattaagtggtgtggagcctctaaaattatgcaattgtttcatatcttaaagtccctttgtagctcacttatgattagtcccccccgccccctttttttttgaagagttctgtgaaatgtgttttggatgaaattttgcagtgctggcggctagcaagttgaaatatctttttggggtcaccagtttaaagcttggaatcctttttatgatttgaggtgcatattttacatttgaagttataccacaaggtgtatgttaaaccttgactgtggtatgtaattctggaacttgacaagggtctcaaacagcttccctgtagaaagagctttttctaacagattagtgagatggagagagcaaggctgacacttaccaagaccctttttactcaagaccacaataggaggacggcagaacagtgtggtcctgcagaaactgaagccagacactccttacactatcaccgtatcctctctgtatcctgatggtgaaggaggtcggatgacgggaagaggcaagaccagtaagtgaaacctgagttcctatagcttctttaatagctactattagaatggaatcatctctttatctggaaacactggggtgacacaaagttttactaatatttaaaaattcatttagaaataatattaatagttttttcttttctttttttttgagatggagtcttgctctattgcccaggctggagtgcagtggcacgatcttggctcactgcatcctctgcctcccgggttcaagcgattctcctgtctcaggctcccgaatagctgggattacaggtgcacaccaccacacccggctaattttttatatttttggtacagatggggtttcaccatgttggccaggctggtcttgaactcctgacctcaagtgatccacctgccttgggctcccaaaatgctgagattacaggcatgatccaccgtgcctggccatattgatcgtttttaacatccttgcttggaattacttgtctctgtttgtggagaaagatgttactttctaggatagaaaggtgctctaagaccaaaatgtcttgtggatagatgagacatatgcatcaggctgacgcggacacagtgtgtgtcgtttattcactacttcaacaaatgtttgtgcggtgcctgctatgttctagggtgcctgggagatatcagtgaatctgtgtttcatgtgtgcttgattgttagcattatactgtgatgggatttctgtgcatttcagaacctctaaacactgtaaggaacctgagagtgtatgacccttctaccagcaccttgaatgtccgctgggaccatgcagagggaaatcctcgtcagtacaagctcttctatgcaccagcagcaggtggtccagaggaactggtaattatttcttgtagtaaaaaatgctagtttgtttaaatggtagctgagtgatttaaaagtggaactgaaggagttaaccagtttgctttagagctgaagaatttcatattcatttaataagactttatagagggtaaatagttgatgccttagagcctgggtaacagagggattgtggccaggattcttccccctggccaggggaagaagcggccgttctgggaagttctaagtggggagtattggatggctggaggggtatagggaaatatgtaacctcttgtaacaggtcatgtgggggcttattatgacatcctaatattacagaacctacttcttgacttggtcttgagttggtattgtgttatttgaattattatttctttcacaaatttttcaagtcaatgctttttgttttattaaaatctttaggtaccaatccccgggaataccaattatgccattcttaggaatctgcagccagatacctcatacactgtgactgtagttcccgtttatactgaaggtgatgggggacgcacatcagatactggaaggacatgtaagtaataaagccaaaaaattaatttttcatcataagtgttgcttttcattataaagaccataaaggcccattaaagagaattaggaaagtttggtgtgatagaattaaaaacataaaaattagccatagtttaccttcctaacaccaaatgttaacattttgtgtgaaataacaaatttataatggcatcttcttttgaaataatttcaagatttgtaaaggtacatataatcatcagtatactactttgcttaatctctttcactgacaaaaattcattgagctttgctttctgctttataaattgttgtgaaggactttacaattggctttcatagtgcgaattgttgaaatctgttcggcacattacttaatttcatatgtctttggtttgtttgttgaagtgcttttttgatcttaaaatctgtatgctttcatttaggaagcagtttatgtggttttactgttttttgtagtattgcttaaaggcttttgtgcagatttagaaatatttctttggctttaaaaatatacttgctgatagttaaaaggaaccaagcatgaatgtcttcttttggttagggattagtggtctaggaagatgatgttattggttaaattagagtttggaattagtacatcaatttaattggtaggtttttctaagttcctattggggcagttaattaagaactgggtatatcttatttttctctccttttaccttttctattaatcacaaagttattgagtagcaatttgttaaatgaagaagtaatgaatggttgaaactagctgactgaatcagatgagctcaatagctgttgtcagattttacttagaaggcagactcttaaaaaatgtctcttcttcctctctccattacttatgttagaaaactgaaactacttttcctatttcttttctctatcccatgaccctttatggccaatccagttccaccacgtttattagcttgtttttaattgaatacaatgttgcttccttatagacaaaggccatacttgctaactttaactaaatttgggtttggagagttttaatctgcctttgtgtgtaggtaattagaagtataaagaagatagcattttatcctgttacagaatgtaggttctggaaaagtgatacaaaagcttgagatatataaacagacttaaaaaatagatgttggccttcatttcctcagtgatgagaggactggcaagaaatgtccaagtatacaatcctacacctaacagcctcgatgttcgctgggaccctgctccaggacctgtgctgcaatatcgcgttgtgtattctcctgtggatggcacaagaccctcagaatctgtaagtaattttgtcatggaaactgcatttcctggtgaatgtagtcacatgtttgtgtcacgtttgatagcctgggagaacacaaaccacaaacatgccagtgtataatacttaaattattgtttttgatgacttgaggtaggtgtattaattatagggttagtaagaataaaaagaattttgggaaaatgtgaattagctggatgagttaaaaaccccagtaataaatgtaaatcattgctagaccttgtcaatatgtctttgttatgaaaatagtttaaagtttaccttcactggttcttacaaattgcccaatctatctttcattcataacattattcagttttgtaagtagactaacaatttagaaatcagaaattgctaatttcaataagcatagtatcagaatacctaaaggaaaataaacctatgaactaatttgacttatagtctttgcaaaaataaacagtgttgacaaagataaacaaatgattaacaatatatgcatttggcaagaacactgattttcatgcccatgtatggtaggacatattaagacaactttacctgtatgtattgtatggagtctctatttcaacacaaaatctcccccaccacaataagagttcctattcttgtgtatttaacatgcaggatgttttttggggaaatatcatgagctttgcatgttatatttgagaatctttataacaaacataaacggagataactgaagctactaagggtcaaggatgaggtcacttttttggaaagggaatttctgaggacaaattttgtttaatgatatggtctgggtggatcttatggagaagcacagttggcttctgatgtgtctgggctcaacattttattataaatactattgtgatgactaactgaagacttggtaagcatttgagttgttgtcaggcagaatttggcatttcctctcctgcagatagtagtgccaggaaacacgcgcatggtgcatctggagcggctgattccggacacactctattccgtgaaccttgtggctctgtactcggatggagagggaaatcccagccctgcccagggccgaacgcgtgaggcagaaatcctttctccattccattcccttgtagctagattggcagggcttctctgattgaatgagtggtgggaggggggtggtgagagatgggtgctttctgcctgggatcccctacatttacattccaggcgaaaacattgggtctgtgactgttgtttgtgtgacgtgaacttcttctgttcgtgttctcatttgggacatgagttaaggaggggtttctcccctttttcccctcttctgctctgtatcttctttttttccctctttctactctgcagtgaatcatcttaccaaatggggactttggaaatgtgagggtttagtctttatgttttattgaatagatatagttatagtggttaaaataatccccctttttcctagtctacctttcaaagctagctctaggtcactgaaagttcagcatgtaaccatagctctgaaatacactgtttatgatttcacattaaaaccataaatgtatattttattatatgggaggaaacatctgagtgaatggtgaatgaaacacatgcaagcaacctccttaatctgacttaggtaatgctcacaggcaggcaacaaactctattgtattttatttatttagtaccacgcagtggaccaaggaacctgagagtctttggtgaaacaaccaatagcctctcggtagcctgggatcatgctgatgggccagttcagcagtacaggatcatctattctcccactgttggtgatccaattgatgaatatgtaagtctgatactcatttattggcacattttatcatcttagctgaatggacagtgaagttaaacttctttagaggtatgctgtgagtacggttgagtccttgatagtcacactttaggattttctctgacatgacgttgggaccacccaaatgtgcttacttagtctttctggcctcccataccacagagaagcaatgtctttgggctcatttttattctaaagacagatagaaaaactatcttatcacatgattaactgagcatttctaaccacctaatgacaccacaggaaccaagtttagtgaaatgtgatacctatcattctggaatgtctaagttaatattcaaataatgtatttatccaaatcttaccctttcctcaaatctaattcctctacaaggtctcccttaaatattccagtgttaattgatctctcttttctttaaacttaacattttgcggtacactttagttttggaatataaatactctcctattagcttcaaactttttgagtgtcatagtttgtctttccagaaccagattcaagtttctggtagcttcctcatagccctcactatgcacatccatttgttatgagtggaaaaatggaaaaactaactgctttatttgaaatttagtgattaattgctgtgatacatttgcagaatattgcacaagatgttgatggtaaattaggtctgtggtttgccatctttttaccacatagatcgtcttagataattttccctccctgagccccatgtgatgaaatatttcatctactggaacttgatatagtaacctttaattcaagtccctatttttattaataagaaacacatgtaactaccatttatagtttctgatcaaaatgagataaacagtactactacagttagtttgccaaagcagagaaactcatggttagtgtttgttcagccttgccatggacaaatatgcaatttccctttactttccgaaaacattaaaaatacaatttatcatttgtagttataggactccaggccaggattcactggcataccttatccatgttgtttgtagaagcaaagcataggtttagaagagagattgagatgtctggttcatttcctcttcgaagaggtagttgaatgtattcccatctgtttcagctaactagtgtcagccaaactgatatttttgaggccagaaagttagtcaatttttgctcaccagtggattcccagtagctaatacctgtcccactgtgcctggtccacagcgggtactgggtacatatttgtacatgaaaatggaacatgtgatgatgagatctgaaggaaacaaacttactactgagtgctggaatactcagtaaggtgttctgaagcacacatggcattgcttttaatacagttttcttcaaagatgttaagtcacgtggctgttaagtggctgatctgggatttgaacccagagctgtctgattctaaaaccactctcctatgctgcagagaagaagtgaagatagtttgtcttgtcacgagcattgtgtaacaaaaataaaatgtgaaaaaaactactattactgtttatgggaatacataaaacaatactgtcttttgatctggaagtcttctagatggtaatatatttataatttaacttcctctatagaccacagtcccaggcagaagaaacaatgtaatactgcagcccctgcaacctgacactccatataaaattactgttattgctgtttatgaagatggagatggtggccatctaacaggaaatggaagaactggtaagtgttttgtactcccccttttatttttgctttgaaattgtcaatatgttaatgttgcttttataccttttaaaacctaaaattttatctttaccaatacatctcaaataccacactaatattgtattatttttattagacattaaattttgtcaaaatgatgacatgtgaaaggaatttgtttttaactttttaaaggtccactaagagaagaaaaagaagaccatgtacatatttttattcgcttaagatagttttatttcttctttggaaaactattgcatattctctgaataatgtttcaactggtatggtgtcagttaagactaaattgttaagtcaatatagtatcagtaagaaatattccattgcgattgaatcttaagccataaatacagaaatgagatgatgagcaatcattttctgtctacaaatttagctttttctaaaaaagaaaaatgtattttttattgtactaagcaatttgcatagaattatcaatgttcagacccatttttacactatactggtggtaatttcttagggtttaaaaattctctaatgtggttgcttgctacagtcacctgaggagctttaaaaatacttacgcctgggttccactcccagagatactgatgtaactatgtgaggtgtgggctggacctgctgatgttctaattaatgtgcagcaatggctgagagccactagtttagcataaaggtaggatgaactctagatctgagttttgttactggtagatatttgcattgctgttttacacttcattcaccaaaaatctacttaagtaacatgacttcaggtgtctttctgcagtcacttgccaaaagtctttttgtgcttaaatgatcttgacaacattacagaatttgaagaggtgacatttgaaagctcctaagggaaaagcaggactagagttgactcagctcagtctctcaaggtcaagaatctgtatttattgatattgttgtctacagactgagtcaatggagactcacatgactcaagatgattttaacaacctcactttttaaattttctcagattttagactatattttgggactttcctggggaaaatggcatatttcagaatttcatgctatcaaagtggattttttttaactagatcttggattttccaggaagggccaaagtcatgttttgtttttcttatgaaaaagaagtttttcaagttggattcgttatttgcgcaatgctgtgaatagtaaactcagcaactacttaacatactacctgaacagcattgattttataagttgtgggcttgggggcagtatctctggaagcttaaggatttattctaggtaatggtggtggaggatagagaggtacagggaaaaaacattattaggtagctggggtggttttgggcaaataatatcttatgtatttgatgaagtggttggactagatagtttctaaattgctttctgtttccaacaatctgtaatgtatgacattctaaaaatgatttgagatctcttttattttctataatcctgagtcatagaacacttccgctctggatactgcttcctgctgagaaggctgctctggaaatcactagttcttgagtctatttgagttgctgtttaaatttggaaaactattaagcattttttgaatacttcaatgccttttaattgttttctggataaagacattatgggatattatgaaattgctcccattgggctttcctaccgatacttttaaagttttgtgctctccctgtgtgccaataaaaggtcagtaatgtgtgtcaatgtttgttttcagtgggactccttcctcctcagaacatacacatctctgacgaatggtatacaagattcagggtgtcctgggatccttcaccttctccagttcttggatataaaatagtatataagccagtgggtaaggaagtgcctttgtcatcatagaaatgctttggagggttatttgcatatgagggtattttctctttcatcccccactgttgggttctcctgagagttcagatcacaccaagtttcctgtaaccaaaggcaatgtttttggcaataacattttaagccagtcatctaaagtaccattgttattataggtgtagatgagattcttattaaatgtcatgattaaaaagtttgacttggttcataaagttgcacaaatcaaagatgcctgtcttcagacatcctatatgatcatgaaataatgcatattacatcaatatacctatgtatttttcccactatgcccaggtattattttattttgggcatagattccatgcagcttattcatgacagccttgctttcaaatcccctctgaaaatttcacctaaattagtatcaccttgattaaattatttgttatttttgttttaatattttgtctgtattcttagagaaactggaagaaaaatgcagatttcttagggcatcttccatatatccagtaagagtatgaactagaaaaaacatgaaagagagatggcaagataaaggaagtaaaatttgaacctatgtaagaaatagaaagagaacttaaaaaagaaagtggggttggtaactaaggagtttagcagccaaagtatgtggaatgaggtccaagatagaaattcttaaattatctctacaataaatgaaaaagtgtcagttggacacctactatatgcaaaacactatgttggcaaaatagggcttgagaaagaagcttgagaattcattcactaaagaaacattgattatatacctactatattccaaatactgtgctatgctttgagaataggagggtgaaggattcagtgtctgcttacagtttcatatttgtcatataacatagcatgtgccccagtgagtaagtgtatgaggactatggaattaatcgtgttcataataccctttgactataagatctttaattttaagcaaaatttcatgctattgatggcatgtttctgtgtatttttgtggttgttaataaaggttccaatgagcccatggaagcctttgttggagaaatgacatcatataccttacacaatctcaatcccagcaccacctacgatgtgaatgtttatgctcaatatgattctggactcagtgtccccttgacagatcaaggcactacatgtgagtcatggatattttcatggttgtgagaaaaactgtagtagaaattaccaggtcagcctgttttaatttcctgtttctgaacatatacatgtttcctcagcattatgtaggcaggctattttgtgtctggttagacaaaatacctattcaaatacataaatattataattgagtatataaaaatatatatggtgagaaatttgtgtatttcacataaaatattatactttgaattttaaaagataaaaattatagaaattgtcattttatccatgaatgacctgtaaaattagatctgtgatgctacttagttcttcttgacatttgataccaagatatatattacctaaattcattgatttaatttgacttaattattgaatcatgattagtgtgattcagtccacagatatattttaaggtcaccattgctttgataactatttaacgacttagcagatagccttttagaaattgttttcattattttccatgagatgtttttgaaattcttagttttgagagggactatatggaatttcctttccttgaaaatcagcgaaagaaaggggggtctattttggcagtaccacatttttaaatatgattcatgtatgtttcttataaggaaacataatacaattttgaacttttttttagccacagtgaaagtttgaaaattgtgttatgattaaaagtacactttttgcctcaatttacaaagtaaatctctttctttctttattttgtagtatatttaaatgtaacagatctgaaaacttaccagattgggtgggatacattctgtgtcaaatggtcacctcaccgggcagccacctcctacaggctaaaactaagccctgcagatggtatgtgtgtaaaaaagaaaaaaatgatctggagcatgtagtggaaacattttaaatttcagtaaagaagatgccattttgtttataacaatgcgatataaaattttcttgaaatataattggtgatgacactggcattttcctttgttgtcataatcaggaacaaggggacaagaaattacagtgcgtggatcagaaaccagtcactgcttcactggcctttcaccagacactgattatggtgtcactgtttttgtgcagacaccaaatctcgagggaccaggagtctctgttaaagaacataccagtaagtttttgaggaatctggaaagctttcataaggctttagaatagaatgctctaggtaaggaagacttaagtgaatcctgtgcaggtacctctccgtaggggtagcaataatgatgggatgatggcagattcctgaatgtggagtctaaagctggttcaggacctttttctgtagcaatttgcaagttgtccctgttattgagttggtgctactttgaggaagggctaaaggagggagagatggctctcgctgagaaggtgaattcatattagtgacttttactcatttgaccctatctgaaggccttacattttccctttagatctttattttctgtagctgtagtggatgttgaatgactaccagtgacatcaatttggatggaataaaatccccagcatgtcagtaccgatgacaatggtgtctcattttgtacgacttgatttggtatccaggatttaaattgctcttaaaatttactttctgggatatcaaatgtgcacatggtgtgtttttataattattatttttaaattttagctgtgaaaccaacagaagcccctacagagccacccacacctcctccccctcccaccattccaccagcccgggatggtaagtacagctaaataggcaatacgttcagctgatagggagttacagacttcttatttacgctgcatgtgcatcatttacaattaatatagaacatttctgatctattattgctgctgaagagtttttagattgaaagaaaagataaccagtaatttgtttctctccatctctgggcacattttggtgtgaataaaatcagtcataaattattccagatcttcagctggaagtctgtttcctcagttttacagatttaggtcttccatggtccatagttacatggtggacatttctttctgctagctgctggcatcagtaagcgctgtgaacccttttggctatatttgcgaccgaagccctgaggctgttggctttaaaattcctggtgtccaacctgagaagttccctggattatacaatgctaaaaaattttccattcaccaaaatttgaaagataattgtaacttgcagtgaactggtgaaacgacatactgatttattaaggttgatctctcagcatttgagggcaattctctagcactttgtcaaattaaatttagttaaataactactgtattattcttttctcatatgctgtttccagcatttaatagaaagcatttcagatatttttattttatcttagaaggatgtcgaacgttacaacttcgttaaacctattatataagtaaaattaaaaattaaaagtgtattattgtggggtaaaataataatggattcctttaaattagatacagaaagaaattcagtaaataatcttggtttaaaaacaagttttttctttttaaataggctttattttctagagtagttttaggttcatagcaacattgcagggatgatgcagagatttttcatctcccagacagactgcccttccccacacatgcccagcctcctccactattaacatcccacatctgagtggtacgtttgttacaaccgatgaacctacattgacacatcatcaccacccaaagtccacagtttgcgttagggttcactcttggtgttatacttctatatgctaagtttttataaactaaaattttgttaattgtttttggaattttttcttagcctctaagtctagatattccaataaaaatcttctcctttcctgcatatgattctagtggcttaatttaaattttacaaaggacttggccaggtgcggtggctcacgcctgtaatcccagcactttgggaggccgggacaggtggatcgagaccatcatggccaacatggttaaacccgtctctgctaaaaatagagaaattagctgggcgtggtggcacatgcctgtagtcccagctactcaggaggctgaggcaggagaatcacttgaacctgggaggtggagtttgcagtgagccaagatcatcacaccactgcactccagcctgaagacagagcaagaccctgtctaaaaaaaaaaaaaaaaaaggacttatttgcataaagtcaatctttaataattacatttcaaatctccaaactttttatttgatttctcctctcatttattgttcaaaactacttgaagagttccattaagtaagattgtatctttgcataatggatctaaacaaatggagtaattccagagcaggtattgagggtccccgcaatgcttcttaaatttattgtgcatgtgagtcatcttattactgctggtactgattcaggaagtctggggtaggacccaagattctgcatttctaacaagctcccaggcagtgctgttgctgcagaaccacactttgcgtagcaaggtgttatattgcattttcaattatgtgatttcatttaaatgaaagaattcatgagatttggggcttcctctgctttctttttttgcagtatgcaaaggggccaaggcagatattgtgttcttgactgatgcctcctggagcattggggacgataattttaacaaagttgtaaaattcatcttcaatactgtgggaggctttgatgaaatcagtcctgctgggattcaggttagtgtcattccgccagtggctactcatttgtgatgtcttgcctttcctttgaacttctctttttaagtaaaaagtcttttcaatataaactctgttttgaccttctcctatttgctatttcttttattcatgtatttttgggagggaattgggtataaatgataaatcaatagaaaaataaatgttcccttagtttttatctttggctagataatattcctgttggagaacttaggggattctaagggactctaacttcctgcttaaaacttccaatcatgacacatttctatagaagttcatccaaagttctggatattaaattctttgtgattgtcatcccctgtgaagttagaagaatcagtgataaacagtgactggagtgggtgtgtggaacttgctgcctctatcattactttgcagataattaccttgaccagaagaaggtccattgttgagctaaagcgtatttcatttgtttttttaaaaggataactaccaattatcttgctctgaaatcactccaaatatatttgttatactgaagtacttagagaagtttatatttccatgagggaggggcctcaaagaataaatcatcatgtaaccctaacacagttaaaagacccaattaaaatttcaccccctctggtgaggttccatgatggctttacccattccatgcttttgaattattttgtctatattgctgcattacaacaaatatcacttcatattgtcattaattgtgtgactctgttctgtctaatcttctatctaaatcattgactccttaaagcagaagactatctttttaaaaaacaattctctccttttctttcccatttctttggtgaattttcttctttattttggcagtttgatcatcattgtggcattatgaaaataagctattttgaaataaaccacaaacaatttcatcaacaaaacttgtcctcttttatggaatagtagtatactaaatttcaaatcctcaaataatcctctggacattgatccaacccaagaagagtaaaaattcaccctagttatattcttaatttaatgtggttatattcttaatttaaccacattaattcaactagcaagcttttttcatccttttaggaatttgtatttctaaaaaaaatactgatcatattttattaacatctatgtaccagttactttgtatacaggattattagtctttaaaacaatcctagaaggtaagtatagttatcctcattttactgataaaaaaaatccattgtcacatagctattaaatgccagagctaggatttgaacccagcgattcctgagtacaaagtctgtactttttccactaaatcccattttcaatgaggttgtgatgagggatgattataatcacacatgtgacatttctgtattgccataaagaacggatatagtcagtgggaagtagcagttggctgagtcaactgtttaaccaacatttggattcgagatggtatgttctcatgtctaatcctgggatctcaccactccccacctttattcatccctttctatgtcctagagaaaggcacaacgtgaatatagtatattttcattattaatgccaattatgacaatttcattgaagattgaaaattaacgaatttaatgagacaagtgcagtagatgttgtaatattagctataaagagcttacaatattctatcaggtctgagatactttttacacccccaccgctttattccgcagctagagaatcatttgaagattgaaacataaaatgagatgacttatgctcactgccaaatcacattttccttcaggtttcatttgtgcaatacagcgatgaggtcaagtctgagttcaagctgaacacgtacaatgacaaggccctagcccttggggccctccagaatattaggtacagaggaggaaacacaagaacaggtatgtgtatatgtagacctttactcttcaagcatttgtagtggcagaactgagtgtattatctcatgctgatatccagattcttatcagttgggtgtgactaatggcatttgggtagttttcactgaagtgacactaaaattttccatgccacattctgtaggcaaggccctcacgtttatcaaggagaaagtcttgacttgggagagcggcatgaggaagaatgtccctaaggtgttggttgtggtcacggacggtcggtcccaggatgaggtcaagaaggcggctttggtcatccagcagtcaggcaagcacatacatgaatttgattgcacttgaaattttaacatttttaaatgttcacaaatgattgcaaaagactaaatttgctgatgttactttattgtttctgtttcactctgcacggtataccttcgtaatgctagtttatatttaattatggaatggtttgcaactgctcaaaaatgacatggggtattctttgtataagatgtggttcaggattgacaaggggcaaaccacattttcccatactggctggaaggctacagaaagcaatgataatgagatgatgctagagcaggcttcctgccatagcagaaatgaatcttgatactgcttcctgtgcaaggagagaaaaaaggaagcctttagctttagcacatctttgcagatgcagacttaatgagtgctaaaagatatgttgcaaataaggagtattgaggtcttagggagtcatctgtgggatagatcttgccaatcaaatatactgagagcctcctggtaacactgttctttggattagttatttaagatcattagaggtgaaagtagatctttccagtacttgcattaacagcccccctaccccctgctgtcccaagcaaggtctaaggtggatatatttttagagagaatcttatgcataatttgttgtagtaaattataaagtaattacatggaacttgtcatctgtacatgcatgattctttggctaaatttatgagttatgattagtgctaagtcatactgtctttttttcaatagaggttgttcttgctgatcttttataaaatgtattgccattatgttatacaccttacacagatttctgcatgtttgtgactcctggtagatttaagtttgggcttataaatatttgcttctcacgttaccttatttatatctaaatatatttctaattccttatatagctttttttcccctgatgtcaaatttagctttcggagtgaaaaatgtgcttatttgtcatagcctaaatttgcttatttgtcatagcccgtctgttgccagtgagagttgtagattccattttcaagatggccagagttctgcctttgagcctgagtttcctgagaaaatcagtttcaagaacccagattttaaaataagcccattcttgacttctgagtcacataagcttaaaatattaatggctgcagaactcatgtgtgtatcaggactgtggatctgtggaaggcagtgtgcaccacatgaagtctttctgctattaaaatcttcctatttgaattgttgggattttatcttaggaaatcaaattaaatgaattctttagaccagaaaatagaaagacctggaaaaagtatgtatttattaaagagagttcacgtcaagtaaaaggacttgctgcatacattaagaaaatacagcatcatttctgataagaatttttttgcattgttctaacaacaaggacagaaaaagagatacgtgattcattctataaatgctactttgcagggttcagtgtctttgtagttggtgtggctgatgtcgactacaatgagcttgccaacattgccagcaaaccaagtgaacggcacgtgttcattgtggacgactttgaatcttttgagaagatcgaagacaatcttattacatttgtttgtgaaactgccacttcaagtaagtcacagtcaacatggatctataacctcacttattctgaaaaacaattacttagtagacaattctatatcctttgtgggatcaagtctgtgcataaatagatcctgggaaatcacttgagaacctgatgaatcactgttcctattgcgatcatgctaaatgtgtgcttgtcagaaatccatttttagccttgaatatgtaatttccttgtgtggaaataaagtgtttcaatatatccttttcccaccaccccaatgcctatgacatttggttaaattaatctcagcctcaaattgcatatagaaggcgtttctgtgagatgaaggttttccccattagtaatcaattggtatttgttctgtcaacatccgtgcttcaagagagcaatgaagaaaaatggttcctcagaaattcatttggttcccatttgtttgtttgggtttagattttcaagttcagctttttaactacagtgaagaaccaaaaattgattatttaagtcgatttattcttatcaccatccattaacaccaattcttggggtataggttatggaggcaattaatcctccataattaccaggaggcaatttatcctacataattgatcaggggtctgtggctagtccagacccctgatcctagacagggctatgctttacaaatataatattcccctccattaaacattattttaaaaacaagaactctggttagagtaaacagactttgttggtttactatgaaaatttatgctgaagttcggagtggagctgcactgatgaaagtgagtagggggctggagtggtttctcttctgtcccaagtagtcctggatgcagccatctggtaccctcagctctgaggggtccagagcaaaaactactgcacacttgttactgttacatggtgtttggtagccagtgtgaggcttggagacttggcagagaagagggttggggatggacaagctcctcctacctttgcagaaatctaaaattccctgggagggaagttctttaaatctattgaaaaatgtgaaaaattcctcctgtaattcttttttattatttttaagagtactgtaaaagtccaattggattagagaatgttagggaaatatttgttacactggttaatagtatttctcctacacgtaggaaatgtacaagaaataatgtataaaatattaaattgagaagttattttaataaatgaacaatgtcatttattacttgaaatacgttcattgctactttctgtgcatatataatttgtacatcgtgttggtgaatcatacttaaagaacactgtacattgcaggttgtcctctcatttatttggatggctacacctcaccaggtaagcatttatactttggggcaaattaatttccagatttaagcaataaaataattaaaatgtactccgtttaatattttcttttctgatgtaaaggttttaaaatgcttgaagcatacaacctgacagaaaagaattttgcttctgtacaaggagtatctttggagtcagggtctttccccagctactcagcatacaggattcagaagaatgcgtttgtgaatcagcctacagcgtaagtgtgacaacaggaggttttccttttcttaagacctgcaaaaagttcttggaatatttgctgacttcccagaatcctgggactttagaattgtcagaagactgcttatggatgaccctgattggttttcttaaatacagttaggctaattgtttccaggttacatagttgtttgcacacaggagactaagactcaggcctcgttattgccagatccaagaagctcatgctggtaacagattactgacccttttgaatttaaggctagaaaagctgttaaaacaggaaggcaacttaatattttgaacatctctctctgtggtgcagaatactggatggaataagtgcagaccgagagcattctttttagtgtttccgacctctagaaaatgaaaggtagtgtttcttgtccatgatcagacagttggcatgtagtttttattggctgatgctctagcaatctgttgtgtagctgtagatgttattttacttcatgaatgtttgcacctgagtatgataactgaactctgtatttcttattcattaaaatgaaacctttttatgctgaaaaatatgtttgccaatttatggaaagaaaagaacaatgagaaattaaggtattgtaagctcaggacagggtcaggaatgatgtctgaaatatgaaatgctctgagaaagctgatggaaaattcagactaaaaccaaagctaatttattttaagaggcagagattgtattgttgtagtttgaccacattgtaagtctctaactcctttaatggttaaccatgttggctcggagttctaggtttttcagtgaactgtaatacccagtgtttaactcttccagtcagctcagcgtatgatttctacattttaacttatgacagcctattgttttctcaagcatcagaacttttggctgaaaggaaagaaacataaatacaattacataattttttcacaagcactaattaaggaaggagaaaaatgggctaggtgagagatgagttgatgtgaagaaaatatttttaacatagaatattataaagatagttcttgaacgtataaaagacatcatgtcagcttacccagagcatatgttttaaaagcaagatggcattagtggtgtggtattaggacatgaaagctttgtgtcctctatcaaaattcatggaggaatagcttcttttctatgagcttattatctggttctttttcttaccttcagggagaaagtgttattaaatgttctcagatagaaaaccatcaattccacttcaaagattcccccagaacaatgattgactaaactctggagggacacatgggaccaattttttgttttttgttctgtcttacagctgagggccaataaacatttcctttcaatcaattcccatccttttatcatcactaaatgtttgcacatgtatatggccttcatatttaaaatggattttgtttttgggaatatatgagctctgggggtgatttatttgatttcaggggagaaatttggaagtgtaaaaagtattactgatagggagggagagagaaattaaaaccttaagccattttatgatctcatacagctgacattggaaattaagtatatttagtaagattcattctctttaaatgatacccatagtcataatgtttatcattctaaaattatcatataattttataatactctgtgtctagaaaaattagttattaatagtaggataaaagactattttgtaatttcccagacttttgtgactttatcaaattagaagtaatcgattataatttacataactggtctttagtgcttgttcttttgatgtgcttcctaaatttttctccttctaaggagaagtcagaaggagccagattagtataaatagcctctaatactacccatatgagattctggtgcaaagatttaaaagagtatctgttcttgatgttaaagcaatcaatctttctttcttcctttctttttttctttcctctcctttttctttcttttgttttatccaacagagacctacacccaaatggactccctccttcatacacgattatattattattcagacttctcccagaaactcccagtgacccttttgcaatttggcaaatcacagacagagactacaaaccacaagttggagtgattgcagatcgtaagaatttttatcttaaggcacatgcatacttagttttgattatgtttttcttttctcttttaaaaaactttctgaatatagactatatatatatttatttgatatatacttttatgtttgaacttttccaagtataacacatcagtaaatatcctaattgcattttatcataactgaaattattatatttttaaagaaatctctccaacaagaattatttgctaatactttaaataaaaattatacaatgcatatgatttaataacacttttatgttgattacagcttctagcaagacgttatcattctttaacaaggatacaagaggcgaggtgcaaactgttacatttgacacagaagaagtaaagacattattttatggaagttttcacaaggtaaaaacataagattatttgagtcttatttctagaaaaaaatataaaacaaatttattatttattaaaatgtcatgttaaattggcagaattataactatgtcttttaaaaataaaatcttgttttagagaatttggttaattcaaataatatttaaaataaaacaatatactaatcaagagataacgagtaatattttgatttatttttaatgcttatttctttttaaaatttgaatcatactatatataacattatccacctacttttctgcttaccatttggttatgaatctttatgttatttagtttgaaaagcttaattttagtggattatgttttaattgataatatttcttctgcttgctttttattgaaaagtacaaacatgccagtgaaatgcagaaattgatatttcttctgcttgtattttattgaaaagtacaaacatgccagtgaaatgcagaataattatttttatcaatccaaaagttatcaatatctaccaaaataattaagataaatgtttatgagattaatttttatgtgaacacacttattctttaaaaacacaattctctagaaaatcttattaaaagttctaagatgcattctagggattgtctattcttgatcatcttaatcaattttctgtatgtcaacatccagcagatagtagaaactttttttttcaggtttctaaaggacaattcgttgacaaataagaagcacttcttacttagaaaatactgaagttagaagcattagaaataaaaagaacgatctaggttaggaatggaagttaggaatagactttttaaaaaaacttctattttaagttcaggggtatgtgtgcaagatgtgcaggtttgttacatgggtaaacgtgtaatgggggtttatcatacagattattttgtcacccaggtattaagcctagtatccattagttattttttctgatcctctccttcctttcacctgacaccctctgataggccgcagtgtgtgttgttcccctttatgtgtaggaattgactttttaatagtatttcttcatccattggattatgttaacaggaataccagttgttgcacagatgctttaaaatttctccagtgtggcatgtagaaagattagcccttatacataaaagacagatgtttccagttcaagctgattctcaagtgaaaattgaagaaatttcttctacctgagtagatttagcagtatttcttactgtttctactcctgaggaatcttgctttctttccagagtgttgttcttattcattaatcagatttttgataaggatggtaaaggactctcctcatcaagcttaaggaagcttcaatgtacatattagtgataacaaaaaaaaaaggaaaaacaaaaatccctgagtacaatcgtatatctacttaaaggtttacagacctccatagtgaagtgcagtaaaataaatgcctcatcagaaaagcaagttctactttagcaagtgttattggcttcaactgatctttatctgttcttagatgttgaatctggcaaaggtctgatgaacttttgtggctcagtgaaacttacatttgagtaacttgctaaaaaggactatttttatttttcctttcataaccactgaagatattgagaatctgatcatccactaaaccactgataaccatttggtaactgttattttaaaatttccaactgtcatggaatgcttcattttatctaaaaattttaaaaggcagtattttttagaggtctgtagtgatattaatgattgcaaatcagacaattttttttgacattctcttctttataccatttgcctccccagaaaggcatttgcattcttgggttttatataatgcctattttttctcctcacaagctctgtcttttctttccaaattctctaccttcttctttgttttttattttaataatctttcttttagtttctccttttttcccactgtgctcttttttctcctccattccttaaacccgttctttctttttaaacagctttattgagatgtcatatagaaaaattgtatatacttcagctgtataatgagatgttccgatatacacatacattgtgaaatgatctccacaatcaagctaattaacatatctattacctctacagttaccattgtgtgtatgtgtatgtgttgaatcagtttaatctaagatctagcatcttgcaaattgcaagtataaaatacccccatcccattgacccactctcatctcatcaattcaagtaccaccttcaatcactctcagctgttcacatttttttactgagccaaggattcaagcactctttcttcactttccgtctaattcctgaattgaagtttttcaaacttgggatgagaatgagcaatatttcaagagcaggaaattagtgacagggagagggaactttggggagagggattaactaaaatagtttaattaaggaatgacagacagttatccattcctggggattctcttgaaaagctttttttgtgtctcccttctattgttgaaagatgacatggattcatgtgagacatttataataagaaagagaactagaatggcagagtctgggaagggagatgagtgacaagagggtccctatttttttctactggtctgggaccaacaacacatcatttaggaaatagattggttactctacacacttggcacaatgatctacagatgaagggcccaatctgaaatgtaactatgcatttgtttaaactgcagtaaaacacactgaataccttatagcaaaatgtgcttttagaatgtgtttctctatggttagcattcaatgacaagtgttcctggaataattttgtcacaaattaaaaattttgaaataatttttctggatactgtggtttttcacatgccttgtcaatgtttgcatctgtggttgttcatatatgagccaaaaagttttggttcttattagataaaaaatatcctagcatggtgttcttcttgagttcagtattagttgattgtcctgggggcatttaaactttatttttggtaagttatgtattacttttatataaaagaaatatggaatttatatttatcacagatgcagtaaacttatggtttggcggtgattccatgtgggaaaaatatttagtttaaaaatactttagaaattattcttatgcttactgactgagagcatttaagggaatttctgttccttttaatttgctgccaaacttttcaaagtcatcatcaagggcttacttgagtatttgtgctgtgataagtagaaactctgagcataactataaagacaaggattacccaggaccattctttacattgttgaaatacaaacattttattaattatctatactaatagagttgttaacattctgtgtgtcttcagtagcaaacgaaaaataaatcaatataaacttctttccttaaaagaaaattgaatcctgaattctatcgatttccagagttgaatccctatagaagacatgtgctagttctttactgtatgaggtatctatatggtatgcagattatttctgcctgagattggggaacaacaaactgaaagttgaatttagtaaaattagtggaagacatctgaaatttctttgtagtgaatataatagtatatacatgatttattaacctctacttgggtagctctttatagcttacaaagtcatttcatctactatatcctctctggtcatctcagtaagagtagatagtgggaaaataagaaattatgcaagtgtatgtgtttgtaggaaactgagaccagaggttaagtggcttgtctaatttcatattattagcaaatgatttcatcaacattgccaactgctcttggattttcagagtaagacttttgatttaggatgagaatagcttaaaaaacttcaaaaaaatctgatctaaactatgcagagtcagctaatttttttagtgtagaaattttataatggaaacaaattatctttttaggttcatattgtagtgacctcaaaaagtgttaagatttacattgactgctatgaaattatagaaaaagacatcaaggaagctggaaatataacaactgatggttatgaaattcttggaaaactccttaaaggggaaaggaaatcagccgcagtgagtaacacatttttatttctcttggtaccttgtgttaagattgaaatggcatttttctaaacaactccttgagttttattttattctatttttctcagtgagttttaagttgtcaaatttcttggtcagatcaaaacattggaagaagtacattgagaaaatatgtccacagaacataataatgtgctttaactacttgctagaaacaaaataagatgtcaaggcaccagggaacaccatgtagtcattttgaaacaggatcaaattggagaacaccacacaaagagttgccaacatacccagtgaaatagaaaatagttcctattttgttcttcagcaataattgttaatacagatttgtacaatcaggatattaagcatttggggacactagttgcaactttcaccagagcccacatttgctcacagaggagccattcggctgcctgtatcaaaaggatcagtggagtagggcagccagctgaccccattactcacaactttcactatctcaggtttgaggcaggagcgtgccaaccccatttacaatgctatctaatagggaaaatttaaatctaaagttgtcatcataccaagttaattaaattcatattaaatgtcaatcaaagccaggcaccattgctcatgcctataatcccagcattttcagaggccaaggaaggagaattacttaaggccaggagttcaagattagcctaggcaacatagtgagaccctgtctctataaaaaagaaaaaaaaaaaccaatcagctgagtgtggtggcatgtgcctgtattcctagcaacttgggaggctgaggtgggaagactgctagagcctaggaatttgcagctgcagagagctatgatggcatcactgcactccagcctgggtgacagactgagaccctgtctcaatcaatcaatcaatcaatcaatcaatgtcaatcaatagacctattgtcctaaaagcaaagctagcctgtttggcttctatagttattattttaaaaatggctttatttatttaatttagctttcttccatggacaggattttcttctagattcaaaaggaaaatttttattccacaatatagaaacaattagttcaaatgtaatagaattttgattaaaatccaaaccttctgttgaatattgaatctgatatttaagtataacaattacatcaggtttttaaaataataacattgtctaaacaactttttactttttatcaaaagtggtttatttttaaactatagaaagatataaaatatatgctatcttgaaatagttgaggatatcagaaaagttattggtcaagcacttggtaataatttctaaaaagaagagcatcaattgtagaataagtgaagacttgtttctttaatttactttaatgttacttttctataagggtgggctcttaaagcttgatgtaggctgagtgtggtggctcatgcctgtaatcccagcactttgggaggccgaggcgggtggatcatttgaggtcaggagtttgagaccagcttggccagcatggtaagaccccgtctctactaaaaaaacaaaaattagctgggcgtggtagtgggcgcctgtaatgccagctaattgggaggctgaggcaggagaatctcttgaactcaggaggcagaggttgcagtgagccaagatcacaccactatactccagcctgggcaacagtgagactccatctcaaaataaaacaaaaacaaaaaacaaatttgattgaaatgtgtgtgggcttcaaattcatttaattatagaaattaatattctcttaaaaaataacacaaggctgggcaccatggctcacgcctgtagtcctagcactttgggtggatcacttgagtccaggagttcaagaccagcctggccaacagggtaaaaccccgcctctattacaaaatacaaaaaaattagctgggcatggtggtgcacgcctataatcccagctactcgggagactgaggcacgaaaagcatttgaacctgggaggcagatgttgcagtgagccaagatcccaccactgtactcctacctgggcaacagagtgggactctgtctcaaaaaaaaaaaaaaaaaaaagaaaaagaaaaaagaaaaaaaaaaagaaaatacctaacaaacaagtggaacaaaactcactcaaacattgcatttcagccaaagaggtgaatcaagagtgggaatctcacatacacctttcacttttctatctctttctcgtagacatatgttcaaacatgcattttggccaaagaagtgaatcaggagtgggaatctcacatacatgtttcacttttctatctctttctcgtaggcatatgttttcatggtctttcctcatgaagtaaggatcacattgctctcaatggctcacacccttgagagagtatgtgtgagaagttggcaatgttaaaatgtggaagtgccaatataaaatgtttttcatgcatctttagctgatgttgctgttggttgtttgcagttccaaatccagagttttgacattgtctgcagtccagtgtggaccagtagagacagatgctgtgatattccctctagggtaagtaaaacagaattgaattctgccatggctttaacagtcccccagtaataaacccttgtgcctgggagaggaagtagcactgcacagttgtatattcaggatggagctaaaagacacgcaatgtgtgggtgctcaccagctactacagaaaagccagtgcctgtgtgatccctccctcacaagctggtaatacacagactgtttctgggacttctccctaagagaaaagtcctgctgagttaatgtgtttgataagaccacttactgtaaagccctcttattgcttgtaaagtatcagcattttacaaaacaagccagcacctttctggatgactaaggttttttagatggtagaaataaccatattatttctttttgagatgatgacttttctttaatagtatctatgtaggtggtaatagttacaaagttgaacgttggtgatggatttgaagcttttggccagcaaagacccacatacatccacaggaagagtgtgcattatttattcagcaaatatttattgagcacctattatacgctaggcaccaatctgtgtgcttgtgttaagccagtaaaaagtgagtattccagtgaaaggcactgggagagaaagaattaataaggacatatatactatattattgagtgaaagtcctaggatgcataacaaatcagggcaaagggacagacagtgatggtaggtagtagcagccctcagtgataaggggagatttaagcagagacctgaatgaagtgaaggacaaaacaatgtggataatggagaaagaggaaagaattttggatttttttccagatgggaattgatatttgaggtacacaacaagtctctaacactggattagaggaaattggattaaattaccagagatctcagtggtcttgtaaacatttctttgtcagtgaggtttcctaacgtaatgcataaaataaagacataaaggagcacagcaagtttcaacataagactattcataatgataattaaaattatttctttaagttgggaaacagacttccttgtgcatgtaagtgggggtggggatgggaagtcatttttttcctctaaatttaaaggtaaatattcttttcaaaatttcagagagatgagggaaaatgccctgcttttccaaattcttgcacatgtacacaggacagcgttggacctccaggacctccaggccctgcagtaaggaaattgaaatagatcctctggtttttcctttgaaatctttagagtgattatctatttgccaatatggagtcagtaaaatacttcaattcatccaggttttctaggatagagcaagctaaattgcagaccatctttttagtatatttggacatctgaaatggagtaaatcgggaagaatatttgattgtggcatttgacatatttcttcagccgtgcaagaatgataatattggctagtctttaggagattttttcttaaagatatgaacctggatttccatctgtaattacatgactgaaaattccttacgtctcctgaaagcttcttatatgtttggtataaagccacagctgagaggctgacccaagaacaacttgttgagaacctagaacatgtgcatcttatgtagcagacatatcatgagaataacatatagagagggtaatttacacatgtgatatcataaactctgggtttggaataacttgagtgagaagactatgaccagatttatgcattggttgggagggaaaaccaagaaagtgcaaggcaaaacattgaagattgcagtgatagagttcattgatcaatgtgaaaccccttgagttagtcgatccagtatctgatctgggccagttttgaggatagctctaatctcccttggcttcttttaagaaaatatgtaattaacacaggaggagctcagggattcacagaacatgaaaatttactattcttgggtcatagcaaataatgtagaccgattttaggttaattacaagccagctcctcatatatagaatcaaaatgtcactggggttaccattctttttttctagtaacagtgatttatatttataatcatgaaattatgtcctggatgtgacttagatgtttttgagatgttgggattttttcccctgtagtagtgaggtaacatgcttgaatgtcactgtgatatttatttcctctttgttcagttgtttctgaattcctgttaagtacatgttctaatactctgagcgatttaagatactcttctttttgcccatcattttccccaaggaatgtaattcacataaatccaaagctcatttttctctttattgtacacaagtagtataatgtttgcttttcccaataaacctcaaattttcaaatgaaaatttgaaatttgaaatataattaaagacactcagaatgtacaaagttttgaaattctcttgcctcgcatatttgtatgacatgaaatatttgcttcagtattttgcaagcagctgtagaataataattgtctggaaattgcactttttcttgaaggactttttgtatatcaacttcctcctattttcctatgttcacactactatgtgctctatgtattttagggaggacctggtgctaaaggtcccagaggtgaaagaggtatcagtggggcaattgtaagtatattttagagtgcatttaaattcttatctatatgttgaaatctggttgttcaaattttcacaaagggggtatgtgatcttgagcaagtcagctcaggttcagtgtgcctcaggtaatataattacctctgtcttatctctggatgtcataatgatggattagactagccagagaaagaaatgcataggatgcatgtcatagctgtaacaattacacatggggaagctgcagaagatctttaaggccttggccagaacatggggaagcagagggggtacccacaccccacagggagcagagacccgctagagagctggagcctgttgggagcactactgctgctgcttttttcaccagtctcagaaaaaaaatgctgagtggctgcgtatgtgctcacaaggggtcacctgccccttctgccagctccacactggttttctgtaagacaactcaagcttctcaggggaatattttatgaagataatgtgtagtttttggtcataatataattaatgataaaataaccccattaggaaagggcaagattaggatgctaacccaggcctgatgccaaggttgtgccttttccatctagacagattgtaaaagagctccagcacagggcacctcatccatgggcatcttttctttccttgcttgatttatatatcctttagtcccagaaataagctgaagtctaagagaaatgaggactagcttaaaataaatcaaatccagtgaaacttaagcatttaatctcatataaatctatgaaaattaatatatgaatatattatatgcaatgtattttatttaaaaaatctatttctaataggacttttatggaaatgtaagtgttcttgtaaatttatcgtacttttcaatagtaaagggaagaaattacattaatgaatatattcatagatgtagattcttaaaagtttacaaagattatatgattgatgtcttagagttatgatgacaagtgtctgactaaatgtcagcactgaaaaggtattacattactttgtggttgtctctctcttgtgtattttaggggccccctggtcctcgtggagacataggtcctccaggcccccagggtcctccaggccctcagggacccaatggactctctattccgggagagcaagtaagcacaaagcctttctgtattaaatgagagtggtggataaacatttagttaaatgaatcttttctacattttgccaaatcaaatgttttctcagataattcaacgaggttagtcaccgagatagcagcctctatgatgactgttattttagatacgtaaatagactatgtaataatataaaactgtgtagaaaaaattactgctacttatttgactttattaaacattttcttataagtaaagtagatatcccctatgttaaactatattcttttaaggtaggtataatatcccataattatataaaattaccccataacattgtaagtagaaattataacacagcatttgtagtttaaagagtgagcattaattcaaaaaaggtttattcatctcctttcaaaaatacccttctgtgctcattctgaacgcttacactggatttatgaagtgatgaagatttcataagtgactcatgtcttccttttttgcttaatctctgtgaaacgcctgagaactgttttcccattgctcactctagggtcgccaagggatgaaaggtgatgctggagagccaggacttccaggccgaacagtgagttggtctctaagttgccctgtcatgtgctatttgaaaatttccttttctagtgcctcaaaaggtgaacccagattaagtagcaaagcagaagcctggatatgtgtttcacctcatttccatttcataccctggtcttaaccttcaagttggtgctattcaattcaggtatctgcttgttgactgagcatctactgtatgcttggcaatgtgcttggctctgttctcctgtttctattcagagtctctggaattaaaaaaaaaatttggaaaataacaaagattctctcccacacaggaagtatattataatgtttcacttgtttgtttccttctgtgcagggaaccccaggattacctggcccaccaggaccaatgggacctccaggagacagagtaagttttcttgagcaggctacaatgatgttggaaatgatgtcatatggttgcctattaattaagaacccttcaaaatccagtttgcaaggctggtaatatatcttgtggaaagctgcaaagctgcaaagctaatgtcagtggaccatccaacatcagatcaatctcaaggtctttgaaataaagtggtgggactccaggggagtctttgaaattttaattttcagaaaatttcttaccatatcatattcataaaaagaagtccagaaaaggaattttagctgattaaaaagagattcaagaatctcagcaaattgttttaaatcttaaaattaaaatcttagttgtgaggcagcttttctgtaaccatgagggtagccttgactcccatagcactttctacaaactcaagacatcctgtctacacctttagaactcaaataccacttctaggccttgatggtggggtagacagctggtatttagtagggaatttgcctgttggtagcagctttcaggtttggtcttgacttagcatgaaagcagtacaggaaacccagtcttctctaggataagttaataagaagcatggtgaacatgacctctatgttctgttcatcaataatgtgaaatatttggttccataggagaccacaaatgctttaataaaaagaacccagaaattttaagagtttctcagaacaaaggaactaatgactttccagcatcttatggttccaataatagtctgagagtagtttgtattttgattaatcaatcaagttaaaatatatgactagcagcaggatctgaggaagccagtactataacagctgtcactaaacataaatctatcaaccttaacacctccaagacaccattgggcagagaggtaggccattcagagggagcaaagatttgccctaagataatacaaaatggtagatgatatgccagtgaactttatttgttcccatgcctccttttgagtttcggggagagaaaagagagaggtcaaagagaaaactgtattttctgggatatgggatgtggaggtagttctgacatacacatcttctgactcttttgagactggcactttaggtttttttttgaattcttattttacagtaaaggacaacagtgagagtacatgggtgacaagtcagtcttctttattagaaaataaaccccagaatattgcagctgagaagtggcaatgggctgacttgcttgctgctgctacgaccgaagccttgtttccatcacatccaccccaatgtgggcttcatgcagacacacagcgggttccctagcacacttcccagcaggactatctttctggactggtgctcagacagccatcaccatcaggcagcataattgcatccctgaaaagtaagggactggaagggactgtgctcttccattctcaaattctaatctgtgtccagctttgtggtgaggccaccctgggatgagggcaagagaacttttcaggaaactgttctcccttttccttcacagcctgtgtacctacctactgcttagtaaactaccactaatgcaaaaaggagggtgcatagctggtggggtatcaacaattttagaacattagagagactttgagtatgggaatctcagctgaaacaaaacaaaacaaaacgtgaactcagtggtggaagtgaagagaaggaagcacaagagatcaaggccaagggttgtggtgaggaatgaagacttgttagcaggatcaagtagggagaaacaagatacagagattgtcttcagcagagacgatttttgaaatgaggcacagtgctggtggctattagaaagtaaaaaaagaaccacatatacaggtatctgtacatgtgtatctatgaaaatggccatcagtcttctcagccccctcacttggttagaagtggaaataactgctgtggcttgcagcaaaaaatgaagaataaaataaaattgtggcacaaagttctgcagatggcatagtgggtagcctttttgagtacttcataataaatcttcttcactccaatttacgaatatatttcctctaaaaggaaatggttgatcagaaagttcttagactgactaaaggaggattaattatttagaaatacaatatttacgataaaaaatgaaaaagaacatcctatatagtagttggagaaacttgggtggaagaaattttattcaaattgtccaagcaatattatagggaatttttttcttaagtggcccttagaagtgatattggtgttacatcagataggcttaggatctgttttttgttaatcaggcctagatcttccggaaaacaatctgaaatcttatccctaaaagtttctggaaaaagtttttttttggggaagtggaatatttccaacaaatgtaaaaagaataatttaaacttctatggtaaagtcaatgtactaataaaaagtgtggatagttaattcaggaagagctccaaatggtcaacttttgtgaaaatccaagaatatggatgaaatgattactttcattctctgcggaaaatgagacaaaaatctctgacagaggaatgcaacaactctaaaaaatgacctgactcagaaatcctcggctggatttcagagatctgctgttgcgagtgaatgctaactgggtagcaggatgactcattccaggcagaggtcatttggcactgtacagagagagagaaaaaataacatataaatgtgggcgcacgagccagagatcaagcctgtggggagatgtgctctgttcctgcctggtgaactgatgcttaggcagttctggcctttgtgtgtattgaagagagacagagcactacaaaaattaactgcttattatcaggattgaggatttcctctcttttgagtggagggcagttaagacagctttacctctgtttttttttgaaatagggtcccactgtgtcacccaggctggagtgcagtggtgcgatcacagctcactgcagccctgacctctcgggctcaagtgatccttccaccttagcctcccaagtagctgggaccacaggtgtgtgccaccatgcttggctactttttttctttcactttttttagtgacagggtcttcttatgttgcccaggctggtcttgaactcctgggcttaagcaatcctcctgccttggcctcccaaagtgctgggattgcaggcatgagccattgcatccagcccagctttgcctcttttgggagaggaagaaagaaattcaccaggagtggagacataaatagtcctgctctaactgtctgacagttgctcaggaaatgaggaagggagttttctaattaggtggtcaggattttccatatagacttctctatgtctgtatgtatggcagggtatgaagacttgagagcatgtgttaaaataattttattatttatgtttaatgtatattcttagataagggcgaatttaaatgtgtagtaaactttcatgttaagtatttactacagagcttaatatttgcatatttggtaaaggaatgttttataaaatttgatgattccatcttaaggaaattttaggctttagaacatgatgtattgaccagtacatattataaatattctattaaatatatggttaaaatatctggaagctgtggtaaaagcaatagggagaaattcttattgtttttttggggctaaagggtgctgatatgatggaagagaatgaaggtgcagagaacgcaccaaagggaaaaatgaatttctaagctgagagtccaattcccagcagacaaaggaagactctgccaccatagtatcatcttttatgataccgcttgcttttctcagtaactttcctttcctctcacctgcatccttcctgggccagcctgtggacattgacttttccatagaatgggtaaatcttcctttagacttctttatgctattacaaaaacaaaaaataatatcttcatgaagggaatctgccttcctgggagaagattagtttggctcttaaaattgttttatttataactatacaagtgaatgagcatagaaattaattattcagtaaaaggcataagttaaactgaaaagattttttaattttttaattttattttttttgctgtttgtctttttattgaaagcttacctcccaaacagcatgttgggctaaatccttctcttcagccttcagctttagcaacctgtttagcatcttttcttttcacttgcttatgacctccctaactgtaattactttcatttttacaatagggcttcactggaaaagacggtgcaatgggacccaggggcccaccagggccgccggtaagaactaaatgtgtctcatttttgtgcccttcactcccaccctctcacctcattttgctagtaacctgcctttgaagcacattccatctgtgctgtggagtatatcattgagggaactgtgtttttatttacctacatcaaaatgtgctagagaaaacagacgtgttaaaatacagaatctttcagtttaatcaagttacacttgagaaaaagaaaaagaaatccctaactaactggctaccagctggttggtgcctcagtttcttcatccctacattaagtggttgggttttataacctcggtggttcggttatttcctgttacagaatttttttttttttttttttttttttgagacggagtctcgctctgtcgcccaggctggagtgcagtggcgggatctcggctcactgcaagctccgcctcccgggttcacgccattctcctgcctcagcctcccgagtagctgggactacaggcgcccgccactacgcccggctaattttttgtatttttagtagagacggggtttcacccttttagccgggatggtctcgatctcctgacctcgtgatctgccggcctcggcctcccaaagtgctgggattacaggcgtgagccaccgcgcccggcccctgttacagaattttaagaatctgtgcctataacatttaaatttcaagaactttattattgaacagccatcagttgttctgaggaagtcagttttatctacaactaaaagggtcttcaacgtaagatattgggaaaatactgaaactaatgattttgaaactggcatctgtatacttgcatccaggtgagatcgcagtaaaattgtttgaggtgatggatagcctccatgtctgtgtggcaggatactcaagagcatatgttaaaataattttattatttatgtttaaaatatagatctttaggtaatgggggatttaaatgcacagcaaactttcatgttaagtatttactatagagattaacatttgcataattaatggagtaaaggattgcttgacaaaatctgaacattccattttaagaaaattttaggctttagaacatgacatattggccagtacatattataaacattctattaaatatagggccaaaatgtctggaagctgtggtaaaagcaacagggagaaaatcttatgattttggtggggttaagggtgctgacatgatggaagggaatgaaagtgtggaaaatgctccaaagggaaaaatgaatttctaagctgagagtgcaattcccagcagacaagggaagactctgccaccatggtgcccaacttagcacaaaactggccaccttcttaattcttctccagcctaaattttcaacctctgtgttttgaaagattgtctggtcttgtagtaggaaacttaaaaaaaaagggaattgctttctgcacatccactttgtaaccaatttactaggatcatagtcttaaattgtgaaactgattatatacatatgcgtgtatttttcaactggtctcaaaatatattttaaaactatatagtccataaggattgcactgtagttgtcaagagttttttatttcatgttatcttttttttttttttttttttttttttttgagacggagtctcgctctgtcgcccaggccggactgcggactgcagtggcgcaatctcggctcactgcaagctccgcttcctgggttcacgccattctcctgcctcagcctcccgagtagctgggactacaggcgcccgccaccgcgcctggctaattttttgtatttttagtagagacggggtttcaccttgttagccaggatggtctcgatctcctgacctcatgatccacccgcctcggcctcccaaagtgctgggattacaggcgtgagccaccgcgcccggccctatttcatgttatcttaaaatttggttttatttttcctgaatgtgtaattatgagttgtttcatttaaacgcgtttaaaacaggctgtattcatttactttagatgggattttccctttgtcataacagtccccttccctttccatgtgttgtagggaagcccaggctccccaggagtcacaggaccaagtgggaagccaggaaaacctggagatcatggcagaccagtaagcggacagcttgcatgtctactgacagtggtttcaccgtggaaataaataatgagaactgcaaagctttgttatatttaggttatctctgctgtaatgtgtttgaagcatttgttgaaaccatgctaaactcatggatttgacttggtactagttcaaaatttttctctctgggttgttataatattctgggatgaaaattgtggttactgggtttctttaaaaggagaatgggattatgagccaagacacatatttctgcgctgtataaacactcagagctgggtcagcaaaatgattctttttacttaggagtggtatgctgcttaagatggaaaaatacatgacgatggtgcacagcgcctccatccctagcttgctaatgttaacccttttgtggcattatccagctttccatttgttcttttgtatctagttgaggaggctagaacatcagaaccagaattaaaattatttattaactttatcattttacttttttaatactgtcctgccccaatttataccccatttaactttctcttatgcagatattttggttaaaataatagttgagatagtagtacacatatttagtatttccaaattagtatctccaaaactgaatttgaagtttctaaaatatacacaaatatttgtaatgagtgttgggcttcatattttttacaagcttttcctttttttgtatttatgaagtgtgaatttatttaagcaattttttttgtccaaatagcatcctgaaatataaaaatttatcttaaagacaattaagtccaactattagcagtgacaaaaatttgtcagggctcttctctggacagaatttctcctttttaaagcattgttcaaattttacaaacccgagttaaaaaaaaagtaatttcagagagacttagaattggacatttatgtgatatggcttgccttgtatgattcataaaattaagcaggcaacataaagatagaaggactcctgatatattaggttaaaaagaatgacaaaaaccataattacgtttgcaccaacctaaatactttaaaaactgcgtgtaccctagcatgtgactttagtactctcttttcctcaatggatcatggtagaaactttgcaagtgcaattataagtatatgaaacttttctacccattcagcatttcattttgttttactatgacctcagtagtgtcttatataagaatattactcatataattgatggctgtagctagaagcctaaaagaaatgtctacagctattacttgaaatatgatctctaaatatcggcaataaagatgatttctacaaatcatgaacaataggacaatctcagagtgccaataaattaaaaaaaatcagaacaatctcaaaatagcagtaaatgtaaaaaatcctgcatttgtaaaatgctccaaatacaatatgtgtttccacaaaaatccaatacttttggcaaagaaatagataactctagtttttcttacgataattataatttggtatacatttatttagaccccagcacttccccttttctccttcattttcctcgtccttcaaaagtagcaaatttcctctttttttcttccctattttatcttaccttcctctaattaatgaaaccaaacatagcatataggtatatataggtcttagcagagagcttggcttaatcattgttagcttatgtcattagctattataatcagttgatatcttcttgctaacttatagtacctgatattctataggagatgtttccatgagatgttcatagaatacttcattagtaaacacatatttgtttagtgcctacaatatgctagccagtgttctagggtcaggtgatataacagcaaacaagacaaaattcttgccttcatagacattctggggggtatatagacaaaaccatgtaaatataggttcccgtgataatgagtgttatgaagaagaaacagagtaaggggttagagaatgattgtgctggtgggaaggcagctattttggatacagtcatctaggaacctctctgacaaggtgacattgggatgaaatgagggagaaagctatttgatctatggaaagagggttccaggcagaggaaacagcatgaatgaaagccttggctgaggaacgagactgacatgtgaaaggaacatccaacaggtctgggtaccaaagtgaagggagttaaatggagagggataaaatatgaggtcagatagctaggcatagatgatcatatggaccatgtagcccatgataaggaattattattttcctctaaatctgatgggaatgggatgggtggctcttagagccaaaggagttacatgatctaatttttctttaaaaaatatcattctggtttttgtgtggagaatagactataatgtagcaaaatggggagaagggagagcagttaggagggtattggagtagtttcaggcaagagtcttggtttggactgcagtggtttccatggggatggtgagaagtgatttgtcaatgatttagatgttccttcggtgatagcagttggcagcctggaaatatataactgaaagacaaaaacttgttgcactctaaggaaaacttttccaatatctcttatggtgagaggcttatgacagtgtagggacaaatattctatgcttgtatttagatgtaggatcagattgagttatttaataagagaaaaacccagtttcttttttttaattgtagaatatttttattattatactttaagttctggggtacatgtgcagaatatgcaggtttgttacataggtatacacgtgctatggtggtttgctgcacccatcaacccatcacctacattaggtatatttcctaatgttatccctcccctagcccctgaccccccaacaggcctgtgtgatgtttccctccctgtgtccatgtgttctcattgttcaactcccaattatgagtgagaacatgcagtgttaggttttctgttcttgtgatagtttgccgagaatgatggtttccagcttcaacccagtttcttttatctcaaatgtacaaagaatcactggatgaagttaagggatatatattgagctaagctgctgacaacagcctgctggttcttagtgagactgaatggagactaatctcatggacgttccacaataagcagctcagataaccaactatgatgatataaagcaaagtatggcggtacaagggcaatcttcatatgtattttagttccatatgtatcatgaattgcattgtaaaaagtgtgcatggtccataacttttacaattgtgaccacaaaattcacatctgtgcactattttggaggacatgtgcttcagagagagagagagaaagagagagagagagagagattagattcctttttatagaaaagcagaatgtgagtaacatggatataaatgtgatgtgtcattttgctaatgctttagaaaacagaacttgttctcgttcatcattatgtctattcatgcatcattttagagtatgtttgtcagtttctaatgtatgtaattcatatttttcagggtccatctgggttgaaaggagaaaaaggtgatagggtatgtatttttaaaaaatcttacgtttattttgtgtgttaaacattgaagcctaaaactatagaactaatatgctaatcattctcattaattcaacaagggagacattgcttcccagaacatgatgcgagcagttgcaagacaagtctgtgaacaattgataagtggtaaaatttcttttctttttactgtatgaattgttttaaaattaattgcaggaaaatgcagagtttgagtcatgaagtttctaagagatagatttctctttcatttcatttgataagcttttgttcttatacattgtcagttttgtatctgattagatgaagttaatgatattttaaagattgtcactaagataaaataataacccaaggtaaaataatagcagtaaacttaagtactaagacatcagatattttaagttaagatctttaagtcattttatgaccttaaggaagggggcccaccaagatgaatttgatcagtgaaagttgattttggtaggaaactctctcttgcctgtttttcacaggctcttcttattccataaggcctgttaagtaatgaagctcagtacctgcagactggtgtgggccttaaacccataactcactcttagagaagtcttaatcaatgttttccaaagtgcggtactgaggaacacctgccttagaatcacttatgttgcttgttagaagtgagttcctgcaccatgccctaagcttagtgaatcattgactttggagataaggcccagaaatacagatttttcaaggtgccccacaggcaattccagtttgcactgaaacctgattatcattgccttagatatacaaaaaattgtagaattatctaattataaaaaaggttttcttttgagtgatgtcacctggtaaatctcaagactttatttcagagccatattaaactttaacaactcttttatatttgtagtaatgtttgtggcttgtaggtcagcattttgtggaaacagttatttatcagggaccattttgtcctcgatgattagactgtcttaattttatttttaggattctaattagattgtttccttagaggggttgcagaatggagatggatttcactagacactaagagaaaacagtttcactctctcatccgtcctttattgggtttcttactaacaagccttatttctgcttgtaggtcagatgaacagattcaatcagatgctgaatcagattccaaatgattaccagtccagtcgcaaccagccaggcccgccgggtccaccgggacctcctggtagcgcaggagccagaggagaacctgggcctggggggcggccaggcttcccgggcacaccagggatgcagggaccccctggggaacgaggtaggcatttctggcttctgtattgggataaaggaaggaatttgcaaatgtaggagttgggacaggttgaaggcatctgaaaggtgacctaggcaaactgctttccctggtcttgtttggacagcctcagaagagctgttaggcaactcataggccatagagatccatgtcttagaaaaatggtatgtttttatcagatctcagtaaagataatgctattttctgacttttgttgtttttaatgggaaaaactctatcttggcaaactaaatcagctacccaaatcttattactctctgtgactgcggcaagagtcgagcagcaactgaatgttcttaggcagccctagagttttagatccaacttattttggttcctttattcagggtctggcactggtcttgtatgtttgtttggctctaatttcatggtatagataactgcagttgaaggaaaaggagaaaaacaggactatttgattccagatatttcaggattctgggtatccacttttgtcaaaggagtacttaatactctagagaaaacctacatatttctataattctactggtttggctgctgtactaatagggctactaaagataaaatacctttaatatgtttttcaatgagatattataacaatttcttcaggattactgttcctaattactatttaaaaatatattagacatgtttgtttgcttcaaataatttttcccctgccttgtagccaaattttttcttggccataaatctagaattacacaaatgtctagaaagaacttggcttaaagagtgaacttctgtgaaaaattaggttctgctttcactaaggaaatgaattacttgaatcaaatattatcagttaagatgaaaattacatgcttccagataatttttcccctgtgctttctctttttctccctccttaggtttgccaggagagaaaggtgaaaggggtactggatcttcaggacctcgggggctgcctggccccccaggtaggtttgctagtattttaaacaggcaaagactataaataccgagagggcacaccatcccgaagagattcacaacttcatcctgttattcttttttttgtttttgagacggagtcttgctctgtcacccaggctggagtgcagtggcgcgatcttggctcactgcaagctccacctcctgggttcacgccattcttctgcctcagcctcccgagtagctgggactacaggcgcccgccaccacgcctggctaattttttttaatttttagtagagacggggttttgccgtgttagccaggatggtctcgatctcctgacctcatgatcttcccactttggccccaaagtgctgggattacagaagtgagccaccgctcccagccaacttcatcctgttattatagcataaagcattcttattaccatggcatatgttttagcaagaagttcaacctccataacttcattttcatgttccctttgttaaaaaaatgaaaagtttctattaggcattaactataacattaatatatgatgaaatgaattttagtgacacaaagggttactatttcccctttctgtctccttccttccttcccttttccttccttccttccttcctcccttcctatttgttttttttttggcctcatagactttaaagatggttatatttcctgttttttccagtagtcttcaatatggggctattagactgagaaaacatagcctcactaaaagggcctgagatattggtaaatttcattcactgctctcccaaagcatttttatattttggataggactactacatgtctgtctgatgcattttgtttactaggttgtaaatgatttcttttttcattataaggcacatgatacccttgcaaccaaggacagccctatggctaaatctttccatttatgttaactataactattgatccagaaacaatattgctttgcataggctggaggtgtggagcagacgctgccttcttttgatggcagctcaatgtagctgcttaacagagctgtttccttcaggtgctcttttctctgtgagagtgggagcaaaccaaagaactcactgatatctctggtttggctgaatttttgctaaatcaggttttctggaataaaatacttctggcattaactctgatgagtcactggtaagaaagttccatcacaccttggttcatattgggtatttcttaaggaaacattttcttaccatacaatagtaaattgtctaattttgagacagtggaggtgccacttaaagtattggtggctacctcaggagttgtatttgacaagaggggaaatatatttgttttaactccacactaggtccacaaggagaatccagaacaggtccaccagggtccacaggttcaagaggtccccctggcccccctggccgtcctggaaactcaggtatccgaggacccccaggtcctcctggatactgtgattcttctcagtgtgccagcatcccatacaacgggcaaggctatccaggtacgttgttgccattgtaggaaccccaactcacctgaagtaaagaactttacggaaatgaagttccttaggattgaaggaaggctgatttgaagatgtcttgaagataacaactctttcagttctgattatataataatagtgtttgctatcatagcacacaacattatttcactgttaggattgaattattttcttttttccccatgtttctgcatttaccaaatcacatcataaacctccccttacttctcttgggacttcaaagcatgctagtaattgactttttttttttcttttccccaagattgggaacagggatttgttaaatacaactgtaaaatgccaagaatatgtatttaaaaattgttttgggaatctaatttatgggtaaactatgtaataatatggtgtagacaactgaacatagttaactgtcccatactagccatggaattaatatttataaaatctgggacttaataattgtttttaaaggatttttaatgaaattctagtgtttgacaattgtagagggcagaagtctcctatacttgattttgtgggatgtgaggactgggtagatatgccaatctggaaataagatagtcatgctgtggtcaatggcgaccatttcattactgcaccctcaagcatcttgcaaatttaaaaaattatactgctgtttgatatgatttgctactttcaaatagtgcatgagtagttgaatatctaaatatctatatatctatatatttatatgcataattacatatgaccaaaagtaataacaaatcttaatgtatatttccatgcaacccattcaaaaaattgcaatttaattctttataaatttaaattaccacctccttatgggatgtgagaataactaaaaatatatggatatatatatatatatatatatatactttaaccattacatacgtagatggatgtgtatttatattttttacttagtcattcaacttttaaaaactatcatctttgacctgtttcaggttccggctaacacattttctaagtcgccagtgctgcttacagtttgaatacatgaaaatcctgtttctgagatgtttgcgcacgtgcttattaggaaatgagtctgtatggaaatctcaccacagataatggttaacgaaccgggtcgacatcacaaaggagggtggagactctttttactaacttgaatgagacaaaagcagtggtgtcagtttataatcctgatgcatttcagtaataatgtagaaaaacattattttaaaaaagttccaacacacagccatgaggagcctcagttttgaaagaggtgcataataaaactactaaccagaggagtctatgccattttaagaaaaacaattaacctggttaaagagaaatgtcttatgtaaataataaactaattgtggcttgtaaatgatttgtatgtgatcctgtcgactaaaatcacttaacaattctacaataagcttctgcatcaaagcctgccgcttgctctatgccggaataacaccaaatggaatctcctcatctcttgcttgttagcgatgtgtctgattcagggcatctgtctttttgttacttttttgtccgtgtcctctcatttgggttttgtaactgcaattttcaaaccaaagtttaaaatcaccttttcttcctgttttgctgtagtcactggtgttcctcacccaccagctgtaactcagtttgtgtgaggtacagccacagaagatgtcatgtactgtatattacctggtgatagttgcttttcaccccccgagttcagtttctaggagccaatgaaacttcccctcacctcctcatctttccaagttgttctttgaattgaggagtttgaaggcataaacagttacttggggatttgcgaaaatcctacttagttactgcgtttacagttctttggcccagtctctgacccttcccaagtatttgtgcaatgattgtgtttactgctggatttttgaaggtttttttttttaagaaagtgccatttcattatttgattatcaccaaattatctggaaataattgggacattgtaacttatctatttatagttatgagattaagactggagtgccatcaccgcgggtgatgatttagcttttgctgtgtgtgtgtgtgtgtgccttccaaatcatgccataattgtaatgttgaatcggacagagccttacgtgcccgagggcggggcctacctgcctgagcgcgagcccttcatcgtgccggtggagcccgagcggacagcggaatacgaggactacggcgcagacgagcctgcagaggagcctcctgagccccaccggcgctggcggcgcgccctgccccacggacccgggcagtgaaccagagatcacgcgccgcgccgcgaggcttgggggaggtgttgaaattctcatttacaggtcagatagagcagtgtacgtcttttctgaggtgtttcttccagcgttgctcatccaggagtaccctttctgattgtagagaaccttgtttctgcaggaagcctagctccaagcacgcagtctgtagacatttttgcctttgcccttgaaatgcttgcaaaatactttgttaacaaaagctgcaaagagagaacatgccgtgtgcctttagttagcacagcgggcagcctcagtgaaactcttaggttaagcagttaagtcctggaacccagagctgctgtgtatttcgagcgggcagtttatcttttgctatacttattttcaattcaattacaccacgattcaaataattcccctcctaaaaccaaaaaggagggaaacgtcaactccattgcaattacttatcttcctcttctatctctgttatacgccggggcatagaatgctcgtatacatctctttaacaaccacaaaccttaagccatgtagatgaagttagtgcatcaacgggatacagttccatattgccttaaacctccttgttttagacacactaacatttataccaaattgcagattattctgcagagagggaattgcatgtttgtgttgtatatttagtatgaacttttttcagaatataatatttcttagttatcaaaagtagttggaaaacatttgcaagactatgaacatagaattgctgcttttatattttaactgcagattgtgaatttcactgccttatattatttatttctgaaacaaaagaggcatttttcaataaaactactgaaaatttga

SEQ ID NO: 85 - DNA, 39142 bp, Homo sapiens
agagtgatctcttggcaatagttaagcaatcaaacggagctatagtaatggcttataaccaaagtacacaatcagtgtcaaaaagaaagacagggatgtgaacacacaggttcccaggagacgcggagccagaacttagcatgggatcccagccctggtgagtcagagcccatgagcatgccctggcaggtggcccgtttgattctcccggctcacaggttgcatgctctgcctgtgaccctctgcctacaagactcagcagatgagcaaatgaaggcccaatcaaacaagaactaacaagaaatgcaatataacttttaaaattagaaatctcgaaatgcatcccagcactttgggaggccgaggtaggtagatcacttgagaccaggagtttgagaccagcctggccaacatggtgaaactccatctctactaaaaatacaaaaattagccaggtgtggtggtgggtgcatgtaaaactcaggagactgaggcaggagaatcgcttgaacctgggaggcagaggttacggtgagccgagatcgtggcactgcactccagcctgggcgacagagctgtcgagagaaagaaagaaagagagaaagagaaagaaataaaaagtgccaactttacagagagctctgagatgatggttttttataccttttaaaaatttccttgctttgcttgttacttatcagcatttctcaactttttttcagtctgtgactttggtgggatctgtctccccactctttgcctgtcctgctctgaccatcccatctgacccaggtatgaacacagagtccatccacgcagtcctccccaagaggaacttggaggaagtaggggccatggtaagaaattacagatgtctgtggggcaaataaaatactgtttgcacaaaggcaattgctttggccaatcaagtgcgaagtcctaactttgtagatgtttcctaatgtgagaagactgcgaagaattgctcaaaagagcaacaaaaaacatctaaactttaaaacatcaactactgctatgaaccagaatctatccatatgtccggaaatttaaatatagccaagaggacgctctctgtgtcagtcaaatattgcaccttttgtgacctcttgttacctgctgcccaacacacacacacactcactcaaaaatcttaatagaatttccattttgtggagaacaggtggaaaggaagggagtcaagaatgctgcgtcagcttccagccatagccctttccaccctatctgcaggttcctggaaagaatgatagtgggaagccctgatgctgggccctaaatctaactctgctcagaggttaggctctggaacatcatcctgtttcattttatacaggtgtgcacactctttactgcattgtatttcttttgcctctatttccatatttagcctttagttagaggttctgagcaaaacttccatttcatttgcagtcattccattgtaaagaattagtgaaaatataccatttagctataaatatttgagctttcgaattcacatgattaataaaaggaaggtaagtaaatgtgcaagaaagttattgtccaggcccagtgaactaagaaaactctgaaggtagagggcaagatggaaaacttctagaatgtagcctcttataaaaaaggatctgctataataagaaagagtgtgttattttatatatctttttttaagagtgtgtttttatataggtgagctgaggtatatatctcattacatttatgtgaatattctctatgagagcatgttctaaacatttttcaggattttcccatatagactaaaatcagagaactttgctgctgtttatgtgcatgaaactttaatttgttttataaatttcttgtgagaataggaatagcctccttactgacataaggtctccaagcctcaatcaattcataagaatgtttcagagcctactctatgcctggccctgtagtaagtctgtagatatttctgtttaaatcatatcgtctttaatttaatgaatggaaagttattggaagatgtaatgcactgaaaaggaagtaatatcaggtacgtggtgttcttgtccaaaacacataacctgaatctacatcatacaactccaaaatggggggcactctattaaaaactagcctatgttcttcaaaaatattaatgtcatgaaagacaaagttaggaatgttccagattaaagaagacgaaagagacatgacaacaatatataaagcatgatcctcgattggatcccgaattagagggggaatatagggctgtaaaggatgttattgggataattggcaaaatttggggattagatagtagtattgtattgatgtattgatgttacatttcatgttttgtattgatgttaaatttcatgattttgataactgcactgtacttacattaagagaatgccattgatctctggaaatagcagctgaagaaaataagagtaaaggagtatgatgtctgcaacttatagttcattataaaactagtaagtatatatgcttactacacacacatatgtaaattagatatcgtgcaaatgtggcaaaattttaacattggtaaatctgggtaaaggatacatgatagttcttgtactattcttttttttttttttttcgagacggagtttcactctgtcacccaggctggagggcagcagtgaacctcagcctcccgggctcaagcaattctcctacctcagcctcttgagtagctgggattacaggcacccaccaccatgccaactaatttttgtatttttagtagagacagagttttaccatgttggtcaggctggtctcaaactactgacctcgtgatcctcctgcctcaacctcccaaagtgctgggattacaggcataagccaccactcccggccctcttgtactatttttgtaactcttctgtatgtttgaaattatttcaaaataaaattaaattttataaaattgttggtacatacactaaacttgtcctgaaattagttgccttgtgagattttactcttggctaacacttaaacattatcttgagcaaggcactgatgactaggttgagatcaaaaagttttacaaccaagttttgcaagatttatttctactttgaaaagaaagctggagacggacagtcgggtgtggggagtggtcattaaatcaattatgtgtaatgggaactcggcctctacatttccacttctttattgccactcctgggaaatcggtcagagaaaaaaatacgagatgcacatgcaaacatcttccctgtgatactcactttccataaaaatcaggcacaaccctgtacccttgcccactggagtttgtcaccctcagggctggcaggcctcagcactctcctgggccagggctcccacgccgtttcccactgagagaggcccaagctgtggctcctccagaagccttttgtgtccctccagaactatgccgtccaatacagtagccactggcacatgtggctgcgagctcctgcgatgagctggtctgaactgacatgtgctgtcagtgcaaaacccacactgggtttcaaagactttgcacaaaaaaaaaaaataaaagatctcaataatttcatatagtgattacatattgaaattacgatgttttaaatatattgaattgaataaagtacattatttaaataatttcaactgctgctttttactttttgtttaatgtggctaccaggaaatttcatatcattcacgtttcacttccactacaaaatagtaaaaaaaaaaaaaaaatcatatacgtggttcacattatgtttgtattaagcagacctacccagatgcagatgaaactgcacagcccctttctcacgccctggctgcacgctctgtcatgctctgagagcatctccccctgcttctccagctggctgctgcctcttacagcactacaggctccacaaagccaggagccttgttctccttggtccctcagtttccagcattgtgcctgccatagctgatcaagggtgttgcttagccaatttaactcctcatttaagaactaggccgggcatggtggctcacagctgtaatcccagggctttgggaggctgaggcaggaagattgcttgaggctaggagtttgagaccagcttaggcaagatagtgaggcctcgtctctataaaaaaaagaaaaaattagcaaggcatgttggcctacacctgtagtcccagccgcttgggagacttgagcccaggagctggaggctgcagtgagccatgatcgtgccactgcactccaacctgggcaacagagcgagaccttgtctctaaagcaaaaacgaaataaaccatatatgtatatatgattttatagtaactaagtcaagttatacttcttccataaagacctctctgtatcctccatctctctgcactcctgtagttctgtctttatgacttagtttgactgccacatgatgtttaggattcatttttaaatactccagtagataatgttactgcagaaggtggacaaaacaagcttggccatatattgatgatcactgaagtaggtgaggagtacatggaagttccttatgttagtctatttttgtgtatgtttggaaattcctataataaaaaatgtaaataatgtctcatactatgcctactttgagggttaatgtctcatcttcacaatgagtgcctatgctcctaagattgttgttcatgacttgtagatgatggctactgtagaacagaggacctacatcggtacttgctgaattaaactctatcttaggtgccaaaaattccattgagaaaagctggatttaggtgtaagaataaggatacaaggtgctattctagcttttgtttcctggcctttatcctacggtcaaccccctttttgatttctgctctagcttcttctctcatgggcttatgattaatcttcagtgaatgcctgcagtgcccctgctccagtgttctgcggcatttctggatagcccatagttatcataaaactaagaaccatctgggtgtggtggcgcatgcatctaatgccagctataagggaggctgtagcagaggatcgcttgagcccaggactcccaggagttcaaggccaggctgggcagggtagcaacatcccatctctaagttaattaattaactggaagccaagtttgcattcagatttctatgttggtccctcccttttttcttactccatagatcccattctgcttctctcactatgtctccctgttctatgggtactaaaggtagaaaagaaaagagtacatttgccattgctttcacatctgcacaataagtgttcatgtcttactttccttctatactgtaattcagagaaagtggtctaaaaacaatactaggatgaaatattgtgatcatccacatttttctttttctttctttctttttttttttttttttgatatggagtctcgctttgtttcccaggctggagttcagtggctcaatctcggctcactgcaacctctgcctcccagcttcaagcactcctgcctcagcctcccaagtatctgggattacaggtgcctgccaccacacccagctaatttttgtatttttaatagaaatggagtttcaccatgttggccaggctggtctcaagctcctgaactcagatctgcccaccttggccttccaaagtgctgggattacaagcgtgagccactgcgcccggccatcatccacatttttctatacgtactgctctttgccatttcaaatggagccactaattccatgagaagagtccttttttaaaaaaaatgtttgtagccagcactccaagaagaaaacccctttgcctgcatccagtatcaaattcctccaggtgaaaaaacaggctaaaaacacagtagccattgtcattgcaaaggtgactgaaaaggatgcactaacctttgtgatgttttttgttttttttttttgagacagagtctcactttgtcacccaggctggagtgcagtggctctattgcagcttactgcagccatgacctctgggctccattgattctcccacctcagcctcccgagtagctgggactataggcatccactactatgcctggctaattttctttctttttttttttttttgtagagatgggggtctcactatgttacccaggctggtcttgaactcctgaacttaagcgatcctcccgcctccacctctcaaagtgctggaattacagggatgagccactgcacctggcctgtgattcgctttcttttctttttccaaaaagccagggaaacacattttggtgggagagtaatttgaaagcttagtaaacctggaaacaagggattttgattacccattcatgtagagaatacccagacaggagagtccgaagaactatacacaaagcagaagtctctgagtcattggctaatgcttaaatctgaaatccatgactctgattatgacatgtaaaaacgcccacattgggacagggcagtcacatgagctgtctctctttttgaactgattcctctacctgtagtttgttcttgcctttctgttctgccaaatatcaaagctttgtttcaacaagtctgtaacctgtgagaggtactttccatcactgcttccatcacatgctttctttaaaaatagaatttgttgagctggtgcaatggtgtgcacctgaaatcccagcgacttgagaggctgaagagggggaattgcttgagcccaggagttcgagtccagcctgggcaacatagtgagacctcatctctaaaaataaaaattaaaaaaaattgtttttaccatgtcgtctgctgtataactgtgctagacagaataatggtccccgaagacttccacatcctaacccccaggacctgtaaatgtgttatatggcaaggagcagatgaaggttgctaatccgctggacttaaggcaaggagatgatttcagattatctaggtgggctcagtataatcacaagggtccttgtgagtgggagagggagacgtgggaatcagtgccagagggctgccagagacagaggggccaatgagacaggaaatgtgggcagcccctagaagctggaaaggcaaggaaatcaattctgccctagagccgccctgccaacactgtgatgttagttcagtgaggccatttcacacttcggcttccagaaatgtaagatcataaatttgtgttgttttcagactccaagtttctgaccatgtgttgggagaaaaggatcttaactaatttttatgatcttgcttacaaacaccagtttaaattgagcaattcctaaaattaaagatgttaattcctttttttctttccctgaaaaactaaggaaaaacattttggtaggagagtaatttcaaagcttagtaaatctggagacagttcaaataccagtttaaactgagcagttcctaaaattaaagatgtgaattccttggcagcctgccgggattcctgggtgtgcctgctgcctgccatttcgaaggtctcctttggggtggctgcctcagtcctcacagctcaagcatcgctcctcaagtcgggactgtggccaccaggaggagtgtcagaagccaagagaaggcaatttggggcatttctcaaaagttgactattctggtcgggcgcggtggctcacgcctgtaatcccagcactttgggaggccgagacgggcggatcacgaggtcaggagatcgagaccattctggctaacacggtgaaaccccgtcgctactaaaaatacaaaaaattagccgggcgaggtggtggtcgcctgtagccccagctacgcgggaggctgaggcaggagaatggcgtgaaccctggggggcggagcctgcagtgagccgagatcgcgccactgcactccagcctgggcgacagcgagactccgcctcaaaaaaaaaaaaaaaaaaaaaaaaaaaagttgactattctttgctttcctccacatcatttccgaacagagtaattgtatctgtaattccagataattgagatgtttcccttttcatttctcaattgccttaaggcgagttgattagcaaccttcatccccccagccatataatatatttaccagacctggcaattaggatctgaacggaacaatttttctttcttttcttttttcttttcttttcttttcttgtcttttctttctttctttctttctttctttctttctttctttctttctttctttctctttctttctttcctttctttctctttctttccttccttctttctttcttttctttctttttctttctttctttcttaagagatgaagtctcactacattgcccaggctggactcaaactcctgggcttaagcaatcttcccgcttcagcctctgaagtcactgggacttcaggtacacatcagtacaccagctcaaaaaattatttcaacaaaatatttcaaactttctttacagtataattttatctttccaaaacaaacaaacaggcttgagaatattctttacccaaaatggccctgtctctgagtcctacatagagttaactactttatatattatcaaccattgattatcaagaaacagattatccaacttgtagttctttggaatgaagatctttctcttgttctcttattcacctctgtccagctgcctacattttgactcttgtcctatcagtgcctcttctctttgatggtgcagggaaggaaaaaagacataaaagttgatttgatcattgtgtctccctaaacaaaacgaaggttttgttacagaagaatttaacacttccaatttatttagagacggggtggctaatctggctagaaatatgagccagaactgtgtctgcaacaaaggacaaaaatatctttaaaaatgttaatagtagcttttccttaaattgaaaaggtgtttttttttaattgtaaaagttatgtgtttgtcataaaaagcaaatagtgctgtaggcagctgaggtgggaagatcacttgaggccaggagttcaagaccagcctgggcagcatagtgagatttttgtctctacaaaaaataaaaagcaaataaaaaattagccgagtgtggtggtgtgtgcctgtagtcctacctacttggaaggctgaggtgggaggatcacttgagcctaggagttcaaggctgcaatgagctataatcatgccactgcactccggcctgggcaacagagtgagagcctgtctctaaaaaaaaaaaaaaaaaaagtttttaagtaatttaaaaagcaaataactatatacattattcgctttacattacatgaaactaataagtatttccattattcctttattcatcaatatttgaaaattgtttcagtcatgaataatgtgttcctttcgttgttttccccttcatatttgctgcaaaggctgtaaaaggcactctacagagttgtttgccgccttagggatggaagtcagccactcctgctgtatggattttagtttcataggctatttccattcctccttgacacactgaaccataaatcaataccccaagttttaccctcacctgcaaccaaggtttctactgcactgaaaatggccatgtgaatgtgagtttgagaaaggtcacatatggtaaagttttcatgttgccacattttctgcatactctgtaaccaggaatgatttgactgtataaatttatcttacagacacacttgtttgtacatttaatgcctgctttctataatatgaaaaaatacacagaacgttttatgcaattggctctgagtaatgcaacacataaatgctttgagagcagttaccaaaaattatgcaggttattacaaaagttatatggaattgcacagatattctaaatgtgcttttgagtaaatttctcagctaccagaggcctgggcagctgtttccagcacatcctggcacaacattcatgttatcatccacttatgtattccacaatttcaaatgattgataagacacctcccccatctttgcttcctcttggaggaaaaaaatatacaagcaatcacgagcacaggagcaggtggacaactacatcttaggaaagggtgcgtaactgtgaactctaaacgtgagctgggtgcctgatgcagtataggaaccacagtaagtcgataatcagtgaggctggaggattgaaattttatttggtaaagaatattgagccaggcgcggtggctcatgcctgtaatcccagcactttgggaagccgaggcgggcagatcacaaggtcaggagatcgagaccagcctggccaacatagtgaaacctgcctctactaaaaatacaaaaaattagccgggcatggtggcgggcacctgtaattccagctactcaggaggctgaggcaggagaatggcttgaacctgggaggtggaagttgcagtgagctgagatcgtgccattgcactccagcctgggagacagtgtgagactccatctcaaaaaaaaaaaatgaatattgaaatagagtctataggaaaaaaactccttgaatctagtaaatgtggaatcacaaaattgaaataatgtgcatctgaaaagtgaataaatagatgccaagaaggagtgagtcataagcacatgagttgtaagaggttgaacttgagagaccagatcaggcagtgccgcttaataccatcacatgatcctccccgaggccctgtatttaattaaaatagagagggaggcaccacagatgccagaagaacactgttgctcttggtggacgggcccagaggaattcagagttaaaccttgagtgcctgcgtccgtgagaattcagcatggaatgtctctactatttcctgggatttctgctcctggctgcaagattgccacttgatgccgccaaacgtgagtaacccttaatttctatgtttaacccattctctggccattggctgaaatgatggctaataatatcctctgaactagaggttggactgaagttcttcaggaagctttcatctctggctcactcatctcttcttctgcaaactgttgggaaggctgaaactacagcaaaatgcctccagctccattctttgctttcggctcatggaaagtaaaaactatgctgcccttctcttgtgaagcttcttttccattgcaattgcaacccattcttgccagacagtggttgggggagggttggacagcctccggccacagaacaaagcaactccaccaactaaactatgtccagcttccatccaaaagggtggagacctcacatgaaatggggtctccaatctggaggcaaatttacgaatctccccagccctgaagctattgctcctcctgcggggcttcctcacagacctgcaggagcttgctgggagaggagctgaagcccaggctctctaccctggtcaggcaggagaggccagggcatttttaacaatactgatacccacgcaatgaaaccggaatctttgggagtggggtcagaggatccttgttttaaaagttcctcttgggatctgcctatgcagccagggtccagaccactgaagcagtgtgcagattcgcgagaggaagagagctgagccgctgtaaccctgggcctgggattgcggggacgggacgggtgggaagcggccaaaggcgcagcggcttctggtcagagccgcagaggcctgagacgtgggccgcgccccggcccaggagaccccgcggccgcgccctaaccctcagtctcccgactgcgactgcgacccgggaaaacgcctacgtttttggaaaggaagtcccatcacagggagctgacccggtgtcagcgcgcagcacgttcccggcccgcagtgcgccgcgcgtcctcctagcagcccgcggagcccggcactgtgatggtcccgcttcccacacgaggccacgggccacagagtgggcaaggaactcgccccaagccacacagcgggtaagttgaggaggcagccttccatcccgacctctgtccttcctgcccgggtttggggttggacaggctcgggctccccgccagcctaggggctgggtctccagtggctttgctccatttcctcatttccttcaaaacgaggagttttcgtttcctcatttgcaaaactgggtaattgtgttcttgtgagatcagctgcttggcgtgagagacgtgcatggtggggattgttcctacggaggcagacctgcacccaccctcaggatacctcccaggacaggctactttaaagacgaaggaacacagaatagacccgatgggggacacctgctattattccaccctctttcaccagtccacttcgctctgctcaataaaacagattagcaggaggccgaatcagcgctgtcagctcgagaggagtcctcagcctcttgggcagtgtaacaaaacccagccattcaccaggttcaccttgctctggactaaatattctgcccagaaaaaaataagggcaggcagaatgtagcagtgtatcaagcactaaagatttcctaccattttccattcgtagccctgaaggaaggagaaagtgtggacaaggtaggtggaggcagcccagccaccacctctctgctggtggacacagcaaggatgccaaagtgtggaggcagagtcggctgcagcactgggtgcgacctcaaatttaccttcacattgattgcccccaaaacccacccccacaggcttttatttttcttttaaaatctgcttactattgggtttttttttttttaatcaatttttttagagacagggtcttactctcacccaggctggagtgcagtggtgtgatcacagctcactgcagcctccaactcctgggctaaaggtgatcttccacctcagcctcctgagtagctgggaccacaggcacgtgccaccacacccagataatttttgtattttttgtagaaatgggatcttactacattgcccaggctggcctcaaacttctgggctcagtcctcccttggcctcccagaatgctaggactacaggcatgagccaccttatccggatgggtttattttattttttaaatttttgtagagacagggttttgccatgttgcccaggctggtctggaactcctgggctcaggcaatcgcccaccctcagccttccaaagtgttgggattacaggcatgagccattgcatccggcctttatttttaaattcaactttttattgtgaggtatttatagattcacatactgttgtaagaaataatacagagagatccccatgcaccctttacctggtttgccccagtggtatcatcatgcaaaacaggacatcacagcccagatattgacattgatacagtgaaaacacagcagagctccatcaccaaagtattctcatggctatagatgtatagccaaatctacttccctctttccaaacctcacccagtccctggcaaccactaatctggtttccatttttatcattttgtaatttccaaaattctatacaaatggaattatccagtatgtaaccttttgagatttgctttttttaaaacccaacataatttcctggaactttattgatttattgaagtaactgcatcaatagtttgttcctctttgtcacagagtagtattccatggtatggatgtaccacagtttgcttaaccattcacccattaaaggacatctgggttatttcaatttgggctattatgaataaagctgctataaatattcatgtgcagatctctgtgagaatatcagttttgtttctctgggatgcatgccaaagggtacaatttcttggttgtatgatagttgcatgtttagttttgcaagaaactaacagagtggctgtaccattttacatttccactagtaatgtgtgagcaatccagtttctctacatccttgcaagcatttgatgttgtcactgctttttagttaggtcttactgatagggatatagtgatatttcactactggctaatgatgttgaatatcttcttgtgtgtttatttgccatgagatgaatgaaatggtgaaatatcatttcattaatttttaccaatttttctaattgaatcccgtggttttcttatagtgagttttgaaaattctttatatattctaaatactagtcctttattggaagtgtagtttacaaataatttctcccagtctgtagcttgccttttcatcctctttcatgtcatgtttcagagagcaaaggttttttattttaatgagttccaatttcctgttacgggttgtgttcatgtcaagtctaagaattcttgcctagtcctagatcctgaagatttcacctatgctttttgcttttttacagcaccatatgttgaaaaggctatcttccctccattggcttgtttttgcatctttgtccaaaatcaagccaggcactgtagtgcttgcccgtggtcctagctaatcggaaggctggggcaggtagatcacttgagcccaggagtttgagtccagcctgagcaacatagtgggacccccatctcttcaaaaaaaaaaaaattagtagagcatgcttgtgtgggtctatttctggattctctcttctattccattgacctatgtgcctatcccttgtaactctccttttaagtttatacttttcctgggcttctgacatttaaaatcggaagagaaatctgcgttttgattatgttcctggaaacaataactttctttcaagatctgaggaagaggaagactctctggaacagtggaaagaacttgtccttgtcctgggaatcaaaagatgtgaatcttgatttctactaaagatgaccctaggtgaatcatatcatttccctaggcctgaatttcttcatatataaaatgaagggatttgaactaaataatcttagttcttttcatatgactcaagtgaatttccaattacaaatacttattgataaacacaaatgtcctcccctcacttaatgtctatttccaaataggagcaatctcatagaatcacaggacatttggcttttgtcagatgtgaaggcccagagaagacacatggcctgaggtcacacatcctgtttaataacagaaccaaggctagaaaacatgttccatgactccgactttgctgctctttcccattctctctgcctcctggagaagaagggaacgtgttgctcccttctcctaccagagaagaggaatagaaggaataggtcagagacatgcatccaatatggcttctctgagcacccactcaataccacacctcatggaggatctctcccaggatttaagagaagaacaagacagagtttctctcctccaagagtctatagccaggccaagacatagaaccacagaaattaatgggagaacaatttaagaccattggctgaggaatacagataattgagctttgggctgtaacaaaataggttaagacatttattatcttagtcagtcccgaggtaagcaagactagagcaacagcccaacagtttcattgaaggctccatttcttttcatctttccactctgacacccttaatgtgttagctgtttcctcagatttgtgtcctcatagttaaatatggctgccatagctctgggcatcacatcattacactaccatctccaaaatcaattctgaggaggaaaaaattgagtttgttctcacatatctcttgttataaaggaggaaaacctttctcagaagttcccagaagactgcttctcagctctcactggccaggatcaaatcatctatctgctcctgcccaaattgtaaggaaaactaggaagtgatactctggaattttgaactgttagagtagaaactctgccagcaaggggaaaataggaggaggcgtgcaggcgggaaacagcttcttggaggcaaccaaccagtctgctacaattctcaaaagaaagagaccatgtgaccaccagactggtcaggcaaggcaaaattgcagacactaactcaagattagaaagatttttaaaagaactgtaatattacaaacctagagcaaccactcagaacaaagtaagtgaaagaggtatcactaacaagctagttgtagagataaaatggaatccaaatgtaactccaaagagtacaggaaaagaaggaaaaaagaacaagtggaacaaatagaaaacaaataacaaggtagtacacttaaaatttcatcatattgatcattacattaaatgtgaattatctaaaccctgcaactaaaaggcagagattgccagactggatttttaaacatccaattatatgctttctatgagaaactcacttcaaatataaaaatgcagacaggtttaaaatgtaaggatgagtagaaacatacatcaatctgaacattttttaaagtaaaagaatggaaaaagatataccagttaaacactaagcattcatatcaaagtattctttagaacaagggatattaccagggataaagagcatcaattcttattgagaaaagggtcagttcatcaagaagctgtaacaattctaaatgtatagtatgcacctgacaacaaagcttcaaaatacatacagcaaaaactggaagaagaaacaggcaattggaaaaaccacaatatagttggagatttcaagatttttctctcagtaactcaaataacaagtagaaaatcagtaggaacacagaaaattcaaaaaaacactatcaactagcttgacataaatgacatttaaaaagaaaacactctacccaacaaatgtagactacacaaagtatatggaacattcaccaagacagaccattaaaaagctgtttatcagtaaacttcctggtactagtacgtgtcgcttggaatcttgaaggcattcctgagcctggcattcctttagccaagtgagtagttcagaatgggaaaaaaaaatgcaaaaatctgaagattattggcatcagtgttttcctaataatattgtatcaaatttaaatattcagaggatgtgtattgagaagccaagtgatggctaaaaaatattgactttcaaaatttttctttgattcatttaaagttcataaagacatagggtctgaatgcttgtaatcaaggtatttccaggagacttcctttaaaaaacaaagcaccctctgtttacttgatgcactgaatatattatgtatgtgcttttcaacagtaagaaataaaaagtttctttaaccactgtgaggtgattactaaatgaagaatggaatttgtttcgaatattgatacaggatttcatgatgtgctgggcaatgaaagaccttctgcttacatgagggagcacaatcaattaaatggctggtcttctgatgaaaatgactggaatgaaaaactctacccagtgtggaagcggggagacatgaggtggaaaaactcctggaagggtaagtcaaaagattcaaaccaaacacctgcaatttcctacttcagtaagtcttgtagatggtaaagccttttagatcacacggctcacgtcatttccacgaatgacagtgctctcattaccaagtggggaggcacctggacttggcaatattttctttagcccaacactatcacttcctaaaccacaagtaatctccttagaaatttccacattggtagctcttggaatacttttgaagggtgagcagatttagctttaaacctatttagccaacctgggaatgatcatcttcagaaacccagtcaccccaaagccatttttactgtctcaaaggtgtggcttatcagaaacggaaaatctttctttttagataaaagaatgcatccttcagccattggtttcgagatttaaaaatgcagacttctaaaacttgtctccttaacccaacagagctgatttgttttattatcataggtaaatgttcttgctgtgattagagaattcttaactggtctgatttattttttaatttatcttctagagtgttgtactctgaaagctaaagtgaggaatacaaaatataaatttaatatattataaagaggcatatgggtcctctggtccttattaataaagttagctctaaatgtttatgaacgaaaggaaaaagatgctggatcatcgagccccacttttttataccctaggaggccgtgtgcaggcggtcctgaccagtgactcaccagccctcgtgggctcaaatataacatttgcggtgaacctgatattccctagatgccaaaaggaagatgccaatggcaacatagtctatgagaagaactgcagaaatggtaagaacacagtattctcctaaactactggagacccagtttctaaaccttaatgatcacaggtgcttctgtaagtgccagatgctgatctcatcccttgccactgcactccatgagctggatgacagagacagtgagtgtgtggtcctacccagtgccttcatcaacatcaacgtcagccagacctactgcagcaaaccagtggctctcccttgcttggagccctcttcaaaagccacatcaccacctcctgcttttccttagtgtccagttgactggacagagaataccttgctgagtctcagattttgcttttattacttggaactcttttggctactcaaagaatagccaatttgacagatgtttgctgatcagtctaatttaggctgacaaggatttctcaagcaaatgctgtgtagctggcgcaaatgctaaaatgtgtatattttggttttgctttgctcttagtgaaagaaataagctctctatctatgttaaagaggaccaaaggtgcaaatacatcaagggaaattatcttgtcagaatggtacatgctcaaaaaacggagttaatggccggataccatggctcatgcctgtaatcccagcactttgagaggccgaggcaggtgtatcacctgaggtcaggagttcaagaccattctggccaacatggtgaaaccccatctctactaaaaatataaaaattagccaggcgtggtgagatggagtcttgccttgtcacccaggctggagtgcaatggcgcgatcttggttcactgcagtctttgcctcccgggttcaaatgattctcctgcctcagcctcccaagtagctgggattacaggcacccaccaccatgctcagctaatttttgtatttttagtacagacggggtttccccatgttggccaggttggtctcaaacatttgacctcgtggtccgcccgcctcggtctcccaaagcgccgggattacaggcgtgagccaccgcgcccagtcagcatttgtctttctatgcctagcttattgcacttaacatcatggcctccagttccatccatgttgctgcaaacgatgggatttaattctttttatgactgagtaatattccatcacattttctttatccatttatctattgatggatacttaatttggttccatatcctgactattgtgaatactgctgcaacacaggaatacatacatctctttgatggattgatttcctttcttttgtatatattcccagcagtgagattgctggctcatatggtagctctatttttagttttttgaggaacctccatactgttttccatagtggttgtactaatttacattcccaccaacagtgatatactgttggtgatttgtatgacttttttgagaaattgtctattcagatctttcagccatttttgattaatttttttattgatacatgataatcatacacatttctgggctatgcgtgttattttgatacatgcatacaatttatggtgatcaaatcagggtgattgggatatccacctcaaatatttatcatttctttgtgctgagaacattccaaatctttctcttttttttttcttttcttttttgagacagagtttcactttgtcacccaggctggagtgcagtggcacaatcttggctcactgcaacctccacctcccaggttcaagcaattctcctgcctcggcgtcccaagtagctgggattataggcgcatgcagcatgactggctaatttttgtatttttagtagaaacggggtttcaccatgttggccaggctggtctcgaactcctgacctcaagcgatccgcccatctcggcctcccaaagtgctgggattacaggtgtgagccactgcacccagcctaaatctttcttctagctgttttgaaatatacaacaaattgttgttaactatagtcacctagattcaacaattttagcactttgtcataactgcttctttccatatatctataatcatatgtagatataaggatagctatatatatctatctacatctagagacagaaagagggattttaaaaatcatttaaagcatcaaaaatagccaaatatacaaaccttgattggggtgataatggtgtcagggctatttaggacaatgctcttattcttagacatgtgtgccggagtctttatgaataaacagtcatgatgtcaagtgtgtcaggaaaaaaacctacagaaagaggtgtgtcaaaataaaaagataaagtatctctgatttgaataggattgtgacttgaaaacccgataggaagaaaaatacattaaatgatatctctacattggatttttctgaataattgctttgtataaaaccttcattgaaatataacaaattcagaaaagtgcacaagtcataagcatactattggatggattctacatattaagtgtttagttgtctaactacttttaaactagttatgaaaaaaatacgaaaaagtgtttaattcagtgatgcatgcacattgggttttctgagcctagataacactcatggctggtttctatctctgtttagaggctggtttatctgctgatccgtatgtttacaactggacagcatggtcagaggacagtgacggggaaaatggcaccggccaaagccatcataacgtcttccctgatgggaaaccttttcctcaccaccccggatggagaagatggaatttcatctacgtcttccacacacttggttggcttttacaaacccctaagcttcttctttacctttccttaaaatttcaaccttctcttttcttactctataattgagaatgataacacagagagttaataacagtcaccctgctaactttccttagcatgagtgaacagtgagagataaaaatgaaatcttggttaaccttgccaaatctccaggacaccgaagagttaaaaagagagaaaaacaaaaagattaagctctttttcaaaaaaacaaaaccacttaatttttttctacctaaaaccataacaagaaaaaatgctaacacttatttatttgaatggcacatggagaccgggcatgtggctcacacttgtaatcccagcaccttggaaggcggaggcgggtggatcacctgaagtcaggagttcaagaccagcctggccaacatggtgaagtcccgtccctactaaaaatacaaaaattagccaggtgtggtggtgcgcacctgtaatcccagctactcaggaggctgaggcaggagaatcacttgaatccgggaggtggaggttgcagtgagaggagattgagccattgcactccagcctgggcaacagagtgagactccatctcgaaaaacaaacaaacaaacaaaaaacagaatggcacattgatgagcattcattgattgattctttagtttttttatgttctctaaagaatttttaagatttaaagaagcatgtgctatttatttgtaggaaatcctcagaaaaggtacaaataaaaaataaaaattatccataattaataccagagattataattgttaattattatggtgttttctttgctagtatttaagatcattattaagatcacatacacatttttgcttactatcattagcatttgatgatatgatttttttaatttttatacattgttttaatggctgcacgatatttcattgtgtacaaataaaataactactgttccgctttgacctagcccattctgtctttttttaaattacaaatggtattcattttgttgtattattggggaaatgattacttttagaaggagcaaattgagcttattattaattaggctgctaaattcttagtttaaaatgtcactaggtgccacctggcactgagtatttgaaaattgctaccaatcaagcagcctccagattactaaatatttcatctttcatcacagattagagagagctcctcttccttcaattaacttatttacaaatcaggacaaaatattaacaatacatacccattgaacagagtataagctatgtcaaatattatgctcatctatataaatcaattgccttaaagctaacttatttttcactgccattacgaccccattagccaactcaccaaacatttctttgacttgtcactctcatgacagaattctgacattttgcatggagtcacttatgttcactaacactcgccgactctttagcctagtaaacattccaataacttaaccagatcaaatgtctgtatttaaaatcaactttcagcctagaacttgctctgtttgtctaacaagactgccttgaatttctgtcttccactgaggtctcagagttaactgatattctccctcaactaagtatggtctcacctctcagagctgaaactaacattttcctcacgaataacccctgagagacatctcttccccttataacttctgatggaactacccctgcatctcaacgtgaaggaggattccaaaccacacatccctggagagaccagtgtgtttttctcacacgtttgacggtgtgatacacggggtcttgaaacaacccggtctcaaaagcatgcaacctaagatacccagtcagtgacaggtctaaaccaggccccctggcaggattagaaaagttcttgatttgggaatgatagtaagaggagttacagagttttaaaatttgtttaaatgtccttgagccctgaaggagaggaattacttccacctgttagctagcagcagggagggttggacaaagaaaaggaatgactcaggggtgtcctaggaaagtgcctgtggaaccaccccattctgttttatgtctgccatcctctatttcatcacttacgggatttttatttttatttttttgagacagagtctcgctctgtcaccaggctggagtgcagtggtgtgatctcagctcactggaatccccgctccgggtttaaccaattcgtctgcctcagcctcccgagtagcttggattacaggctcgtaccaccacacctagctaattttttgtattttagtagagatggagtttcaccatgttggccaggatggtctccatctcctgacctcgtgatccgcctgcctcggcctcccaaaatgctgggattacaggcatgagctaccgcgcccagccacttgctgtatttttatatacaaatactattaggagatggaggattccagtccccttttaaaaatccacttaataatatagcggaaatagtaacaaaaataaggtaggttattggataaataatttttttaactcttctggacacctcatcattatattaaatgtattttctatggggaaaacatgtatttcaagtgccaaattacttagcacaaacagcatttatttgtaaactaagggctaactgttttatgccactaaacagctttttaaattttaaccaactgtatacaattacatgtatacaactgtgggtttgttttataagattttacattaaaatgagcaccatctccctttctgaagcagcaccacaggcccatcctattttccctcctcagagcaatctataaatggtggtagctagtctttaaggaacagcttcctataatgatgatataatgcagccaataactaaaaatttccatcctcccaaaggtcagtatttccagaaattgggacgatgttcagtgagagtttctgtgaacacagccaatgtgacacttgggcctcaactcatggaagtgactgtctacagaagacatggacgggcatatgttcccatcgcacaagtgaaagatgtgtacgtggtaacaggtgagtggtgtgaactctaactgaggatgaggcacttcattctgttgacgtcaatgggttaaaaaagaggtaaggccaagtgttcggggttaggttacaatgcatctggcccacctaagcttgtgtatttaattagttgtagttcatctgttttccagaatagcttagggaaaccccagaaaacttgcatgtgaaaaggaaaataatgctaaattatccctcattttaatatttcaacctaaaagcatcgtcgaagccctccacttacaatcaagcaatcatgcattctttatttctttgggggatgtatcttttagatcagattcctgtgtttgtgactatgttccagaagaacgatcgaaattcatccgacgaaaccttcctcaaagatctccccattatgtttgatgtcctgattcatgatcctagccacttcctcaattattctaccattaactacaagtggagcttcggggataatactggcctgtttgtttccaccaatcatactgtgaatcacacgtatgtgctcaatggaaccttcagccttaacctcactgtgaaagctgcagcaccaggaccttgtccgccaccgccaccaccacccagaccttcaaaacccaccccttctttaggtaaggtttcgcagtgatctttgagggaggctccttaatggctaacaaaatattcacgcaggtcatattattaaatccctccttaaggggatattgtaaggactctgcggtgattccattttctacctgttgattttttaaagcaaagttatcaccattttacacctatagaacacagaagaaggaagaatgtatgtaaagtcactttgcaaatagaattcagtgacttgtagaaagttctttgaccctcctcatttgcactggtccctgctatgtgtacacactctcccctcttctaacctgtcacatttttgtttatctcccattttttatggctatgagaaggcacactggctccttatacgatcaggtcatttctatgttccttcctctcccccactaatttctttccctaccctgcccacacctacccagtgtccatgaaaacacagctgtacttgaaagcaatttccaaatggtccaagaaagaatgtagcttgagagtatgtctgggttagcaagctgcagtgactcctgacattaaaattgtgctgcatcgtatgtttattgcggcactattcacaatagcaaagacttggaatgaacccaaatgtccatcaatgatagactggattaagaaaatgtggcacatatacaccatagaatactatgcagtcataaaaaaggatgagttcatgtcctttgtaggaacatggatgaagctggaaaccatcattctgagcaaactatcacaaggacagaaaaccaaacgccgcatgttctcattcacaggtgggaactgaacaatgagaacacttggacacagggcggggaacatcacacaccagggcctgtcggggggtaggggtagggaggcgggatggcattaacagaaatacctattgtaaatgacgagttaatgggtgcagcacaccaacatggcacatgtatacatatgtaacaaacctgcactttgtgcacatgtaccctagaacttaaagtaaaatttaaaaaaaagagaaaaataaataaaaataaaactgtgctgcatttaaggcatgattaattcaataccaccctatattaatagtctggggacattcaagaagtccttaagagtccactttgggtagcactggcttccatctgattccccacgctaccccatgccatcaccacccttttcccactgggccagttgcactcagcaccccaggatcctggggatagcaataggctgacatcctctcactggtcacaagagggcgccagggaccaagcccacgacggtccatcatgacgtctggggcttcttgtttttacaaaatcctgtttgttataaattataaagttttacaataagatgttagtaataaaatgagagcttgttaaatcaagcatatctaagtcaagacaacacaagttatcactgatttcgattatctcaaaaatgttttaaattacaaagtttatgcatgttccttagtaaaaattaaaacaatgtagatgtctagagtaaaaagcaaaagtccccactcgtactctcctcccaagagttaaaccctgttaataattgggaggatttctttccagatatttttctatgcatttataaacatatactatatatacacataaggtttgttttggttgtgtaaatgggttcatttacacaagagggctattcatattgttttacaatttgctctttttctaatttaacaaacattatagacatctttccactgttaatacatataagtctatctcactttatccagtggctgcatagtgtttcatagaatgtatgtactgtcatttatttcaccattctcttttttttttttttttttttttttttttgagacagcgtcttgctctaacacccaggctggagtgcagtggcacaatcttggctcactgcaacctccacctcctggactcaagtgatccttctgcctcagcctcccaagtggctgtggctacaggcatacacaaccacacccagctaatttttttattttttagtagagatggggtttcgccgtgttgcccaggctggtctccaactcttgagcacaggtgatctacccaccccagccttccaaagtgctgggattataagcgtgaggcactgtgcccggcccaccattctcttattgatggatgattagattaatcctaattccaactacaattataactgtattgaacaactttaaatatacagcttcattctagtaatcctttaggagaagcaattttttttatctacaactattaatgatcttctttacaaataagaggaccaggtataaaattcaaaataaattacagatgcttttaatatttaagttccagaatggtaaaagacttaatgttaggttgtttaatgttagtctactttgaattgcatttttattaaactagcttgtttttcttataaactatttatatcatagcatgttttaaaaatatatttgaagccaatgaaaagctatttaaaatttctgttgtaatttctccctaggtgacaccataagatataaactagtgggccaggcatggtggctcacatctgtaatcccagcactttgggaggccgaggcaggtggatcacctgaggtcaggagttcgagaccagcctggtcaacatggtgaaaccccgtctctaccgaaaatataaaaattagccgggtgtggtggagagtgtctgtaatcccagctacttgggaggctgaggcagaagaatcgcttgaacctgggaggtggaggttgcagtgagccgagatcgcgccattgcactccagcctgggcgacaagagagaaactctgtctcaaaaaaaaaaaaaaaaaaagatataaactagcaacccctacaagttagttaagttttattgcgaaggaaagctgcctggctttatctaaaggtgttagatcaatcataatcaaccccaaaatgccttaaaccagcatctctcttagggagagcgaggagggacgtttctaaaaggggtctcttctagggagcatttccagctgtacaggccatattaaagggcttggatgaccaagtattatattattgtttggccaaaaaatatgttctctctgctttggtaagtggcttcttaataatgcacagccgaaaatagaaatcaaatgcaaatgcaggagtgaggcagaagccagttgaagaggtgacccaggtagatgtgtttaaatctgagggcagatgcatgtgtgctatttttaagtcacggaattctcttcacttagctaacagtgctattatttgtttttcagacttgtgaacaaatctgaaaaaaaaaaaaaaaaccttttgtaagactgatgctaattactgtaatactctctctatatataaaataacatcatatcatagagaactttcccagagaatcaagagctctcacaccgttctctgggcaacagggacataaataccaaattaaggatgaagttgaccttctttctcatctgtcttttaaggtgtgcgtttctctccattagcccttgaatcataccttgactttatagacacaatgtttgcgaagctccatatgcttttttatttttatttttattttttttttgagatagagtcttgctctgttgcccaggctggagtgcagtagtgcaatctcagctcactgcaacctctgccttctgggttcaagtaattctcctgcttcggcctccctagtagccagcactacaggcatgtgaaccaccatgcccagataatttttctttatttttaatggagactaggttccaccatgttgcccaggttggtctcgaactcctgacctcaagtgatccacctacctcagcctcccaaagtgctgggattacaggtgtgagccaccatgcctggcctccatatgcattttaaaagcattctatctaaggtagaatcactgacttttattatttggtcattttttaagaaaataagctttatttcatttttagcactaaagtatatgcagaacaagagaagttttattttaaaatatgcagggtcgtgattccatgctctaacttgacaactaaattctgcctgtcaagaactttcaaaagaagaaattttatggttttctggagaagagctactgaactcgaatggcctgcacaaacaatcctattgctgtagagtagatcatctgaatctcaggacagacagaacgactgtcttgtcatttccagaggactaatatgaaactcaagggacattcccaagaggctgccacagttcttcctgctggtaaaccactgcattcgatctaacacagtgtctgggcctttctggcctttacctgagcagcatttcccaaagtgtgtgccatggagcagtcatttctagacctgttctgagaactgctctgagaaatctgctttgggcacaggaaaatcacagggatgttcacccgctgacgattctgagaagccctggggaaatctcccagcctgcttcactcacatgtcactaagttagagatgcagctcttatgaggctttgatgtccttccccaagactgagtctacttcacatgtcttttgaaattaaaaagaagattgtattttcagtatcgttattttctttctagattttttatcttgctaaaggagcagcgatgtcttaattagagcctgttaaattgtaactaatagggcattagattctttgctctaattatattcaaggcttatttttcaaaaatgtcttgtattccctcctttccttcctcacatctctgctcatcacagtaagacttttagaatttaagctttggagctgtgagacatccaaacagggaaagaatgatcttttcccatattactgaaagaaagaaactgtgatttattaagtactccctctgcagcagtgatgagcagcaggttttatatactttatctcatttaagtttcatagttcagcccccagaggacagcaggtattgttcttattttacagatgagcaaatagaggcaaaaacagattaaatgatgtgcctgtggtctcaaacagctaaaaacaagggaagctggaatttgagcccagaatacctgcttccaaaattaaaatataactgcatctagtatggccaggtttatttcttcatgaccattgtatcacacattttaatacagtttcaacctttttttgagacggagtctcgctctgtcacccaggctggagtacagtggcgccatctcggctcactgcaagctccgcctcccagtttcacgccattctcctgcctcagcctcctgagtagctgggactacaggcgcccaccaccacacctggctaattttttgtattttttagtagaggcggggtttcaccatgttagtcaggatgggctcgatctcctgacctcatgatctgcccccctcggcctcccaaagtgctgggattacaggcatgagccactgcacccggccagtttcaacgtcttatttgcttcttgtgttcacacaaaatgtgggattatgcttccttacataatttagcaattataataccttatagctctcacatctgtgtaaattatgacacatttagttcaaatttctatagcaatttcatagtatagtgttcctgatatttttctaaaaagcaaatggcaaatgtttagattttttattatatcacatgtatcttttatgttcgtagcaactactctaaaatcttatgattcaaacaccccaggacctgctggtgacaaccccctggagctgagtaggattcctgatgaaaactgccagattaacagatatggccactttcaagccaccatcacaattgtaggtaaggctgaagatgatgaccagtgaggaaggatgctagactccacctagggtcacccactctctctgctaactctgaaggggtagaggtaggtggtaagggcacccctctgcttgtctaagatgacaccacacatgcaagagcaaagaccccattcatttctagattcccacctgcctccccggccttccttccacatcctggtggaaacaagccttctgtgaaggccgcatgctaatgagcctgccctgggcctgtatcccgcctctgcagcccagccatctgaatggggtatgtagggtaaaggaaggctagcatcgagttcctacaacttccactgtcttcccctagttaattttcacaaagtcagacttgtatgtgaaaaggggaaagagcaggccaccacacatggctgtgcatttgggcacagccctaaggcatacaacagagaagacagaggggaactgaagcccaacctgtgctcaccagttctgggagtgaggatggaggtggaagcccaagcagtgtcccctgagtccaagccacttgagaagctggccaaggcctgagcctggggctgcgtctacccaggattaccttttcctgaaacactttccaagatggagtgctactttctgatgcacacaaaggctctaggaacaaaaatctaggctggactgaaaaacagttcagtttgactttggaaatgctgcatggatatgtatcctaagctatgggggtagattgccagatctgatgtgtttctgtatggcaagagggctgtcttccttttttaatttttttcactttctgatgtcttaagagctgtaccttagtccattcaggcttctataacagaattccatagactgggtggcttataaaccaacagcaggaatttatttctcgtagttctaaaggctgggaagtccaagttcaaggtaccagcacattcggtggctggtgaggactcacttcctggttcatagatggcagatagcagtcttcttgctgtgtcctcatgtggtggaagaggcaaaagggctctctggggtcactttcataagggcattaatctcacacatgaaggcttcaccctcatgacctaactacctcccaaagacccccctcctaatgctatcaccttgggggtttcaacatatgaatttcggagggacacaaacattcaatctataccagagtgattgtttggctttgtttgatttctgttgtattttgatgtgtttttctctgggggttattttgttagagggaatcttagaggttaacatcatccagatgacagacgtcctgatgccggtgccatggcctgaaagctccctaatagactttgtcgtgacctgccaagggaggtgagtatattatctccgacagaggcatgggtgggtcaactgaggacctcaagtctgaacaaaggcattgaccaccagttaccccttttaagttgatttgaattcctattgatttgaattcctatttactggtaaccctagacaggaaggtccctaggaggtgctatcaagcacacacatgttttgctacagttgagcaattgagaaagctttaacaattaagttgaataataattatgataactgtttgaacacttaactgaattttttaacaccttatacctgttctcatattgaatcctcacaacaatcgtatgagcctccccattttgcagatgaggcaactgaggccaccagtgatcacaaaacttgcctaccaatggaatgctggtggccaggagagagcagctcacaggagtgctcttaagctcccaggtagttgtctatgctaacattaatagcaacgcctgataatcctctctctttagaatttacaaagctctttccaatgcattatataatttggtttcctatgatttggtcatgaccatatgtaataaactaaatataaatgaatgaatatataaatactatatcgattaactaaatatacattagcaaatcatttgcatataatatataaattacctgattaaaatatatgtgtgtgtagatacataaattaatcaggagaatgaagtggtatgaagatgtggccttatttggtagaagagaagagctaagaagctctccaccttggggagaggaccagaatgagggtgagggtggcagaaaacagtgaaagctgacccagggagtgaagctgctgcgagaggcctggctggtgagaagggggactgtccccatcccaggccccgccccatgagtccagcatcagagcctggtctctccatctaagaaggctgccatgagatagcggtcaggacagcaatggcaggtagcccagcatcaaggacagatgagtcaaacctcttctgttcaagtcccagctccacccctggctgcttgtatgacctggactcgttaatctctctccctgatttgtcatctgttaaactggggtaatgttactttcttcaaaaagctattgagagaggctgggtgctgtggctcatacctgtaatttcagcactttgggaggctgaggcggttgatcacctgaagtcaggagtttgagaccagcctggccaacatggtgaaaccccatctctactaaaaatacaaaaattagccaggagtggtggcaggtgcctgtaatcccagctactcgggaggctgaagcaggagaatctcttgaacctaggaggcagaggttgcagtgagccaagatcatgccattgcactccagcctgggcaacaagagcaaaactctgtctcaaaacaaacaaacaaacaaaaaaactattgagaggaataagcaagatcatgtcatatatctaaaactcactcagaacaaaggtctctgaggaaagataaataaataaataaaattcagtgcccggcacataataagtcctgcaaaaacagctgctgctgttgctgttacacttctacaggaacctaggcagggccaactatggcatctaataatatgtctgcctaacacccaagctatctgcatcttcgaacattctagggatgtagaaggaatatagagggagtgagctgggcttcacgtggtttccatcagccccttcccctgggggagatcttttttttctcctccaccccagggcctcactttcctgaggatgcagagaaaggcatagctcagcgcacaggcttgcttaagagcagattataagactaacaattcagcatcttatagtttgagtaacaatgaggtggaattcaatttcatagaaatgtaatgactttccctttgtaaaatggatctgaccttcctctctccccttctctgtgccctgtgcgccctcgcccacctcccctgtcgcagcattcccacggaggtctgtaccatcatttctgaccccacctgcgagatcacccagaacacagtctgcagccctgtggatgtggatgagatgtgtctgctgactgtgagacgaaccttcaatgggtctgggacgtactgtgtgaacctcaccctgggggatgacacaagcctggctctcacgagcaccctgatttctgttcctgacagaggtgagttttgttttatggccatatgagcatttcatactgcaagtaaagtgtgtatcccatactaaagctatttaggcctttgttttcaatgtttaattctatttcagtacaaaattcattgaactcttattaataaggatctgaggactggcattacaatccaacagcaaatctacttagggaagtgatgagacatctggtgaaatagtggccaaagaaaagccttttgatgaaaaaaaatcagctgtgatcatggaccagtaacaatgggatatgatcactgcacgcttgaatagatttgtatttcaaggagaaagtttaaaggccaatatcaaaaaatagcagtgttctccaatgaaacaacaacaaaggagaggctgatatcacattttcatgaaaatccacctgagcaaagatatgaagcctggaagagaaatgagacacaagctgttctccttggtcccttctaacttaccatgcatcctctctttcccttcccaaactctaccgagcattacagaacacagtaagaaaccaacttattattcctcacatgttcaccagaaaaactactctcttccctctgaatgcttggaaaggtacaatgttaacaaagaagacaaaggaatttcatttagaaatttgcatttactggtagcatccaacttcccccaacctccaaattagggctctaccctaatggccctagctgactgtcactgataatcaactttgttgtaagatattacttgtggcttagaagaagtgctacgtggtaggatgaaagggaaagactaagttgtgtacatattacagcagcagtccccaacctttctgacatcagggacctgttttgtggaagacagtttttccgtgtaacggggatggtgggggatggtttcgggatgaaactgttctacctcagatcatcaggcattagttagagtctcataaggagcatgcaacctagctctctcgcatgtgcagttcacaataaggtttgcactcctatgagaatgtaatgttgccactgagatgacaggaggcagagcttgggcgataatgctcagtcgtttgctgctcacctcctgctgtgtggcccagttcctaacagactgaggacccgtaccagtactggccatcggtctgggggtgggggacccctgcgttaaagcacttacttcactccttaattggagtattgtcaggtacaatctaatagctcattcacttataactcctttgaacttgaagcctatctcataaggtaatatgttcttaaacatgtatttccagctacaaaaacaaacaaacaaacaaacaaaaacacatatttccagctgggcgcggtggctcacgcctgtaatcccagcactttgggaggccaaggtgggcagatcacttgagatcaggagttccaggccagcctggccaacatagtgaaaccccatctctactaaaaatacaaaaattagccaggcatggtggtgggcgcctgtagtcccagctactcgggaggctgaggtaggagaataatttgaaccctggaggcagaggttgcagtgagctgagatgaagacactgcactccagcctggccaacagagtgagactccatctcaaacaaacaaacacaacaaaaaaaactaaaaaaaaaattttctcattaataatataaatggcagttttaatcccattaaaagaagagatttaatcccattaaaagaaaataatcatacatctaattatttgcgtgagggcttattgttggtgatatccaaggtgcagatttaaaagcaaaaccaacgatgcaagggtgccctgcttcctgcccaggaaggtggatcagggcctgggtggagagccggggagggtgggaactggagaagggagccaaaacctctgcatccaagtggccatggactcggatgcagtcaccatcagaagctgctaatgttattccttcagtgctgccacagctcaaagtttgtttagaattacctttagagtcttaattcattctattaagcttcctctgcactggcaaaccactgatctcttatgtgaattagatgttttagacatttgctttcctttaattcttcttgtagtgagtgataactttaggtgggacctgagtcattttcaaaagccaaataaagaaagctcagaatgccaggcacagtggaacatacctgtagtcccagctactcaggaggctggggcgggaggatcccttgagcccagaagtccagcctgggcagcacagcaaaaccctgtctgaaagagagagagagagaaagagagagaaaaagagagagagaaagagagagagagtgagaaagagaaaatgaatgctcagaaggaaaggttttaattcagtggggattgcagcttaatagcttgggtttcaaaggcagaatttcagaaatagatcattcttcaaagcaaacctatagactttagttgaagtgacttttatgtatcgattcaatggatattcatgaagcacctgcaattctttcaacaaatatccctgagcatctactccatgctcagcacagttctaggcagaagatacagttctagatcgagtagaaaccaagacaaagaagtccctgcttctgtgagcagtgacagatgttacatggaaaactttaaaggtggtgatctttttttttttttttgaggcaaggtcttgctctgtcacccaggctgcagtgcagtagggtaatcatggctcactgcagcctcgacctcccgggctcaagcaatccttgacttctgcctcctgagtagctggcaccacaggcatgcgccaccatgccaggctaattttttaattttttgtagagctggggtctcactatgttgcctctgcctcccaaagtgctggtattacaggcatgagccggggaagggcactcctgtaagggggcacggaggtctgaaagagcacggggagtatggccaactttcaggatttttagcacagctagaaggtaagtagagagagaggaagctggaggcacggccgcctgatcacaggagcccttccacacggtggcgctgctgggtcacccaagacctgagcaggtgtctccaggacgtgacatctctcccccgcgcccttaccacagtgttccagacatgctgactcattctctaaatagaagataagctgacccaaagactatgtattatttaatagaaaagattactgaaagcccagagggagccatatatcttctgtgacggctcccttcctcatttatttaatggcattataagcggcatgtcctctaggtggaagacataactaacatgctcttgcttctgttttaagacccagcctcgcctttaaggatggcaaacagtgccctgatctccgttggctgcttggccatatttgtcactgtgatctccctcttggtgtacaagtaagtttttggttcctacgctttatatcactatagtgtattgtcaaaagtgaatatatctctgtgtaaataggcatttttcccttttttgcttttaaacattttgtgtaggggaggaaaatattacattgaatggtgaataccaaactggcctgttaatcttgttgtggtttgtttttaatcctaaaagatgctaccagatctcagtaactttacaaaattatgtcaacttaattttaacatgatagtctcaaattatagtaagcaggcacatttcttgcatgaacaagagtaaataaatgtactttcataagacaccagtgtcttgcaaactgtcaatcatgttaaatggaatgaatccttttatacctggcatgaaaaagattgtagaaagttgtatatttcaactgaagatcttttaaaaataactaaccaacagattgttttcagaaaacacaaggaatacaacccaatagaaaatagtcctgggaatgtggtcagaagcaaaggcctgagtgtctttctcaaccgtgcaaaagccgtgttcttcccgggaaaccaggaaaaggatccgctactcaaaaaccaagaatttaaaggagtttcttaaatttcgaccttgtttctgaagctcacttttcagtgccattgatgtgagatgtgctggagtggctattaacctttttttcctaaagattattgttaaatagatattgtggtttggggaagttgaattttttataggttaaatgtcattttagagatggggagagggattatactgcaggcagcttcagccatgttgtgaaactgataaaagcaacttagcaaggcttcttttcattattttttatgtttcacttataaagtcttaggtaactagtaggatagaaacactgtgtcccgagagtaaggagagaagctactattgattagagcctaacccaggttaactgcaagaagaggcgggatactttcagctttccatgtaactgtatgcataaagccaatgtagtccagtttctaagatcatgttccaagctaactgaatcccacttcaatacacactcatgaactcctgatggaacaataacaggcccaagcctgtggtatgatgtgcacacttgctagactcagaaaaaatactactctcataaatgggtgggagtattttggtgacaacctactttgcttggctgagtgaaggaatgatattcatatattcatttattccatggacatttagttagtgctttttatataccaggcatgatgctgagtgacactcttgtgtatatttccaaatttttgtacagtcgctgcacatatttgaaatcatatattaagactttccaaagatgaggtccctggtttttcatggcaacttgatcagtaaggatttcacctctgtttgtaactaaaaccatctactatatgttagacatgacattctttttctctccttcctgaaaaataaagtgtgggaagagacaa

SEQ ID NO: 86 - DNA, 138099 bp, Homo sapiens
agtagggaggtgggcaggagccagtgatgacggaatggcaatcacatttgacctctgatctgtttatttcctcctccttgacgtctccatataaatgttacacgggcatccccacactcggatacgcacccacagtggctgattcgggggtaaccgtgtcatttgcttgcaacactggcacctctgccctgcaccccgggagtgagcagtgagtgaggctcgggtctgggcgctggctccgaatcttcgggctgggagagactccaccatctgggggcggcctgggggagcagccttagtgtcttcctgctgatgcaatccgctaggtcgcgagtctccgccgcgagagggccggtctgcaatccagcccgccacgtgtactcgccgccgcctcgggcactgccccaggtcttgctgcagccgggaccgcgctctgcagccgcagacccggtccacacggccaggggctacgacccttgggatctgccctccgctcagctcgagcttccctcgtggccgacggaacaatgaaggtaactacttatggttttgtccgtgttttacaaaaatgtgtgcgtgaatcgaaccggcgatttctccaagaaacatagttggcagggaggggaggaaggcgagacaaccatggcttatatcccccgcaaacgtctcagtatcttctttatcaatcgtagtttgcggggaccgtgcattctgttcagatttcggtttaacctccactcgcaggacgtgccttctcggactttttcacattcgcttttgggaacggaggtgaaagtctgctacagctccctcccctgcttgtgaagtttggaaaggaagtgagggcttctctcagtttctcctatgcacaggaggtggggaattttggagaggaggtctggggatgtcccgggctgtaaatgcgctttcctgcagcgtgtgttcgtgatgcaggagggagcggctggaagagttgacccgggtggagaggggagggagaacgatcttttcactgttaaaagcagaaggcccctcttattttgtttcttgtggaaattaaagcttctaggagttacaaatgatagacgcctaagggcattcatttgttaaaccagtgagcaccctaatggctctgatcttgctaatcaaggataattagcctagctgcctattatttctgactatttaggtgtagggatgtacaccgttgagtgttttgttttcctagtttcacacactggaaaactgcaatcgcatataaaacccgaagagcaactttttccaaggaaagtgaaggatgggcagatattcttgccatctaacattttggaattgagatgaccataatgcaatctgaacttctggtaggaataaagcctcgtttcagagtttctaaggagggagatgaagcgtggttctcaactgctcttatctacaacccatcccagaccatagtttcacttagaagaaataatatgtaaatagcgcctttgttgccaaacaaaaactttcactacaattaaacagtaaccgagtggaaactatgcgtttttgtattcaacagagatcacacaacttttcttctatagttagaggttctatttctggcttcctcatgcttgtttcatttcagatgaaaaacacactttagttgattatagctttagtaagtaaaaggagaaaactaagaatgaacagtcttgcttttccagctttttcctgtccatgtgcagttgtggttaattacgcgtttttgtaggtccaaaaacccctgtcccttccacaagatacttttataacatggggaactaggtaagatatctacaagtagtctcttttctgtttcctgatatttcctaagattaagaaagaaatgattgtattctaggtatgatcgaagaagtatggaaggttccattaagttagttttatcacaatatttcaaacatctttccacttatctcttaaatatgtattgctatcacaagcttgattttttaaaaaaatgttatttgcacatggcatcttgattgcctttgtcctcagcaaattctccgggcttaagtcatgcatgagcttgtattttaagacagacacatgcagaatgggcaacttggataagaaacataggatatacactgagtagcatgtgtacaaaaatggtaagtgagtattatgacttaataaatttagatggggatttaaaaatgatacacatgtaaatgggattggaggcaagggaagtccgtgtgtgtgtgtgtgtgtgtgtgtgtgtgtgtgtgtgtgtgtgtggagggaagacgggaggcctagtggggagagaggttttacattccagacacaggatgtggcccctcaggctaggctcagagatgtaaagctagttaagctggcctaacaaaagggtggtggttagaaaaaggaaaaaaagaggtgggggttggggaggaaaagaatttaatgctggccaatattttcatctgataagtttcagtaatgagtaatttcactggatttcagaactacagagagaaaaggggaaaaatatttttccttttttacgcaagaatttctcttgcttttcagctcattagaaccagatctaattatttgaaatgagtttaaaaccttattatgaaaggaagttgaaaacattcgatcacaattgagttttgtactatggactaaaaccaagatgtgctttctgtcagtagctgtgcaactccctgaaaaaagaaaaatagcgcagagcgatctgagctttgtgaaggctacacaatttatcaggcccagagagataggagtgtgagacttcagtcacgtccccccgtacgcatgcgcaggagtaattatttaaagacattttgttcctgactaactgcctcactcattatgttcctggaatttgtgatacaaaaaaacaatgtttagcctatcaatagtttatatagtttatgttattttaatataaattcttctcaacttagaaactgcctcttttttcttttaaaaacccacttgtaactgctgtatatattcagggcaacttgatttggtgtttcgttggttgcagtcctcaaatttgacctcaatatactctctacttatataaattttgtctcagttttgtccgtaggctgacattccaattgttttcctaattatatattttgttccttatttctcatgtctagaaataaagctagggaagtaaacagctggaaaactgatagtggtgttattaacctaactgagagggctgggcttatgagtaaattattcctgtgcataaatgaaagattgtttctaaatggcagctatgttgagcctttgtattagttacatcttttggggtttcaggttgccagcttctttaaatggcctcttctcaactggtataggaagttggaaaataaagaactttctttatttccctttagtgttggtaaccacagtttctttaaataacagatgcccaccccagggaaacccagtggcatgatcagccttatgctcaggaaggtttggttgctatactggagagtgagaatctgggaccttccatgatagacataattgtgccagctatcctctactttctatatgatgctatcattcttttttcttttcttttttttgacagaatctcactgtgttgttcaggctggagtgccgcagagtgatctctactcactgcaacctctgcctcctaggttcaagcaattcttgtgcctcagcctcctgagaagctgggattaccaccatgcccagctaattttcgtatttttttgtaaagacggagttttgccatgttggccaggctggtctggaactcctggcctcaagcgatctgcccatctcggcctcccaaagtgctgggattacaggcatgtgctatcattctttttgagcacaggaggaaactatggctgatctgctcattttactgtcaaaaatataggcagcttttgtattgtaacattatccccttaacagctgtccaactggtctatacatttcacctaacatatggtaaatgttcctactgttggcctttcctgagcctctgtccattcaactaaggccactgcaatgggattgtatgcagttcagccaagaaataaatgtgaggtgcaactcacattttttaaatgtttcaaaattaagcatttaggtgcttttattcataaacatgactttgcaaatattggtaaacagtttcatcataagaccttgtcagtgactcacaatgtcaatggtgaacgcaaaggagaatctgtcttttctggaacaccaggttcaggtatcagtttcaactatgcttataatttgtgctctaaagtccacaaagctaaattatctttcccctaaaaattgagtactcatatccttaaaatagcttggaaattagattaccttatgaatacagcatagcatgtcacataaacgtttttctactgttatacctttttggtgggaaagactattttgcaaaacatttttcttgtgttcagtaattaatgggaaaaacaaactctaaaagaaagagacagttatgtcccaaaaatacaggaaaatggaagaatggaaacagggaagaccaataaagaaaaaaatagaggaaattacaagtaataaactgaagtcatactgaaaaacatatggctctttcttattgaaagttgtgaaatacttgcaaaactcagctagttccattaagaatagtctttaatctaaaaagaacaaattcatttgtcagttctttatttcggtgtgtagatttgaatgtttcatcaattgcatttacggtttatccctcagtgtgagaactgtttttgctgttttgactataaatggatatctgctttaggaagacttaggaagcctgggacataggattacagatcaaattctatttgactccatagaagttgagacggaaggagcacctgttgggatattctagaccaaacattccacagctgtctcttaacgtgactgacaaagagacacagttgagacgaagtttgggtatatcctgggatgaggccaagggtggatttgcacaggatggtcacagggcagttgttagcattccaccactacataaaagggtgattttgccaagtgcatttcatttcatttcagttgatttagataccaagttatattgttttgactttaggactagatgtgagttcaggaatttgaaatcataataaatgtttccttgaactttgaagataaaaggtagagttaaaagacagctgcgaagtctacatggggaagcataatacatgactcagggttccatggttttcagtgtcggtgagtgctctgtacacttataagaatagtgctggtgtttatagaagaaacacatgcaggtttgaggcaagacttccttgcttaattggtgcttttgctttccattttctaaatgccatgcaaactacttttttttttttcttttgttgagacggagtcttgctctgtcacccaggctggagtacagtggtgcgatctcggctcactgcaagctccgcctcctgggttcacgccattctcctgcctcagcttcctgagtagctgggactacaggcgcccgccaccacgcccggctaattttttgtattttttgtagagacggggtttcaccatgttagccaggaaggtcttgatctcctgacctcgtgatctgcccgcctcggccacccaaggtgctgggattacaggcgtgagccaccgctcccggcctcaaactactttaactgaaaacattcttctaaggaaagcatcagaaaacttactagaattgcttaagaataaataaataatacaaataaaagagcaaaatgagaaagtagacagactcctagtctattgtgctattgatctctccaggttctaggctttcttgggtctgacaccactttgtaaatttttttttttttttttttttttttccagatagggtctcattctgtcacctaggctggagtgcagtggtacaatcatggctcacttcagcttcaacctcctgggctcaagtgatcttcctgcctcagctccctgagtagctgggaccacaggcatgtgccaccacgcccggtgaatttttgtattttttgtagagatggggtttctccatgttgcactggctggtcttgaactcctgggctccagtgatccacccaccttggcctccaaagtgctgggattacaggcatccgtcactgcactgggccagtttgtaaatcttatgaaaagtatggccaatcttttgcaaaatgtgcaaacacatatagacacaaagttttatatctaaattattggttattaaagccaggacaatagagtgcatatagcatggaagacaggtagaaaagactgaaatggtttagttattcagagcagtggagggctattggctcttgcctttgcagtcagctgagatatgaaactatataagcagaagcttcacgctgccatttgaatattgaaaatctccacttttagttcaagagataaacaaccaatggtttgtttgttcacagcacataagttatcactttcttctctgtttcatcccatcaagatctaaggtgtatagttacagaatagaactcggttcataccatatgcaccctaatttcttcgatcttcaactagtttggaagtgtgtgtgggtgttttcttagccaaggttaatatgcaatttcttagtggagtgtaggagtttggggtgcctagccttcctacttcccacttagataacttcccctacctgttgtacctgtcaaaggagaaggccagtatggccatgttctttgcaggtgactccaccttagccacagctgattgtaacaagggtgtatatttggcccaagtccagccatcttttttttttttttttgaggcggagtcttgttctgtcacccacgctggagtgcagtggtgtgattttggctcactgcaacctctgcctcccgggttcaagcaattctcctgcctcagcctcctgagtagctgggattacagacacccacgaccacgcttggctttgtatttttgtatttttagtagagacggggtttctccatgttggccaggctggtctagaactcttgacctcaagtgatccgcccgccttggcctcccaaactactgggattacatgcccagccagccatcttttacttctttcttattctcttattccacatattcaagcaggtaccacgtcctgtggactctgtcttctctgaatctataggttctctctttcccattgccctgcatactggtttatgctctcattacttctcgcttgaattattccaaaagtctcccaactggtctgaagcttaattttcattatgtgctgttcgatgtcattccaccacgcaaaatctatggcttctccattgtctcctgagtttagtttagtgcatgagaccgtttaaaatctacctacacctcttctatgtgcatgcatttctctagtcataagagaggatttgatctatctcaaaatgtgttcttatatttgcatttactggtttttaactccctccatcctatctataatttgcaccatgttgctcaccatgcagcccactccccagacaccttgtgagaacagtgatcatgtttttgcagtggaatgaacatgggcgaaaggtgggaaggtatgcatagatttacattttgaagtcaggaaataagatactgatcaatgctttaattcgactgtgctttttaccttttcctctgttgtagcatgaaccttgccccaaaaagatattgatcatatgctgcaactcctctgcacttaccttttcttctaccatggcaggaaccttgcaccattgttggtgctttacagatattggttgagttaaatcgagagcctatttctggactttcaagattcagattaattgattctgttttatacttctctgtttttgaatggcacatacatctttccacacttggatttctttgaagttaaagctttaattgacttccaaaagacagaggattataaaaacacagagaacagtaaagtatttacacggtcttaatgcctattgccaaacacatatagctgctattaatgcctattgccagactcatatagctgcaaactcatgtagcttaatgcccattgccaaactcatatagctgctatatatgtctactggaaaactcacatagctggttgattttaaattgattgtaggaaaattcatacaaaaagatgctacataggaatataaactgaacaccacaaaaatcgtaatgaacaaactcagtaatgccagcctgttcaatcactagttttcagattaaggcagtatgcaaagggaaacatccttggaatggtcttagaatatagaacaaagtcatgtgtttgggaatcttaaccaattccaatactgttcaacatgtttttctttgttgcaaacaatgcagtttttaagcaaactaatgaatgcataccctgacaaacaaatccaacaaaagaggtacttagagcagtgttcattgaatcctagaattttgaaagaaaaaatctattaggtcattttgggcttttacttctgctgaagaaggattgttcttttgagtttatttttctagctttcagttctattccatttaaatgcctcgagaaataggacttctcaaattccctgtggagagttctggcacctactatattcacttttgaaagtctcctgataactgatttcctttttcttttggttatacacatcaactattcatggttggctctgctgatagttttccatgattctttatgcttatttaaaagaaatcatataacattaatcatataacatataaccattacttggttataaagcatgatattaactaaactggcttttaaaaattcaataacattagagcaaatattttattaatattgtcagtagttccatgaatatatagatgtaggatgtcaataaagtttatgccccttaataactgagtgtgttaatgttgtatttgctggttaactggcaccttccctccttttgatcaatgttcttagaacagtatgtacaggagtactttagtctaccacttgatattcaaggacaacacttcgaagcttgaaatgagggattgttttaaccatattaacgtaactgcatagtttgcaatagatttaatgattcaacatcattgttaatatttagtttaattaaaagtgccttatattaacttgtacacatgtgaaatgacttatcaacaagattatttattgcagcattgtttgtgattacaaagagtggaagtcatttgcatagtcattaggcgtaaaaaataatgacattaaaagaaaacaattgaggaaagaaccagtaagctctcaggtagagataaaaagaaagttaccgtgagccttttcactgtatatatttatatatttgatttttgacacgtgagtttattataatcaagattgaatgaaaaaaattgaagccttttaatgaaattagcttgacaccagagtcattatcaagaaaatctgaaatactggtacctatgcacatttgattttattatttttagttttattattttttgagacagagtcttgctctgtcgcccagactggagtgaagtggtgtgatctcagctcactgcaatctccagcctcccaggttcaagcgattctcctcagcctcccgagtagctgggattacagatgcctgccaccatgcttggctagtttttgtatttttagtagtgacggagttttgccatgctggccaggctgatctcaaactcctgacctcaggtggtccacctgcctcagcctcccaaagtgttgggattacaggcgtgagccactgcacccggccatttaagcaaattttagttaagaccagtaacatatttttgacagtatttccgaagtgttgtatttaatttaactaattgaaaattatctattaagaaagcaagttaaatgtaatgtgtatacttcatagtatacacattataatgattcatagtaaccattatatgaagagtgtctaaacttttcttcaaatctaccatttatatagtacaataatgaccagcaaacaatggctaagttttacttaattagacatttgtgtagctcctaccaaggctaccagactttgtacccagtaacaggaaaacagaaataattcaagcattattctcactcttgagaaacaattctatttagggagatatacataaaaagcaaaggtggctgggtgcagtggctcatgcctgtaatcccagcactttgggaggccaaggcaggcagatcacttgaggccaggagttcgagactagcctgaccaacatggtgaaaccctgtttctactaaacatacaaaaattagctgggtgtggtggcatgcacctgcaatcccagctactgggcaggctgaggcagataattgcttgaacctgggaggtggaggctacagtgagctgagattgcaccactgtactccagcctgggtgacagagcgagactccatctcaatgaataaataaataaataaataaatagcaaaggcaataatgtgcatatagtaggtgctacagtagaagtctgcacaaggttctgtgtatgtggaaaagacaagtcagaaaaattaggaaaggctttattgggaggtgacatttaagcagaatcacgaaagaagacctgatgaacatgggggtaagagcacttgtacacaaccccatactcctgggctcagactcacttgctcattccctaatcatagaagaccttgaggaaaagcatgctggggttcccttccagcccactggtaaatacagagaggcctaagcacccaacatcccccagggaatacaccactgggacttaaagcattggcaacccagcacccagttaaattccccttgtcactgtttccacattgtccccatcaccttcactctcttgatgctctgcattttctctcttaactcgacccacagtagaccctcccactcaaatctgcccccaataacctttgcaaccaatattaccgcactacactttatcttccctaagggtttcctgctcctcctggtcttaggtgaggtcatttctctgccagcctttaaagtggaagctgctcattttctctgtccctcatccagggctggagtgggactgatgcccttcaccctgcccagtactgtttccacatgagactccttgcatagcatctgctctctgctactcagaccaggagtctgtgctctctcttcctctaaccatcattggaagacaccccagtccctctggccccattatccactgtagattttagcacttacctcctctcttccctcccatgtgctgttttcccatttattttaaggtgcatgtggatggcccattccccttcctggcatcttaatccctttaatttctcatttccattaatttgctacattcctcatatgccagctacccctatggccatatcccagacctttgaatcacacaccaaattccatcaagtcctatgagtcatttttggtccaagacctatcttacatctatgcagtgctatctattttaacaaccatgtgcccagtttaggccactgtcttctcttcactgaatatatgtgttcctgttttttctcatccccatttgtttcccagacacaatttgttctccagagcagagtgatcacatcagtcacctgctataaaaactcctcaacccggtggggcatggtgactcacagccccagcactgtaatcccagcactttgggaggctgaggtgggaggatcacttgagcacaggaggagctgaagtgatctgtgatcacgtcactgcactccagcctgggctacagagtgacaccctatctcaaaaacaagcaaacaaacaaacaaacaaaaaccaacaaaaaattttttattaagcaaaaaacctcttcaacctcttcctgttatgttttgaataaaagctaaagtccccaccatgctccagaagttcccaagggatctggtccttctcatctttacagcctcatcttgttttgccgtttccacctccctcatcccccaaactctttttcttcagggcctttgcacttgctgatgcctctgcctggaaggtcttcttctgattccccatccaggggtgccttatcaccctgccctgccaacctcagattggatgctacttcctcaaagagacccttgggactcccatgtttcccaggctttcagtgccctcatctcaacttgtaatgattgtattggggtgattatttgtatgactttgggattgatatctgactcttccactagaccatacatttcttgagagcagagagcatatccagtttttttaccactgtgcaaccatatgtcgtccaatgcttggcccataatagggggttggtgaatgtggtaggctgagtcatagcccccaaggatgcccatagcctcatccccagaagctttcatggtaaaagggattttgcagattgtgattaagttatggatcttgagatggagagattatccttgattatctaaataggtccaatataatcagtagcgtctttataagagagaggcagagggtcaaaagcagaatcagagaaggagatgccacagtggaagcaaaggggtgtgtgtgtatgtgtgtgtgtatgtgtgtgtgtgtgtgtgagagagagagattgagatttaaagagctccattacttgatctgaggataaggatgagccaaagaatgcaggtggcttgtagaagctggagaagccaagaaaacattctcactctagagcctccagaaggaatgcagctctgctgacaccttgatttggaacttccagaaccataagataataattttgtgtagttttgaggctgggctcatgcctgtaattccagcactttgggaggccaaggtgggtggatcacttgaggtcaggagtttgagactagcctggccaacatggtgaaaccctgtatgtactaaatatacaaaaattagccaggtgtggtggtgcacgcctatagacccaactacttgggaagctggggcaggagaatcacttgaacccgggaggtagagattgcagtaagctaagattgtgccactgcactccagcctgggctacagcgtgagacttcgtcagaaaaaaagaataattttgtataatttcaggccacaaagtctgcagtcatctgttacaacagcagtagtacacgaatacagattttggtacctggaaatggtgtgctactgtaacagatacctaaacaatgtggaagtggcttttgaattgggtgttgggcagcatgtggaagaattttgagaagcatgataggaaaagcctagcttgccttagaaagactgttagtagaagtagggatgttaaaggcgctgctggtgaggacttggaagtgaagagcatggtaaagaaaatgtgtttcattttagagaatatcaaagtcattgtagaaggttggcagaagtgtaggttttcataatgtgttgttggtgagggctgagaaagaaatgaggaccatgtttagggaaactggaggaaaaagatccttgtcatacagtggaatgaaactgtggaattgtgtcttacagttatatgggaagcagaatttgtttgaacttggatatttggcttagctttccaagtaaagtattgaaggtgtagcctggttttctcttgctgttttatagtaaaatgcccgagaaaaagggataaattgaggtaggaactgttaagaaaaaggaacaaagacatgatgacttgggaaattctcaggatacctggtttgtaaaagatgctagaattagaagattcattgtcaggaaagtgtgctctggagaggaagccaagggtgagttccttgtggcgtaggttaggggctgtggcagggatgcagggaagagatgatggtgacttggactaggggtctgacggggtatgggaaaatagagaggaatgagttgattctgttgggactttgtattgagttccttgattccataagtggaaacacatgtagagctctctttcctggccacctaagctctctgaccatatccctgactctctccagaatgccttggcttcatgtccacgtgaggacaaatcatatttttctgcattttgcgtgctggattcctctctggactaaagatccaatgagaggtggtttctagctttctgctctttcccacaacactccgtcagtgagtcttctggatgtcctataggcaactcactggatccacttggtctgtggaagaatcactaccacatccatttcaccttgggcacagactagaaggtgaggcagtcatgtcctgcagtcactgggtagcttacaagtgctaatacagcaatagcttaattagagagagagagaagaagaagaatgttatggagcctgtttctagagaggaaaccacaatatcttgatcaagagaccctaaaactggaagaaccagagcagctggtatcaaaatgtggaaaaaactgagatgtggcaagtggtacaactgatagccaaggaggaaaaatttgtatccccctgtaatcccagcactttgggaggctgaaacaggtggatcacctgaggtcaggagttcgagaccagcctggccaatatggtgaaaccctgtctctactaaaaatacaaaaattagctgggcgtggtggtgtgcacctatagtcccagctacttgggaggctgaggcaggaaaattgcttgaacctgggagcagaggttgcagtgagccaagatcgcaccactgcactccagcctgggtgacaagagttaaactctgtctcaaaaaaataaaaagaaaagtttgtaccctcttcttttctcttgcctcaggataactgagattcttataatgcatttattgaacaaatatttgaggagtactcattatgtaagcatcagacactgctcaaggtcttgaggctgtgagggtgtattagtccgttttcacactgctataaagaactacctgagactgggtgatttataaagaaaagaggtttaactgaattacagttcatcatggccagaaaggcctcaggaaacttacaatcatggcagaaggtgaagaggaagcaaggcacatcttacatggtggcaggagacacagtgagaagggagaagtgccacacttttaaaccatcagatcttatgatgatataggagttaagaagaaatcacttaggtagatagtgagggtacgggagtccttggtaaggcttttcttttaaatgaaaagcagccccacacatagacaagcaagctgggagcttgcacgggtgaatgccggcagaaactaggaaccagacacgttaagatggcggctccattttcccttctctgccagccaagtgtacagtaaggagcagacaagctggtgccggccaagaggagaattcatgtgcataataagattagggtggggtgaccagccttcccagtgcgctatgtgaacatcatacctgattgaaccaatctgtgagccctatgtaaatcagacaccacctcctcaagcctgactataaaatctggtgcattcgccacccgccggtgtttcctctcagaagtcccctctctctcattagagagagggctgttttcctttctccttcttctgcctattaacctgtgctcctaaactccctgtgtgtgtctgttctgaattttcccggcatgagaggatgaacctggggtatataccccagaaaacatagccacttaagtgagaactcactcactattcacccccaagatccaatcaccttcgaccaggttcctcccctggcgtgaggggattaaaattccacatgaggtttgagtagggacacagagccaaaccaaaccatatcagagggtgaagagcaggtaaagttgcagctctcctgcaacttgcagggaaaggccatataacacatggttatgagcacaaactgggactggactgcaggtgtgtgagccccagctttgctattgagtgaccaccagcaagttattaaactgtgcctcagtttttttgtttatgaaatggtggtattagtacaacccacctctcatggatgatgtgaggattaaataaaataacatgttgccaggcacagtggtgcacacctgtaatctcggcacattgggaggctgaggcccgagggttacttgaggttagaagcctgagacctgcctggccaacatagcgaaacctcatctctgcttaaaatacaaaaaaaaaaaaaaaaaaaaaaaaaaaaaaaggccaggcgtggtggctcatgcttgtaatcccagcactttgggaggccgaggcgggtggatcacaaggtcaggagtttgagaccagcctggccaatatggtgaatccccgtctctactaaaaatacaaaaattagccaagtgtggtggtgggcacctgtagtcccagctactcgggaggctgaggcaggagaatcacttgaacctgggaggcagaagttgcagtgagccgaggttgcgccactgcactccagcctgggcgacggagcgagactccatctcaaaacaaaacaaaaaaaccaaaaaaattaaccaggcatggtggcacacacctgtaatcccagctactcaggaggctgaggcaggagaatcacttgaacccaggaggtggaggttgcagtgagttaagattgtgccactgcactccagcctgtgcgatagaaggagacagtctgcaacaaagatccaaaaacaaatataaagcacttataacagggtctggtctgaaataagtactatgtaagtactgtaagtattaactaatattattacaatttatcctcatatagtaacatatcaaatattttcagtcagtgatgcaatatgaataaaatgaaatgatgcagtagtgacagaactgagagaaagctggtacaaatttatactgactggtcagggaaagcttcacagaaaaggtgaactttcagctgacacctgagtaccatggtctggaggtaagagtgtcccatgcatatggaacagcaaatgaaacttcccagagcataatctgagaggggagatttcaggagtggagccacatcattgaagttccttagtcctggtaagtgtggattttattctaagtgtggtgaaatgcccctgagaggttttgagtagtagatggaattccatttttaaaagtcactggtgagtcaagtagtgtactatggttacatttttttccccttatacctcattttgtttttcctgcagttaattcttgcattatttccttttatttacttaccttactatatatttattatgaattctttccaattcccaacttcctgacagcctctcaatgtaattttacttaggttaaatgtatctgacagttcattttcttttttgtctctgtactctttctgctaccattctcattcttgcactaatttgtgctggtttctctctgagccagctgcacagctgcctgcctaagacttcctcttggcatcttttaccctctctctgtgttacatccccggttttctgaatcgtgtggcgttctcctttttactttacttcctcatttgtgttgcacgtatgctctagttgtttttagataaagagtgcatcagaggtagatgttttgattccttacatgcctgactttttgttctacttttgctctaggttaatacttgattttgaataatatcctaggttagaaatgatttttcgtcagaattttaagggaattgcttttctgttgtctagtttcctgtgttactgataggaagtccaaaggggctcgtatttcaggtcctttttatgtgtaacctgttttttgttccttgaggtattcagggtctctttttattgctaatttggggagctttatcataacatgggtccttagtcattcatcctagaaaattttcctttcctatatctttgatgatttcgtctcctctgctttccctcttttctcattcttaaacttctatttgtttgacattagacctccttgtttgatcttctaatttaatttttctctcctagtgtccaatttttgaggtgggagaaagatctcatcaatgttatctttcagcctttcccctgaattttaaaattttactcttcatatttcttctgattaatcctttaaaaaaatagcatcctgggccaggtgcagtggctcacacctgtaatcccagcactttggaaggctgagcggggagtggatcacctgaggtcaggagctcaagaccagtctggccaacatgatgaaaccctgtctctactaaaaatacaaaaacttagccaggcgtggtggtgggctcctgtagtcccagctacttgggaggctgagacaggagaatcaccagaacctgggaggtggaggttgtagtgagctgagattgtgtgccattgtactccaacctgggtgacagagcaagactctatctcaaaaaaaaaaaaaaaaaaaaaagggccctgttccactgaggcttcagtgcggagcatggagggatactacctccaaattccaaacacgtttgacacatctaaagaaccttctaaaggatgactaaactaattctgcaagctttagcctctaacttatctccaatttatatttaatagaaggctggaaattgaacagaaaggaaataagattatttggaaataaaaaattgtcagccaagcaaggagagcttggcatttctggaaacttctttaccctggaagaggtaaaaaagtgattctcccattcccccaacagggcattcactaaaaattaagtgagaaatgctttgcctagaggatctgtagcttgcgaacacttgacttgtgccactggtgtacggaacatagcagtgtcagctctgccctgggacagtcaaggctggctggtgctgcctgtggttagagtcaagagaggggtcttcagtgggtgcagtttgcagttccagagtttagtagagcaaagacgtcatgaactatgtgaactctgaggaaaggtgtcatagaaacacctcaaaaggacactgtctaagaaggctacttgctggggcaaggagaccccaggggtcagaggctgtgtagggaataatgccagagctggggttgaaggagaatccttagaggtgagacagaatgtgcatcattgcagtggggctgtgcaaggcagtggtctccacaggaggtgaggacaagggggaggggaggttgtgaagaatccgtaagtgaccatgatgcaatagaaagccagaatttgggcatttgccataggagagggcccccagtgccagattataatggtcacagacaaatgagatttttaaccatttcctctaattcatggtccacacttaaccccgtgggtcctggaaacagcagctggagaatggagaggaaagtgatgtgggagagagaaaactttctttacccttttcataactgagtttatgaagtaaactgacagtagaaagataaataggagaaaagacataaatttattttgtgcgtacacatgggagtcccataaaatatgagactcaaagaaaggccagatgattgaagtttatatagtattcctgagctacagaaaaggaatcagggcttggggcttattgaggggaggtggtgacaggttataagagggtgaggagaggaagtgtatagcaagcataggttgtcttgttatgcagataaaaagtctctcaggtgataaaagttgtctcagagtcccccatcagaagaataggtaatagcctgtgacaaggtctacctgtccaatcttctccctggtgataaaatcttccctggttgatgagattcttatcaaagtttttttctttatagatataaattttgtttacaaaaagacagtttttcagagctactcctgtgtctacagtgtctcagaataactaactggaaatacatcaaataagcatatcctgatgtggcatattctggtcatattttgggatggtgcgtcctgagctccaatgctgaaaaaacaggaaccccatttctgttggatgtgccaacctaaaataatcaaaagggtcagaatctagtttaaagatactttattcaagtgcaaagtttaaggacagtgctagggaaacacggatcccaaagaatggaagtcagcgttctgaactttagaagtttgggattgtttatagagagagagtttagggaagcttaacagaatttcaacatctttctgtgtaaggcttaatgcctagttacaatgatctgattagtcaaggtggtcactttcatttgagaaaggcatatttaacatttcacgggctgggagcggtggttcatgcctgtaatctcagcactttgggaggccgaggcgggcagatcatctgaggtcaggagttcgaggccagcctggccaatatggggaaaccccttctctactaaaaatacaatacaataaaataaaataaaataaaaaaaattagccgggcatggtgcacgtgcctgtaatcccagctacttgggaagctgaggcaggagaattgcttgaacctgggaggcagaggttgtggtgagctgagattgcaccattgcactccagcctgggcaacaagaatgaaactccatctcaaacaacaacaacaacaacaacaacaacaacaacaacaacaacaacaaacatttcacactgaaggtgtaacagtcatgggtttgtattttcgtttttcttggttttttttttttttttttgagactgtctcgctctgtattgcaggctggcatggcacaatcacagctcgctgcagcttcgattttgtgggctcaagtgatcctaccacctcagtctcccgactagctgggaccacagtcatgtgccaccacacccggctaatttattttttatttcttatagagaccagatcccccttttgcccaggctggtctcaaactcctggactcaaacaattctcctgcctcagcctcccaaagtgcctggattacaggcatgggctactgtgctcatcccatggggtcttttgtgccaactggtgtgagttaggtacaggacaataaaggaggcagttaatccattaatccataacaaagatcagtgaagggggaaggtctggtctctggtctctcctagtcatttacagaactagaacgatgagaagagagtgaatctataacctaagaagcagaattgcaaacatgctatgtgactcagtttccagtacttaacttctcccttggcataataaataattttagagagttttaagaattttgttttcttttacagatgttaacaacctcagcttgctgggggctggtggtggtggctgctcagacagtaaagcattgaatgcaatgtgaggtcaaagttttattacagatcataccggtcttttaagtacttgcagcaagattttcctaatacttaaaagtgactggaaactcaataggatcagtgtgatcttctccagatagggatggtagatttttgaaagtgggtgtgaagggcagtaatgagagaaaaataaaactatttctggttgtactctcccaagtcaaggtcattcaatgaatggttatatagatttgcatcaaaagtccctgttttcagcctcacctttggaaacacctggattctctattctgagactttctgagatgagggaaaggtggcttctcatcagtatctccttctttgtgcaatacagtttcagttctttctaatctacagagttagttccttctctactgtcagctttctaccttccaaaatgtgttaatgtcactcattatcatgtttcccattctctttcccttatggtttaaactttaaaagacaatggtatttgtttaagtgaatatctaaaaagatgtggagaaagattcatgtgttcagtctaccatgtttaattggagtcactggtagatttttaaggaaaaataacattctaggtttttccagtattgctatgtagcttgtctatgtagatcaccttgcattcttctgtttctctcttataacttgatttttttcttttcttttcttttctttttttttcgagacagagtctcactttgtcacccaggctggagtacagtggcacaatctcgtctcattgctgcctccatctcctgggttcaagtgattctcccacctcaccttcccaaatagccgggattacagacatcttataacttgatttttactcatttcattatcatccaagagatgaaatttaactcaaagcaaatgactattgtttcaaatacaaatcttaatcagggagaaaagattataacttatagttgaactggggtttggagattatatgtgttttttaaaattattctgtcccacatgtaacatacaagtgaggattttaaaaatttgtctgcagtttttttttttttaattgatcattcttgggtgtttctcgcagagggggatttggcagggtcataggacaatagtggagggaaggtcagcagataaacgagtgaacaaaggtctctggttttcctaggcagaggaccctgcggccttccgcagtgtttgtgtccctgggtacttgagattagggagtggtgatgactcttaaagagcatgctgccttcaagcatctgtttaacaaagcacatcttgcaccgcccttaatccatttaaccctgagtggacacagcacatgtttcagagagcaccgggttgggggtaaggtcatagatcaacagcatcccaaggcagaagaatttttcttagtacagaacaaaatggagtctcctatgtctacttctttctacacagacacagcaacaatctgatttctctatcttttccccacatttcccccttttctattccacaaaaccgccattgtcatcatggcccgttctcaatgagctgttgggtacacctcccagacggggtggcggccgggcagaggggctcctcacttcccagaaggggtggcctggcagaggcacccccaacctccctcccggacggggcggctggccaggcgggggctgcccccaacttcccagacggggtggctgctgggcggaggggctctttacttctcagatggggcggctgccgggtggaggggctcctcacttctcagacggggcggccgggcagaggcgctcctcacctcccagacggggcagcagggcagaggcgctccccacatctcagacgatgggcggccgggcagagacgctcctcacttcctagacgggatggcagccgggaagaggcgctcctcacttcccagactgggcagccaggcagaggggctcctcacatcccagacgatgggcagccaggcagagaagctcctcacttcccagatggggtggcggccgggcagaggctgcaatctcggcactttgggaggccaaggcaggcggctgggaggtggaggttgtagcgagccgagatcacgccactacactccagcttgggcaacattgagcactgagtgaacgagactccgtctgcaatcccggcacctcgggaggccgaggctggcagatcactcccggttaggagctggagaccagcccggccaacacagcgaaaccccgtctccaccaaaaaaatacgaaaaccagtcaggcatggtggcgcgcgcctgcaatcacaggcactcggcaggctgaggcaggacaatcaggcagggaggttgcagtgagcagagatggcagcagtacagtccagcttcggcttggcatcagagggagaccgtggaaagagagggagagggagaccgtggggagagggagagggggagggggagctgcaattttttatttagcaatttccaaacctattgtgttaggcagggttctccagggaaacagaaccaatagggcatatctatatctatatttatatctttatctatatctatatctataatctttctatctatctatcaagagatcgagagagagagatttattttaaggaattggttcatgtgattgtgggagctggcaagtctgaaatccatagggcaagttggtcagctggaaattctggtaagagttgatgttgcagtcgtgagtctgaaatttgcagggcaggtcaggtacagtatctattgcaattgcagtcctgaggccaaattccttcttcaggaaacctccgtcttttttgctgttaaggccttcaactaattggatgaagccctcccacattgagggcaatctgctttactcaaagtctgctgatttaaatggtaatcacatctaaaaaatactttcacagcaacatttgaacttgtgttgtctaagcaattgggcactatagcttagccaagcagacacatgaaattaaccatcactctgtagagatgaaagaactactgtttcaaaaaacaactgtttttgaatccgtcatttatcaacggattcacccaatggttaacctttctatatgctttctctttctcccaagtactgaatcatatgaaaataaattatggttgtgatatttcctatctaaatacttcatatgggacattctcctacatagcacacctaagaagattagtattaattcagagagatcatgtcatatctggttcatatataattttccctagctgacctcaaaatgtgtttgttttgtttacatattactctttatagttatgtttcttttaatacggatcaatatttgtgtgtttttgctgctattttttttaatgacattgttttgaataattcaggctcattggctatttcacatcctgaatttctctaattttatctttatgattagagccaggctctaattcttggcaagaataacactgaagtgaggttgtgtactcctaattgccctgcatcaaagacacatgatatgcattggttcctgcattagtcatgttaagtttgattagctggtgaaggtggtcgccaccatttctcactcttgtaaagggacattttctccttttaaattaatatgtaatttgtggcacaagactttgagactgtgtaaatatcccattctctgacaacctttcttctgatgactttagcattaactgatctaattatatcattcttggcattgagtagcattcttgtgtaaagaaggggttctctttctctccctcctctcattataatttgttactgttattttcttacaagttactaagaattactcaaaggcagtatttttcaataaatcattggtaatttatggtcttctcactctagaaaagggaggatgggtcagaaagctgaggggaaaaaaagggaggaaacgagaatgtatattatcgacataatcggttgaaaatgtctagtgctgtaattatgccatcatgcagattaaaaagccacctgtgaaaaatcaacttgtattgttttgttttgtttgatttttaataaatccttatagtgtatgaataaaaattaaattaattgatcagtatcttcactaatggcagagaaggggatggactgagcagattctgcttttcactctgatatttgttaattgccctgtgtggtctgaagacctgggttctagtaccagctctccctctgcagacaggtgtgttactttggtcaaggcaatcaatcttcttgatactcagtttggttctctctgatttgagcataagaaatatacttgaaggccgggcatggtggcttatgcctgtaattccagcactatgggaagccgaggtgggaggatcgcttgggctcaggagtttgagaccaggctgggcaacatggcaaaacctcaactctacaaaaaacaaacaaaaaattagccaggcatggtggtgcacgcctgtagtcccagctactcaggaggttgaggcaggagaatcctgggaggcagaggttgcagtgatctgagattgtgccactgcactccagcctgggagcctgggtgacagagagagaccctgtctaaaatatatatatacacacacttgaatgcttcatgtcccttgctcagtgacagccccgtcctctgcttctgcacagttgaccaaggcttctcagtctactcctgtgtagaaaagaattaaagcaggcctgaggctgctagtcttagaaaggcttgcaaagttggcccttgtctggtgtctgggaacttgaatttctggagggttctcaccattccctgaaaagaatggctcacgatgcctaaaatatttgtacaaacaatgaagtttctgctgaacatctgcttccttctgggagtctggaattttaggatgtgctaggtaggggtgtttacatgacagccccacataaaaaccttgggcactgagtgtctaatgagattccctagtaagtaatattttacacatattatcacaactcattgctggaggagttaagtgcatcctgtgtgactccactgggagaggactctgggaagcacatgtctgatttcctttgtcccatgtgccttttccttttgctgatttttgccttgtaaatttttttttttttttttgagagacagagtcttactctgttgcccagactggagttcagtggccccatgtcggctcactgcagcctctgcctcctggattcaagcaattctcctgcctcagcctcccgagtagctgggactacaggcgcgcgctgccacaccggctaatttttgtatttttagtagagacggggtttcaccatgttggccaggatggtcttgatctcctgacctcgtgatccgcctgcctcggcctcccaaagtgctggaattataggcctgggccactgtgcctggccataatttttatcctgtaataaattatagtcgaaagtattgagtcctgtgaatcaacttagagaatcaccaaactgcttccaattttctcatatgtaaaatgggttgctataataatgatgatatctaccttatagggttgttttaagtatgaaaaatatggtgaaatatgtgtgaaactaggggccggatgtaggatgagtcatacagtgggtggttattattacggatcatattaactcttcaggtaaaaaccatcttgtagctgggcaaggtggcacatgcctgtagtcccagctacttgggggactgaggcaggtggatcgcttgagcctaggagttcaaggctgtagtacgctatgatcacgtctatcaatagccactggactccagcctggacaatgtaatgagagtctgtctcaaaaaaaaggaacaatcttgtgtttgcgtgtgtgctcatgtctttgttggaataatactgacacagtcactcaaattaactctcaaatctttgattattcatttgatgggaacaacaggtttatgtgccagcttatcaggacccctagttctttcattaaagtgtgtatgtgtgtgtgtatgtgtgtatgtgtgcacatgtgtgctagttttcttatctaacgacgaagtcctttgggaggtttactttttcattactatttttttcatgctttcctttgatgtgcacctggcaatttatagagccaatgtgtactacatattctgctgcagaaaatgacagaggtgaggaaggagcaggaagcagatttagaaaggaatgttacagtttatcaagttgtgactaatggaagctattaaaacaaaaggtaccaacccatcttaaatattcactgcctctacaactatttttctataactgttgttccttgtcagctctggggtggagggaatattcctgaatgttttattaagtaattcaaagatcttcctaggtatgtgtatcaaagatcctatgatgtatctgtcttgtaaattgagactggcatatattgggcttacattactgggaaaaatgtatgtcatcatcattggtgaaaaagagtttccatagcagttttttctaagtagagagataaatgaatcagacttttggaggaggtatgttttaactcactggaggatcacaccaagtctgaacatctaaggaaccctagtggaaaactggttttcctgtatgctgctctagcgatctgaggaaaggcctaaaaaaagccagtgtccctgtgatattgtgaaatacatatatgtggtctttgttcctgtttcctggcatacaagtactaaaaatccttggaatctccaaagtgctgtctttttgtatattagtgttgactgatagcttcagagtggggctggtcaagttgatcaccaatggccagtggtttaatcagtcatgcctatgtaatgaagcctccatgaaaatccaaagggaatggactggggagcttctaagaagtgttttttaccttcccgtgagcctcctgtgctgaacacgtggagggtcacgggaaggtaagcaaaaattcattcacatgctgggagggtggcacatcccaactccacgaggacaaaagctcctgtgctcagaacccttccagacttggaccttgtatctcttcattggcttttatttgtattttaaaaaatatcctgagtgataaactggtagatgtaagtgtcttcctcagttctgtgaaccacgctagcaaattaatcaaaccggaagagggggtcatggcaaccccaacttgaaacctgttggtcagcagttccagagacctgaacttatgactggttggaaggacggggtgctcttgtgggactgagccctcaacttgtggatctgatgctatctctgggtagacagtgttggagctgaattggaggacacctagcttgtgtccactgcagaactgattgcttgcttcctgctggggagaaatccctatatattttggggtccagaagtcttccgtgttgattgtttttgtgtgagagcagaggaaaaatggtttgagagtttttcgggaaacagcccctcttagtatagtggtagaaacactccaaaaataaaatatgctaccccaaaaataaaaaatgaaaataaaaataaaaatctggagtggtcagtttgccaagaggatttatggagcatctaaggtcaagcattacttctcagccctgcagcaggcctctaattaagccatgccacagagtgcggtttgcagagaggtggagttcctgtggattcattcttctctctaaaattataaataacgcagcttccaaacatgccatattacctcacaaggtctaaagactcaatatgaatcttcaacttaacaattataactgacacagattgagatcttcctggatgctgaaataggctttacatgatttatctcatttagttctcataaaactctattattaatattattttacagatagagaaatggaagcacagagagggtaagtgtattagtccatttttatgctgctaataaagacatacccaagacagggtaatttatacagaaaaagaggtttaatggactcacatttccacatggctgggaggcctcacaatcatggcagaaggcaaaaggcacttcttacctggtggtggcaagacagaaaatgagaaccaagcgaaaggggtttccccttataaaaccatcaggtaacatgagacaattattcactaccacagaaactatatgggggaaaccgcccccatgattcagttatcttccattgggtccctcccacaacacgtggagctacaattcaagatgagatttgtgtggagacatagctaacccatatcagtaagtaattagacaaaccttgcaaagctagtaagtggtattgctggaattaaatctgccaatgtcactccagagtctatgtgatttactggtatattatagggtctacctataagcttgataaccttatgttagaacaaataaccatgacatattctgttcagtagtttgcatttccttttgactcctacaggggaggaggccgaggttcagggacattaaagtggggtttagagacattaggtggtttacccaagctttatctactagatactagataattgtctatctgacaataaagctagaacttacacccagctggacaatggagctacagcttaaaacaaaatcttctaatgagctcagaactcatggcttaataagatttgggaaaagtcctgcggacatttcactgtctatccagaaatgcgaggaagttaggagaaaaggcaaagtatctcatagacagataaaggcagttcagtaagtagcctgaataaatagccatatttaaaatctaatttggttcttttgtgcctaacacaattgactttatgctggtatctattttctgctctgtctctctttctgtctctacttatgtgtgtatgcatgtgttataaaatatatcagcccattgatcaatttttaatttaagcaaaaacatggtagattaatatattcaatcaatttattgagtagatatttatcgaggctcacacatttatctgactgtgtactaagcactggaaacccaaagagaatgaagtcactgcctagacagttggaggctgacacataaacaagcagggtaataatcaagtgtcataactagtctattacatgcaatgttaaactagcatctctaccatgcaaaacttgtgctcttggggatacaggaagactttccagagaagtacacaggacaggaatgtgttaggaaaccagtcagttcccaggtcctcgatcaggtcacagtgacttgcgattctattttgaacataggtcttaaatctttattttgatagcaagggttttaaacttttgatatatgatatacttctgaaaatcaaatttcatattctaaaattaagtatttttgcccttaactaacttgaacataatactataatacattaacatatattattaataataaataggacccctggaagtccaagagagacatgaggcttatttggtatgttaaaatcatacaggaagtgttgttaaataagaaatggtgttacactttctttgagttatatttatatggatatgttgttaatatgtgttccaacattgtatgagattcctaaaaatctgatatggacatccagtgtggttgttgggtcctctatgagcctagggagcactggccggttaccttgcatccattcatgtcagcgttggtagtgtcaggcacccgatggttcttagaagagtacttagctctactctgcagtgtctgaagttgctggatatatacctgctgtataaactgctgactagggcgctgcagtttacttactgtcttctcatggggaccttccccttcaactctttcctcttgggtttcacatcttgggtggggagtttcatcctagtagtttgcctgagaatacaggtgaacccacagaacaaagtggacttcgaaagcatctccttggagtgagactttgcttctttctctttgctagcaccatcttgtaccttatcgtcatgaactttgttggctgaatcattcccatttacttaattgaagagtaagagactggaacaatgctcactttgattttcctggataagagttaagagttcttgagatggcagcttgtttgacacatgaattttcttcaaatttgtgcttactaccaactgatttggtgtggaggagagcccagagaagttccctctctctgtcagaacaactttgtaacatttattaacctgacttctgccttcaattaactgtaaccttttgccttccaaattaaaaagttccacattactccaaaaataaaaagtgaaaataaaaataaaaggctgatatgtcatggtatatgcagtaaattgctttattctgatttttttttctaaaagccttttgcaaatcctgaagtgctgtgtattcaaggaaattcatgaaagggaccttgacaagtagtcttaaatacaggtttctgataactttggagatcacacctttggactaggtaaaaacatccaaaactcgtctgggcgcagtggctcacgcctgtaatcccagcactttgggaggccaaggcaggcggatcacgaggtcaggagatcgagaccatcctggctaacacggtgaaaccccatctctactaaaaacacaaaaacaaaattagccgggcgtggtggcgggcgcctgtagttccagctacccggcaggctgaggcggaagaatggcgcgaagcggcaagacggagcttgcagtgagccgagatcgcgccactgcactccagcctcaaaaaaaaaaaaaaaaaaaaaaaaagtccaaagctctaatgaaaaactgatgcattcatgcagattgctaacccaacatcaaggagaacgagaattacatgggactgagtgaatgaaggattgaaattactattttaaagggtttttgtttgaaacattactgattttttttatgttttgttttccagactcaagaaaatattttttttcttttgagctatttatagcttacagcattggggtaaagtatacttctgtgagcaaaatggaaacatttacctttctttctacctgaattcttcagaatttggaaactattcattagtgttcttattttctggcaatatagttatttgcataagttcaataagaacctattttcggctgtgcatggtggctcatgcctgtaatcccagcaccttgggagggcgaggccggtggatcacaaggtcaggagtttgagaacagcctggccaagatggtgaaaccccgtctctactaaaactacaaagattaaccaggcgcggtggcaggcgcctgtaatcccagctactcgggaggctgaggcaggagaatagcttgaaccttgggtggcagaggttgcagtgagccgagatcgcaccactgcgctccagcctaggggacaagagcgagactctatctcaaaacaaacaaacaaaaaaacaaaaagcaaacaaacaaaaaaagagcttattttcttttgtaactggacacatggaaacagtggttattttaccaaggctttgactggaatgtcttttttttgagtgcaaccggactgcttcgagggattgaggttgactttatacagccagtagacttggaaaaagacacacctggtaccttgcccacacaattcctttatagcgtttctaactttgcaataagtaaagaatgtcactttctgacaggcccagggacctcaagatattttggagacgttgaaaagagagcaattcacccaattcatacaggttttacaggcacagtctgatggcgaatctttggcttggcttcattgcttcaagagtttgtttttttgacacggaatctcactctgtcacccattctggagtgcagtggtgagatcttggctcactgaaacctctgcttcctggattcaagtgattctcctgcttcagcctcccgagtagctgggattacaggcatgtgttgctactcccagctaattttttgtatttttggtagagatgaggtttcaccatgttgcccagggtggtcttgaactcctgacctcaggtgatccacccacctcagcctcccaaagtgctgggattacaggcgtgagccactgtgcccagcccttgagaggtttcaaaagtcttaatctgagattccttatgaaaaaattccaacaaagccaacttaagagccatccctgtagaaaatatatctatttaaatatcgtctgttttatgccacaatgtttgttttgcgttgcaagccgttatctcctaggcatgggtaatccactttgagaggaaaatccagacatcattgtgcctaatttgctgccacctgtgtctgtgctggatcttaccagggttagctttattttctttcaactggcaaaattctgataaagcatgtagcttcacggtagagcaaaaagtgtaacttaattgaaagtcatgactttcaggagtctaatgatgctaatatattttcttctagagaggtgtctttattgtatgtaattccctgaagaaatgtaaagatttatctaattcctattgctctgacaggcgtgctcaatagaagcattgaagtaaaataaaaataacctttttaatctgtgtatttctcttgcccaccaagatatttaatttttttcttgatctttgcttttgtttatgtgaagatatttatgtctatatcatttctgtatatatcacagaaaagttttcacttgcttgacattttattctacaatgatttttagtttaagtttaaagaatggctacattcagatttattttcacaactatagtcctgctaaactgcctttgttgaaaactcagtttttataataaataaaaaatatcaaagcaaaaaaaaaagagccttcatgataaatcaccattcttactgcactttaagcagataatcatgccagagactaaactgactttgcaaataaattagttttattattattatctttgtgggtaaaagttgggatgactgtagaagagaaaattatatttcagaagaaaattataccatacttgttattagattctagtcttgataattgtttttttgagtttttgttatttgcctacaatttgggctgaatcctgaattccttcctgggtacaagtctccaaactaatgtttcctaatttttctaccatttttctgtcttggaatcaccaagccctgcaggctttagctagacaacttgatataaactttggaagaaataatgacagcaacttaatatatgagcagtgttcatgtcagctgatgtatggattactcagaaggtttacttgaacacctgattcaaactataatccagaaatatctgtaagattgccactgcaatctgaagctacttcagagactctaggaaaattagtttatagacaactccagatgttaatctttgtttttcttttgttttcatggaaatgccttttattaaacatctgattgcttgattcatagaggcctgactttggtggaagcaacaccactgcctgaaatgagatataactgttaaccgtttaattggagcggcctgttctcacgactgcaagactagttcaatggcttataaaataatccacccgctgggcacagtagttcacacctgtaatctcagcactttgggaggctgaggtgggcaaattgcttgagctcaggagttcgagaccagccagagcaacatggtgaaaccctgtctctaccaaaaatataaaaaattagccgggcatagtagcatgtgcctgtggtcccagctcctcgggaggtggatgtgggaggattgcctgagcctgggaggcagagcttgcagtgagctgagattatgacactgcactctagcctgggcaatacagtgagaccccatctcaaaaaaaaaaaaaaaagataatctaccaacccaatttctcaactggggaatgttgggctcctgctctcctgtctctgacctttcattctcccttgaggctagccatcaagactacaacccctcttccccaaagtgggccatagaaacaaaaccccttttccccaaagccaaccataaaacctaaaaatagtactctaacttccaccacccccagcctgtctgtgtaaggccataaagaaattatctgactcactttgtttgactgaaggttataagacccccattccagagagggtccagcaccacacccagaaggaagaaatgcatgctcagagaggcaagaagggtccagacagacaggctgtgctggatttccctgctcagtctattagcattagaccataccttttttgtccaatcatatttctacgtggctctccatactttgtttaacctaacctaagggggctcagggttttggcctgggcattgtctgttggggaatagagtgagtcatccccagctcatgggtttgcatccagttcttgttgtaaaaggcccaaagcctgttggatggcaaccctgagccatcgtggaaggggggttccagtttcacaaatagatactcagacagccaaactaccatctacttggtgccaacgtttgcactgtggtcaaagacttacctagcacagactgaacaaatcttcccatctgtcacataaatgtccccaagcaatgttgaagcacatgccaggatcggccttgctaggtcctgcttggtagataagcaaatggcttccttgtggtgtttttattctattttgtctcattaacactacaactttgtgttatctacttgataatctgtaattgtaaatacatacaggattatgtaatttgtgtaaatacataatgacagacttctgaaaactggtattttttacttggtgtccatttgaagctgttttaggttctgtggcacatgaaccaatggcatttaaaaagcatactctccttgctcttaaaaaaacaaacaaaacaaaacaaaaactgtccattaaaatttttgtatttttgtaaagacagggtttcaccataaaaatggacagtttcccttatatctttgggtcttcgttctgtaggctctcgtgtcacataaaattatgatcaaataaatttgtatgacttttctcctattaatctgccccttgtcaatgattttgagcaaccttctgaagaaagtgatggggaagtattccctttgctgccacaaggtatatatcagataagtcagtctattttcttgaacatatatcacattcataggaaaaacactttttccaaaagattactgtcttcccaaatacccacgttctccattttttttttttttttttagagatggggtctcactgtgttgtccaggctagtctcaagcttctggactcaagcaatcctctcacctcagcttcccaaagtgctgtgattacagacataagccatcacgcccggccccattttctcctttgggtgtatgtatattgctcattgtcaggcatcaaccatttctcttctctgagatggagtctcactctgtcacccaggctggagtgcagtggcgcaatcttggctcactgcaagctctgcctccctggttcacgccattctcctgcctcagcctcccgagtagctgggactacaggtgcccaccactacgcccggctaatttttttgtatttcttttttggtagagacggggtttcaccgtgttagacaggatggtctcaatctcctgacctcgtgatccgcccgcctcggcctcccaaagtgctgggattacaggtgtgagccactgcgcccagccctcttctaattttttatatttatcatgtatttactagaactggtttattttcgtgagcatatgttgtggattctactataaataatgcacttaataatcattaataaaacttaaatcctttccgtcttgattgtggccttttctttttgctattaatttcctcagcataggttaacctgaactcttaaaagctatttaggtactggtataaaacaaaattttctccaaagcaatccagtatataatatctggattttaaaaaagcagcctcatttaattaggattaatttctcctttcagaagttaagtgattctgtttctgtaaaacgcaaaattataagcttaattgttttccacacaggaaatgaaattcctaatctttttatccagaatcttcatgtgtttgtctctctgtccatctgtcactcctttttaaggtacctggagatgacctagaggcttgccacgcttagggtttcctccctgtgcagaagaagatgggaagtgcaaatgaggacgaggggtggggagggaagagggagtcaggtgattcagcaagtgcaggagcccacagactaagctcaggaatttgcactttgtctgctcgcagagtgagtttcatcgtggtgtgtatatattgagatatgcaacagactccactggaatgtcagaagaacttatgtttatttttcctctaacatgtgggaaagattaaactgtatttgtatttaactcacatagattggcacgtgctcattctgtgtgtcaccctgccacgctgtcacaaacttcgagcagggtcctgaggggagaggagggcatagctcctgctcccagggggttgcctgtgtagccctgcgcattcattctcttccagagggttgtgatttgtggcggtctgtgtgagcctggttaaggagagttacagattatgtcatctggtgttaactgataatctttgcaaaagggacattggctttaagagatgtctgcaaaaaaaactctaaacaaacataaataaaaatttaaaaggataaagccagaataataatgaaaatattagtaatgtaaaacaaggaaatgtgtcatgtttttcatgataactaatattttttcaatttttttttttttttaagacagtctcactctgtcaccaggctggagtcagtagtgcgatcttggctcactgcaacctccacctcccaggttcacacaattctcatgtctcagcctcctgagtagctgggtttacaggcactcgccaccatgcccagctaatttttgtatttttagtaaagacagggttttaccatgttggccaggctggtctcaaactcctgacctcaggtgatcggccgccttggcctcccaaagtgctgggattacaggcgtgtgccactgtgcctggccccagttcttattataagttctccattaaccatatcatgagattaaaaaaacaacaatgatttcatcggaactgacaaatagtgggtgacacaattttgatcatcaagaagactttaaaagaaggatttgtatcactgtcattactgattacttggcccttgtgtatactgggcctttagctagggctggtacaataaaataaccatagttagaaagatattttaaaggattacttatttcatgtttatctcacccttttatccctatttttgggcatgatttattattattaggtttttaaataaataatgaaataagcatgttaggtttgcatgctgctttggttaacattgctatataaccaaccaccccaaactttgtggccttaaaacaataatttatttatttatttatttatttatttatttatttatttatttatttttgagacagagtctcgctatgtcacccaggctggagtgcagcggcatgatctcggctcactgcaacctccacctcctgggttcaagtgatcctcctgcctcagcctcccgtagagctgggattacaggcacccgccatcaagcccagctaatttttcctttatttttagtagagacggggtttcaccatgttggccaggttggtctcgaactcctgatctcaggtgatatgcctgctttggcctcccaaagtgctgggattacaggtgtgagccactgtgcatggccaacaataatttatttttatctctcatggtctctagattgcctgggcccggctgagcagtctgagtcagccttatggtctctcatgtgtttttaatcagtcatgaggggccggcatcatctgaaggcttgactgggctggatgtttaagacagccactcacagggctgacagtgatgctggatgttgcactgttgactaatgagcctgcacgtggctcctccatgtgatttgggctatttatagctggggtgactgggttctaggtggggtagttccaagatccttccaagaggaagaaagcagaaactgcctggccagttagtgtatatgcttagtcttagaacagtgtcacttccatatttctccatagtccattaatcaaagcagttacaggaagcagacagacaggaagggaaaacacaatgcaacagaaggagagattgaagtgttggcagctgcaagccaagaaacacctgggttaccagaagctagaagaagaaaggtaggattctcccctacaggttccaaaggaagctgggcctgtccacacctcacctctggaactatgagacaatcactttctgtgggtttaagctacccagtttgtggcactttgttactaccgtcctaggcaaatgatacagtaactacatacacagtacatagaattgctcattttacttcgttgaatgggacttggcattgaataagcccaaatgagaattcttttgtcaagatttttttatggctcacttttccagagacgtgacatggcaggagtaaggggagggtttggcaggtaggaattatactcatctgtcattgtcttcccaataccaaccaggaagcatgtaaataatagctgtgcagtttgttttctgaaccaaactgggccttattttttttaaagaaactttattaaacaaacaaaaacctagaaacactagatgtatatttttaaggtttctctcacataatatcctaatcatcagtataccgtaatccaagggctacatataactgaaaaataaatgggtcttaaaaaaattaaaacatggtatataacactagctaacatgtactgagcagttactaagtgctaagtactgctaagtcctttatagatatcttcatgttgagtgtcgtcactgcccattacttactctgagtttaaatatgagactcaaaagaggttagtaatttgccaaaagtcatagggcttataagtgatagaaccaggataacgaatctcaaccaagggacttcaatgcccaaaccggtgctcagactgtagccccatgtagttagctatttacatttgaaaaaatttttaatgtttattattttttttaagacagggtcttgctctgtcacctaggctggagtggagtggtgtgatcttggctcactgcaacctccacctcctgggctcaagtgatcctctcatctcagcctcccaagtagctgggaccacaggtgtatggcaccacgcccaactaatttgttgtgttcttggtagaggtgagtttcaccatgttgcccaggctggtcttgaactcctgagctcaagtgacctgcccacttgcctcaccctcctaaagtggggggattacaggtgtgagccaccatgcccggcccagctatttacatttaaatataaattaaaatgaaacaagattaaaaattcggtttctcaatcacactaaccacacttgaagtgctcagtagctacatgtggcttagtggctacctggcagatatagaacgtttccatcagcacagaaagttctactggaaagcattgatccaatctctttgaacagtcacaatgcatataaagtccttattatgactgtacaagggaagacaacgagtagaggaaggcagaaaataggaaaaaaggaagaagaaagatttagggtgagggagagcagttctatgaagaaaagaagctcatatctaggagtggagtggaccctgagaacatgttagtctattatattctaaactttggcagttaaaattccaaagtatattaagtacatgctttctaaaatattagagagctgcagttcaacagatttttaactctccacagcatgtccggcactgggtgaggtgggatggctaggtgaataatataggcattgtcatgtgtgttcgtgtgaagagaccaccaaacaggctttgtgtgagcaataaagctttttaatcacctgggtacaggcgggccgagtctgaaaagagagtcagcaaagggtggtgggattataattagttcttagaggtttgggataggcggtggagtaggaacaattttttgtgggcaggggatggatcttacaaagtacattctcaagggcgaggagaatattacaaagtaccttaagggcagggaaggatattacaaagtaccttctcaagggtggggagggtgtatcatacaaagtgcattcacaagggtggggaaatatcacaaagtacattatcgcaagggcagggagggtgtattgtcacaaagtcaattgatcggttagggtggggcaggaacaaatcacaacagtggaatgtcatcagttaaggcaggaacctgctattttcacttttgttgatcttcagttgcttcaggccatctggatgtatacgtgcaggtcacaggggatatgatggattagcttgggctcagaggcctgacagacatgaacttcccatcataaaattagaagagcattaatcaaatgattagaataaaatattaccattattttgaaatggcaagcattgtatgtaaataaacagcagaggaacccactgtagcctagacagggttcagagacgttcctgccaaggacatggcacagggactgaacaaggaaggatgacagtgcctggcaaaggcagggaatgttacaggtatttgggcacctgtgagaaggcctgatgtccgaaaggactgaaataaattaaatgtgtggggggagagagaaagaaagagcctagcaaaaggtgagctggagagtcagaggcagaaggcagaatctgggatgggctgggagcttgccaatcattttgtcaaatgggtgatgtgaagccttgaaggttttttgaccaagaggagatgtcttcagatttgcgtttgagacattttcactggttgtcatgctaagaatggcttaaagagaagcaaggctggggtcagaggagctgcttggaagctgtttggtactaggatgcggataacatggttggagaaatggcaactgtcagggtatttggagcaagaatggatagacattggtgatcatcacttggatgcatttgagggacaactgctatgtttctactagagcaactacatagagcaggagtaagcaacttacagtccacagaccacatttgctctgtcccgtttttcaaatacagtttaatggaaacagagccatgcccgttctttcacctattctgcatggctgacatcaggcatggttctaagtaatatacataagtttcatatattaatgctcatctatcccagttgacaaacatgaagtgttgctattgtctcattttacagcggagaaaactgacatagagattctctttcgcacccatagcttcagttaccacctctatgccaatgattcaataatacctctaatccagacctcttctctgagcttcagacaggcagatctctcacagccagtcttggagacacttcagaaatcataggtcccaaaccagactcctcctcatcccctcaaacacattctttttcaacattccttttttcttagtgaacatcaccaaatagataagcaagtcagatccaaggaggcctccttggcacttctctcatccttgtcccaccttatatcatctatttttctttttctttttttttgagatggtgtctcactgtgtcacccaggcaagtgcagtggtgtgatcctggcccactgcagcctcaacctcaccaagttcaggtaatcctctcaccttaatcccgtgagtagctgggactacaggcacatgccaccgagcccggctaatttttgtatttttaccagagacagggttttgccatgttgcccaggctgccaccttatctccattcttgctgaaatctggctgtttctctccacttctattaccaaccaccagccaaatctgacttattaaaaggatcatctcgtatgtgggttctgtaatagcttcttcaaaatccattcctctccacccagaccctcttccaatctccaaactgcagccaataccttcaattctgtcaccgctcctgcatactccacctaatccttaacctttcaatggtttctcttgcccctaggttaagctaaattgaaaactgctaaagctacagcttcttagtgtaactagtaagtacagtgactactatgtctggtttacttcagctgttgctgactaatagcacttcttgaatgaagaaattatattaccgtactgtagggaaaaatttgtacttcaatggaaaactgaattatttagagcaaacctttaaggttatctgattctgattccatgggccctttcattgggtcttacattgtttcattgtttttgagttattttacagatgactgatagaaatgcaaaataattattgcatgcagtcatgcaagtaaaatctgaaggtcagggttcaattaacttctctcccctactgtggaagaagccaatttcatttgcatattcatttcaatatttctgacctataaacatgcctgttctttgaaccagtttttatatctgcctggtaacttcattaaatgatttaaataaactctataatttagtttattttatacctgtatgacagtcaggcttttaccttatttttgctttttaaaattattctttagctctccctaaggcactacttggctggccctttggctactcactagcccaagctccatcctcttctgtctaccgcagccccaggctctcttttggccctttgttccagccctcctcagagaagttcttttgtcctggaactcactttcataccaggtgctcttcatcccttcttcctttagtaaatttctttaatctttcagatttctgctcaaggatcacttgctgaaagcctttccaggcctttctgagtcaatacaatccattattagaggctcttagagcacaggcagcacttgttataattttacatctgtctgtgggattccttaacactttctaacacaattaacacttttctctctggctgggggcaatgcatgataacaggatgatggtatgctctcaaccctcccccagcaactagcccagtgcttcgaacatggtggatagatacaccgtttttattttagacagatttttgagtagcaagtacctactgctcaggagacagatggactgaaaaaatatatttgggagtcatcagcacataggtgcagccatgaaaatgcacgagaagcaaaaccattggcaggaacaaaatgaaggctattagagaccttatttaggtggaataattggacagaagcccttaatggggaggaaatagaagcagttaatacagatggaggccgggcgccgtggctcacgcctgtaatcctagcactttgggaggctgagataggtgggtggcttgagtccaggagtttgagagcagcctgggcaacatagcaaaacccggtctctacaaaaaatacaaaaattagcccggcgtggtggcgcaggcctgtagtcccggctactggggaggctgagatgggagaattgcttgaaccggggaggcggatgttgcaattagacgagatcgcgccactgcactccagcctgggcgacagagcgagactccgtctcaaaacaacaaggacaaaacttatcttataagcgaccctggacttccagggacactcgccgctctatggtggtacgtgacctgcctggactctgtggtctttggagcttgggaccccaccccagcgtaagaggcctttctgtgccttgtataaaggagaggaaaagtgtaggttttctgagttgataagattagagctacagtatattatcagtagcgttgtatgaaaccatttaaaaaaccaaaccggatttaaccgctttcacccagaataaactgccctccccctctttccaagatcaagtcagccccagttaccacttcctattaatttaaaaaccaggaaggctcataatttaggctgacgttgccccaggcgaacactgcatataagacaatagctattccaatcctcctttccctttctaaaccgaatagtacttctaacatcacttttccagtcctctttctaaatattgcgatcacgagcctacatcggaaaactatgaaaacagtatgattggagctcttgatggtctgctttgcctgaaaacgatgaaaggcattgagatctttgggcagaaatggcccttagggaatgcgagcctggtagccccataacaccccgagttacaaattcggtttgggtaggtggcgcagggaaatctaaaagctggattcacgttctcccccttcagtttgcacatagcggtcagtggcagacaagagcagacgcacaaatgtcaatccccgcccgcaaactctcgagggcagaaactgctttttgtcagttggatttggagtcggtggaaaagctgccctaatgtagtttctccgaggtttccttagccttgaccgaggggcgcttcccggccattcacctagaggttgtttaataaacaaggatgctcgcgaaatatctgcgcttggaaaggcgctcgttcgtggcgcgcattctcgggcctccgcaagcgaccccggtgacagggacaaccgcttcggttttagcgactgcagacagactgggacgagacggttggaggctcctccccaagggatgctggaggggttgcgtcgtaccctgcgcctggccctggcgcgcggccccaggtcgtggtacccagcgccctatgggccgtgcgccggggcttggccacaccgcctgctttcgcttccagccgcgcgctccgtgccactgccgctctctgcagccccgcgtccccgcagcctccccatggccagcccgcttcgctccgctgcggcccttgcccgccaggtacctcgaacccgggcgtttgcggaaggggggaggattggaacccgggtctcggtagctcgcgggcctggccgggcgccttgtcgccgtttcctgcaccatcctccttcgccttgccctccattccgcctccagcgaggcgtcttcccttccccgcatccctgcccgaaatctggagtcccagcctgcaatctccacctcttcgaggttcccgctgcccaggtctagcaccctcatgggtaacccgctccggagcgtggcgaggaccgccacgggggacgtgagggtagctatggactcgctctgagggaggaggcgggagctgaatctctgggctgccagaacccacagccacatcctacgtgactctgccaccccaaaatattttgaccgcagccttctgcctccttggatctcttccttccccacccccacccccgtagttatttagcagattacgcattaaaacaaatgtctgcaggttttcccaattagtcccgcttccctgtgtctttatcttttaaattgcccactaataccatgaggtttaaggtgtggggtggatgctgcggcatcggaggaccctgctggtggaggaaatggttcacgcccgtccccgttccctttgcaggcttgctattgtgcgtctgtgattgacaagaccacgaggctgagcgcgccctggagatttttctataaatggcttaacaccccagtctagactatttgctcggatataagggagacaattgtttttttgttctttgccggcgaaccctggctctgtagggctgacctggaatttaaccagtcttccctgagccggcggaggaggacaaaaaccgccgcgaccccggcagggtgggaagtgcagggcagcgctcccaagacacgcttgttggaggttcgggcctgggtgcttggttgtctgagcctccttttttgtgtttgcctgggtcctggagaggagcgcacggtatcatggtgagcgtcacgtaggttaccccgggtcccgcttacccacctgcatttacttaatggtggtttaattcttctttaaggattgcagtaacggatgctccgcagagtgtaccggagaaggaggatcaaaagaggtggtggggacttttaaggtaagttgcttgccagaggcttagtgtctaaagcaacgttcaactgaataaatccatttcttgttgagattcggggaaattttcactgtgtgggttacccagttcctaggttgtgttgccagacttttaaaattccactcttagaggaaaaaaagccatttagagagtgacagtacattcatcacaacaaaaattatctagcagctaattgctgattttattttgagtcatatatttttcttgaaaaatagtcaatgcgtaaatattaaactagttgtttatcagattccataatacgtacaaaccttcagtctacttgtagaaaaagttaaactgtgatttttctctttcagtagcacataacactctacagtgaaagtgttgcattttcttcttttctatctgaattgcggggtttatatagtaaatagctcatacttcaaacagtgagaaacaaagcacgttgaaaactgtacaaatacaaatgtaagatgtaatattattttttctataagtctatctcctaccctccctcctcgtggaggttttagcttcttctttttatgcctagtgctgctcttctgcctgtttgagtcactgtcaattgtcatcagacaattgacacagagtgtcctaatgatctcacatcctggcggttcagagagggaaggaaacttgactcatcagtttctcacacattgagctctctcacagtgtgctggagactgtgccatgcattggacatccaaaggtgaattcaagattaggtctctacttgcaaggaatttttattttatttttctttttccttctcttgctgtcatcttagcaaggattttttaaaaagcaaaattagaatattgcaatttcttttctgttttttgagacagggtctcgctctgtcacccaggctggagtgcagtggcacgatctcagctcactgcaatctctgcctcccaggttcaagtgattctcctgcctcagcctcctgagtagctgagattacaggcatgtgccatcacgcccagctaattttgtatttttagtagagatggggttatcaccatgttagccaggctggtctcgaactcctggcctcatgcaatccacctcccaaagtgctgggattgcaggcgtgagccaccaagcctagcctgaagaattctttgcaaagaaaaatatcaactcaaatttaaataatcttttcctttctttttcttttttttgagacagagtcttgttctgttgcccagactgaagtgcagtggcaccatcaattaggtatcactttcagccttgatctctcagactcaagtgatcctcttagcctctcaagtacctgagactatcggcttgcatgccatcaggcccaactaatttcgtcattttttgtagagatgggatctccctgtgttgcccagactgatctccaactcctgggcttgtgcaaccctcccacctcggcctcccaaaatgctgggtcacaggcataagccacaatgcctggccataaataatcttttttatttgttaatttagatttctgtatattaggttttatttaggggaattgcctgtttacactcatgtatttacacatcaaaacatgagttatggtggatgtattcacagcacatatgtaataaggcatgtgtaaaaatgatattgataatttagggaataaaaatggtagattttatagaccatctttgtttttgatatacttttctctgtctcaaaaaacaaaaacaaaaacaaacaaacaaacaaaatatatatatatagcctacattgttgttaactataatcaccctactctgctatgaacagtagactttatcgcttctatctaactgtatgtttgtactcattaaccaacctctcttcctccacctacacccttcccaccccctgccatcttctgatatctatcattctatgagtactctcttcctccatgagatcaacttttttttttagctctcacgtatgagtgagaacatgcaatatttgtttttctgggtttttttttttttctgtgtttggcttatttcgcttaccataatgacttccagttccatccatgttgctacaaatgacacgattttactcttttttaatggctgagtagtattccattgtgtatatgcaccacattttatttgttcattgatggacacttaggtgattccatgtcttgactattgtgaatagtgctgtaataaacatgggactgcagatatccctttgatatactgatttcctttcctttggaaaatacccagtagtaggattgttggtttatatggtcattctacttttagttttttttttggaaagcttcataccattttccacagtagataaactaatttacattcttaccaacagtgtataagcgttctcttttctctgtatcctcatcagcatctgttattttttgtctttctaataataaccattctaactgtggttgcttttgacatatttctctacctttttgttaatctacatcatttataacatttcatatggccttttgggtctctcttgggtagttttcgtatttcttctcccctccccatttatgatgcagtcatattacatgaggatgcagttttgcagcagggcctagcaatgagatacgttgttacacatcctggcgaatctttctgtggactctaggatcctcttcatttgcaagaggtcagccatctatttcttccaattcctccagcttcacatatctccacagaatgcaacactgcaaatctgcagttctcttcatgatcctctttattagattttaaaagagtatctccaaaagatgaacatagtgcctaaggctttccaaatggagtaagaataatgcacaagaacctagaataaagttattaaatgtctgatacagttgtaatacagacttgatttttgaaaaatgtggccaatgaagagaagagcaaatgtgctatacgatggtgagcaaaaggtgttgacaggcctggcatggtgactcacccctgtaatcccagcactttgggaggctgaggtgggtggatcatttgaggtcaggagtttgagactagcctggccaacatggtgaaaccctgtttgtattaaaaatacaaaaattagccaggtgcgatgacacatgcctgtaatcccagctacctgggaggctgaggcttgagacttgcttgaaccggggaggcggaggttgcagcgagccgagattgtgccactgcactccagcctgggcaacagagcaaaaaaaaaaaaaaaaaaaaaaaaaagtgttgactgaaccctggctgaaacagttttcaggtgctttcaacaaatttacacttccctgccctgagcctccctatttcagaacaaatgattacccaactgcaaactttgaattaggaagttgtttttaatatgccctgtttttctcaatatttcttgccatttcacaatcagttattgtggcattccaattcttccacaaacatatgatgtgaaacatcctgacttcgatgtcatcagggaatgtggagcattggaaagagacagattaattatgcagaagaaagtatcatttgacaaaatattatttttatttatctttggaaaggaaatctagaaaaagaaaatactttttaaagaacactgataaaaattgtttataaaatttgtttcctttaggaaacaaatcgttcccttaaaactacatttcatatctgccccaaacgagtcacatgtcttcagctaatattgcttgtttacgtttgaactttattcaattctatcacctagtaatttagtattcttaggtaatttctctttgagctcaggttaaaagttgttatttttagttttcagagttgcagaatttttttttcaagtagagaaaagttcatgatgagattctgaagccacctaatcgtatattactttgaaaaactggatatatgccgggcgcggtagctcacacctgtaatcccagcactttcagaggccgaggtgggtgggtcacctgaggtcaggagttcgagaccagcctggtcaacatggtgaaaccccatctctaccaaaaatacaaaacttagccgggtgttgtggcacatgcctgtagtcccagctactcaggaggctgaagcaggagaatcacttgaacctgggaggcggaggttgcagtgagcccagatcacatcactgctcttccgcctgggtgacagagtgagactccatctaaaagaaaaagcaaaacaaaacaaaactggatacagggcagtgcttaggtacaaatcagaaagttagaggttgctattcatatcattaagaaataatgtgtcttacgaaagaatgtagcagtttactgaaatagaagtcatacctagaaatgtaataatttatctttaattgtcagaaatttaactgatattatgaagttctaattataagaacacttatttgaggttaaaaattaccttattctatccctgctttgccgctaatttgatctctctggattagtgggttattgtgggtcctatgggtattttaaggagaggtctcagaaaactaaaaattatatatactggatcataatcattcttgtcacccactctcatctttctgtttttgttttgtgttttactacccttccccttttactaagtagtcttagtagaagaaaatttgcattaagtttgtcgtactgtattgatatggctccaaatgtttcttagcccagggtcctccccattcactgataaaagctaactaaggtaaatcacaggtgtttattgtgcaagaatactgtgaaactattcatgtaataaaaagtttgtgttagaatttcactctctttaaatcctggacatcttctgtgagtgtatctgaaagcagccagacatcttcagtatttaagaaaccctttactattctgtgtgctaggcactgtgttagctttggaattcaactgtgaatactctagccagacttcttgtctaaatagtccagaataggggttgctaaactttctttctttttttttgagatggagttccactcttattgcccaggctggagtgcactggtgtgtctctgctgactgcaacctctgcctcccaggttcaagcagttctcctgcctcagcctcccaagtagctgggattacaggcgcccaccactacactcagttaatttttgtatttttagtagagacagggttgtgctgtttgccaggttgatctcaaactcctgacctttggtgatccacccgcctcggcctcccaaagtgttgggattcagggtgtgccactgtgcccggcctgctaaactttcttaaatggctagatgataaatattttaggcttgagggccatcaggtttctgttacaactagttggctgtgctgccactgaagatacaagaatggcgtgactatgttccaataacattttaatttcaaaacaggccagctggctgcatttggtctgcaagtaaagtctgcctgaccccctacctagtccagaggacaacgggagagaaaagggattcaaagataaaaataatttagctggaatatatttctttaaataaacttattatacttagtaaaaagtcttaaattaacgtttttacttgaattaaatagtggtaaaacaggctgggcacagtggctcatgcctgtaatcttagaactttgggaggtcgaggcaggcagattgcttaagcccaggagttcgagaccagcctgggcaacatagtgagtccctatctctaaaaaaaatacaaaataataataataatggtagaacaaagtcaattttttattgaaacttggcattttattggcatattacaaagtagcattactagactagcctgaacattacagtaatattctgtccttaatgccttttgtgtcactgtaatatgagctttctgtttgttttggaatatgttttcagcctgaatattattctaaaaatacaatttactatcattcataatatatcaaatgactcacgtagctgcaaggcagtgaattaaacagaattagatcattttaaaaataatgataagagctgatgatgtaaagtgaaggtctgtatttaatttgggagggaaaagactttttttgtatattcaaagagatggagtttgacatcccttcacaacctgttacaggttgaacttgcccctgtttttttaactgatcaaaaagttccttctcttgtgtttctttttttcttctcttttctcttcttttcttttcttttttttttttctgagacagagtcttgctctgtctcccaggctggagtgcagtggtgcgatcttgactctctgcaacctccgcctcccgggttcaagtgattttcctgcctcagcctcctgagtagctgcgactacaggtgcatgccaccacgcctggctaatttttagtatttttagtagagacggggtttcaccatgttagctaggatggtctcaatctccaaaccttgtgatctgcatgcctcggcttcccaaagtgctggtctcctgtgtttttgtcagcattccacagatgctataaagttagtggtggtatcgcatgcaatttgtacgcttaatgtttggccatttgcagtgggcaaactggctatgtcgggagctggtgagatgctgcttgtggggagttgtttcctattactctgatttatctttgtttaaataagagttcctttgttcactgtttcctccacacagaacagaggatttatatcttagtgttcattctcaactttcctgttttcaaagaggaaaacatttgcttcactttgctcatttcttctccagtgcacccagaggattttgaaggcttatgccaacaattctttggggcagttggagtgtaaccattgctaaatagcagttcagtacttaatgacattcattttagtttaacaaatcattgtgagtgttgccattttttattagggaaaacatctctttcatctttcccaaatactcaacatgagtcctatggtgagagtgaaaaagggttgtattctttttttgcatcatcttaccccatctgctattttgtccctcttctatatatcactgaaatttggttctgatattctattaggcagtgtacattgcagagattatgaataactggccgaattctgaatgcaggcatgatttgttcagctcagagtgttaaatttctgtgttagctgctaacctttaaaagtcaattgatttcctttttttttttcccctctgtataatctagccagcgaatgctcagtagcttttctgtaaatagtgatgatttttcttccccaggctaaagacctaatagtcacaccagctaccattttaaaggaaaaaccagaccccaataatctggtttttggaactgtgttcacggatcatatgctgacggtggagtggtcctcagagtttggatgggagaaacctcatatcaagcctcttcagaacctgtcattgcaccctggctcatcagctttgcactatgcagtggaagtaagtacatgggaattaaagagagtgacatgcttgcacttcactgtgggtactaagtagcttctcctgctaaaatagctcttgggcagtatgggctttatcatatttaccagaggaagccgaaaatgtctttaaaagttttcctatagacagttggattgaagataaatcttagcagctaatttttcagataatcttgcattttctgtgacgtcaataaaaaaattatttaaagcaaatagaaaggacagctggtgggaaaattggcaattaaaaagccagcactgttgataatttaataagtcacctttcttcttagatcttctaataattgagaaagggtcattgagaacaatattatgatttgattttaatgctaactccacatttttatgaccagtaataatgtctagttatgcatgttaagggacatgtaattaaatgtcctccttcagccatgagttgaaataattttaagcataaaatgtttaaagaattctttctctggtccttttcagggtgcacaattaaccagatgcacagtatacttcccattgtcttgattctcattgtattttacttttgaatgatttggacatctttcccagaataataggggtgctggaaataataatagtcttcctattaagtgctaaaatatggtaatagtaaaatattaatagattaatgataaaataacaacttttgtttactgaattcctgcaatacgttctgtattatgttccatatatgaatcatctcatttaattaccttaagtgagaaggcatgtgattaagcattcaggctttgaagtcagacatcctgggctcaaattcggtctcatttgctccataggaacctttatgacttgaggaatttaatcatttgtgctttaatttctttatctataaaattggggtagttataatatctatcttacagtgatctcataagtataaaataaagtaatttatctaagcatatagagtcatatctggtgcatagcgagagcccagttgttagcaataataattaactcttgaagcagtggtctcatccattataaaaggaggctcagaagagttgtttcttgactaatattacacagcagtaagggtggagctaaggttccaatgagaagcttctttctgttatatagcccctacatgtatacaccaaaattactaggatgcttttgcaattaactccttcaaaattataaattcatataattttggaaagatattcactgtccatatgtatccacaaaatgttgaatttaggaatctaagtttctgttcccagctcttcctgttatgtcaatttgaatgagttctttcattatttgccacaagccctcaccatgtcataaggtataataaagaacaggtgaaatgaagtgcttttatttatttatttttcagacagattcttgctctgtcacccaggctggagtgcagtggcacgatcgtggctcactgcagcctcaaactcctgggctcaagcaaacctcgtacctcagcctcctgagtagctgggaccacagacacatgtcaccatgtctggctaatttttacatattttgttgagactgggttttgccatgttgcccaggctggtctcaaactcctgggctcaagcaatcctcttgccttggcttcttcaagtgctgggatgacagccatgagccactgctcctggctatgtgcttttaaatttgaaaggaataatatgcccaagcccaggtcactggttctcaaacttaatgtgcatcagaatcagctggctacatctccagagtttctcatttctaacaagtgtccagatcatgttaattttgtcgctccagggaccacattttgggaattgctggcctatgggaagtaaatgagaaatgatttaatgtcatttttggaagttaaaaaagattttggtggtcactggtttttgaaaactctttgaaggctgggtggggtggttcacatctgtaatttcagcagtttcggggagatggggttcttgggaaatgagccctccacccatgggatctgatgctatttccacgtagataatgtcagagtcgttcaaaccagagtgactccatcctgaataggggctgggtaaaataaggctgagacctactgggctgcaacatgatgagaccctgactctattgaaacaaaacaaaacaaaacaaaacaaaacaaaacaaaaaacggccaggcgaggtggctcacgcctgtaataccagcactttgggaggccaaggcgggcggatcacgaggtcaggagatcgagaccatcctggctaacatggtgaaaccccatctctactaaaaatagaaaaaaaaaaaaaaattagccgggcgtggtggcaggcgcctgtagtccaagctacttaggaggctgaggcaggaaaatgacgtgaacccaggaggcggagtttgcagtgagccgagatcacgccgctgcactccacactgggtgacagagcaagactccatctcaaaaaaaaaaaacaaaaacctctttggccatctatttagatgagttggaatgctactttgattggttttgccaatttagatttttgtaattagggtagtttaaaaaaactctcaaattactgttatcctttgttaaaaaccaaaatcttttattattagtcttctgcttacaatataagtaaaataaatgttttgtattaataactggattgtatattgcatggttaccactatgtaacaaaattaatagcttaaaattacaagcgtcattttaaaattatttttcatgtttctggggttgactaggatggctaagtggtttttgcttggggtccgtcacacggttgctgtcagtggctggggttagagtcagctcacaggcttcctaactcatatggtgctggagggagtgtctcttagcatgctaatgcttcataatttgtgtataatgaacagtgaggatgaccagaggtcactttcattgccatctgggctgcaaaactcaaggagttgaaggctcttccggcattacttgttctccatgtggtctcctcaggatggcagtcacagagtaggcagccttcttatgtgctgacctagggcccaaaatctgtatgtgtcagttgactgagcccagatggaagctctattgctgtttacgccctagcctcaaaactactctttcaagaaaaattctccaaccgagtttttcctctactctcacaccaccacaacaatagtcaacataggagacttctatgatcaaaggtgtagggatttctccccaccaccaagcagtgaaccccagctgggtgtcctccaattcaattctcacactgttattacgggaaaggtgtcccaatccagtccccaagaggttcttggatgttgcacaagaaagaatttggggagagtccacaaagtaaaataaaatttattaagaaagtaaaggaaaaaaagaatggctactccgtagacagaggagctccgagggctgctggttggctattttaatggttatttcttgatcatttgctaaagaaggggtagattattcataaattttccagaaaagggatgggcaattcctggaactgagggttcctcccctttttagaccttgtaggttaacttcccaccattgccatggcctctgtaaattgtcgtgacactggtaggagtgtctgttagcatgctaatgcattataattagcttataatgagcagcgaggacggccagacatccctttcattgccatatgggatttggcaggttttggctggcttctttaccacatcttgttttatcagtggggtctttgtaacctgtatgttgtgccgacctcctatctcatcctgtgacctagaatactaacctcctgagaatgcagcccagtaggtttcagccttattttacccagcccctaatcaggatggagtcgctctggtccaaacacctctgacattatccacctggaaatagtgtcagatcccatgggttaagggctcattccccaagaccctaaccaccctcacctggcccagacacaagtcacaagtcctgtcctctggaatgtctgactgagaggcatcaagttggagttcccatgaccccctcttctggtttgattaatttactggagcagctcacaaaactcagggaaacacttaggtttagtggtttattataaaggatactgcaaagtgtatagatgaagcgatgtgtagggtgaggtatcgggggatagagtgcagggcttccatgccctcccggggtgtgccaccctttaggaaccttcatgtgttctgctatccggaagctcactgaactcattcttttgggtttttatggaagcttcacgtcaatattccttcccctggggtatgaggcaggaccttcaccggagagggtcttttattttatttcattatttttaaaatataagatggggtcttgctatgtagcctagggtggtattgaattcctgggcccaagtaagcctcccgcctctgcctccgaaagtgctgggactacaggcatgagccacccagcccctttggagaggatcttaagactcacagttagaaaggagggcaggagaaggtcagagagattctgcttcctgcccctgaggcctaacacacccagcattataacaaaagactgtaacaagggctatgggagttaccagccaggaactgtaaatcacacagtattatttctgccttactcttatcagtcatgatggttacaaaggcctgtccaagttcaaaaggaggaaaaaagcactccacttcttgatgaggaaggtcagggttctggaagagcatgggggactggaaatattgttcggccatttcatggaaaatacagtctgtaatagacatcagtgataaatggggagatatggtggatgtattgttttcctctgagtgccaaattgggttctaagatttcacaggccagatattattgaagtggctacgttgtctggggtatataccttggggttcgtcattttgtgccaggaaaatttaggacaaggactcacacgaggagtttaggagtggaggtttaataggcagaagagaaacagaaacagttctttctgtagggagagagggatcttcgagggaaaagaccatccagcagcagatgagctggattttatagtcaggtttgaggaggaagtgtctgatttacttagggctaacaggttggtttgatcaggtatgacgtttacatagcacaccgggaagtctggttgccccaccctaatccttttatgcaaatggactttcctagttgattggagctatcttgtctgctccttactgtacaggtggctgacaaagagaagggaagatggagccgccatcttgaacatgattgacgcagctgtggatatctatgtctgcagcttgattttacaggctgctcttctttagaaaggggctgcttttcattaaaacaaaaaccttactgaggactcttgtaccctcactatctgcaggtgatttcttaactcctgtatcattattatagtgtcataggaatctaggaagtgtgattgccttctggagagaacttcagggtccctggattttctcactaatcatattcatttcattccctgtttacctgtttaataaatgttgagtggctactatgtgcccagggctgtgcaaggtgcctggaataggatggcaagcaaaccaaccatgaccttgctctcaaagaattgttttctttctttcttttttttctgagacaaggtcttgctctgtcgcccaggctggagtgcagtggcctgatctcagctcactgcaacttccacctcctggcttcaacagattctcctccctcagcctcccaggtagctgggattataggtgcccaccaccatgcccggctaatttttgtatttttagtagagacagggtttcatcatgttggccaggctagtctcaaactcctgacctcaagtgatccgcctgcctcagtgccgagattacaggcatgagccactgcacctggcctgttttctgtcttttttttttaacccccacatggaaagttaggcagggatttaatttcaaagagtttcttcccaaatattgtggtgaaacatctagtccatttatgtttcaggctttttcatagatattactgtttctcttagactgacagacttaggacatcacatgattgaatgtcaacctgacttttaagttcaataatagtttcattttttaaatgcaaaattaaataggagtaatatccttgaacatgtttctccttcactcatcggacctattgagtctagaatccattttattttgagagctccaactacatgtggtttctgttaatatctgaaagtaatttttaatatctgaaagtttcaaatagtgataatatttgaaggtttcaaatagtggaggagagacgcaaactgcgagtagggaacgcggattgaaggaaatgaaaagttgataataggcacttcattttcagattataacaaatatttagtgaaataaagcataattttaaaaaatggataagacatgtatgtactatttaatgtgtactaataaatgaatgctcatatttgccatccagataaagaaatagaacagttgaacatcacagaagccctcgcgtgtcccattcagatcacaaactctatctttctactggtaaccattattcttacttttgtgataacctttctttgctttcctttatggagtgtgtagattcttaacactatagttttgcctctttttgaacttcatgtaaatgaaaaaatgtatatattttgtgtttgtgtgcatgtgtgtgtgtgtgcttgcacacgtgtgaataccccttattgtttgagcttagtattatgtaagatctaaccaggaaggaccaacctaacatttgtggggcctgggacctaagtatagacagagatgacatggtccactccatatctgttcccatcccagttctgccctgtgctacaaggggtcttccagacactgcataggtacccataccacctgcaggcagatgacctttgcctgtcctttggagttaggcctgggtaccctactagtggtgtctgctcttgggatgataaacccgaggggcttatcagctttatatatatatatatatatatatatatatattttttttttttttttttttagctagcatctctctcgttcttccaggctggagagcagtggtgtgatcttggctcactgtaatctccacctcctgggttcaagcgattctcctgcctcagcctcccaagtagctgagattacaggcacgtgccactatgcctggctaatttttgtatttttagtagagactgggtttcaccatgttggcatgtgagccactatgcccggcctcttttttttttttttttaagagacagggtcttactatgttgcccaggctggtgttgaactcctggcctcaatagatcctctgtccttggtctcccaaagtgctggctcagtcattatgttctttactgccatccattgcagtataaaaagaataacagttttccctcagaatattcttggtgaaacagtaacaattattaattttattaaatcttggctcttgagcaaatgtcattttaatattctgtgtgataaaatagcaatgtcacataaagtgcttttacatacttaagtactatggttgtctgaagaaaaaggagttgtgtgattgtcttgagtttgtaagtggaactacttttttcatcgagcaccgtttttacttgaaataacaaagtatgaatatgaatgcagatttggccatttggcagatttttatttatttatttgagacaaggtcttgctgtgtcacccagactggggtgcagctcactgcagcctttacctcctgggctcaagtgatcctcctgcctcagcctccttagttgctgggaccacaggtgtgcagcaccatgctcagctaatttttaaattttttgtggagacaaggtctgaccatgttgcccaggctggtctcgaactcctgggctccagcaatcctctcgcttcagcttctcaaagtgctggaattacaggcgtgagccacggttcccagctcgccttttcatatgtttattgggttgctaaatatgttcttatttgaagtgcccacttgttcaagttttttgttcacttttttattgctgtctttataattttttgatgacaagaaatatgtttaaattaaaggcagttttgtcaatctgccttatgtttggaatttgttgtgtctttaaagactcttttcctgcccttatattataaagatatcttatagtattgatattgtcattcacagttaggtctttaatcctagaagttgatttttgtatgaagtaagggcccaatttatttttttccacctatgtatacccagttttcccagcaccatttaaacgggcggtactttcccctctgatatgtcatgatgacacctttgtcatgtacacatgagtttgcttctggatctctatttgtgttcagttgttttacttgtctgcataaatgccacagtcttggtttctcagtcattataatgagccttgcctgctaggaagggtccttctactttgttctccaagagtgccttggatattcttggtcattttctttccatataatttttagatttggtttatcaagtcgataaacttttgtcatgcagttttttaaaagaaaataaagtgccctaatgtgattttttttaatttggattacattgaatacataaatcagtttggggaaaatcaacatctttataatattgaggctttttatccatgagcatgaaattgctttctacattaataacttggtaaagttttatattttccttatggatctttcacttcttttgttagatttttctccacctaagtactgtatcttttaattctactgtaaatagtgtttttattttttaactgctgctattacataggaatataattttgcatctggccagcttgcctaaacagatgatttcaaaatattatctgtcagattttctgtgttctctatctctgtaatcatatcatctatgttttatgatctatgacagttatattttttcatctccaagctgatattttaaatttcattattcttgctttatactggttgtacatattcagttagagtgattgcagtaggcaatttgcgatgttcccaatttgataaggaaagcttttacattttaccattaagtataacgtttgcgagcttattatagctatcctttgtcacttagggaagttatctttgttttttagttatctaggaaactaaaaaatcagaaaagttagtttgattttatcagatacatctgctacatctaatgagatgatcatatagtttttttcctcccataaactgtgaatataatgaatcacattaattgatttttttaaatgttaaaccaatctccatttctgggataaattcaacttagtcatgttgtattagccttttgtatatcttatatctataatactgaatgagattatcatactctttacatgtatttgaagccatgtcattaagtgcatacaatttttattaaatttttaattgacaaataattgtatttatttatggggtacgatgtagtgttttgatatatgtttacattgtagagtgactaaatcaagctaattagcatactcatcactgaacatatttatcatttcttgtggtgagaacatttgaaatttaatctcttagcaattttgaaatatatgatacattattattaactacagtcaccatgctgtgcgataggtctcaaaaacttattcctcctaattgaaattttgttccctttgaccaacatcttccaattccccaacccctagcctcctctggtaaccaccattctactctctacttccattagtttgactttttcagtccacatatgagtgaaatcgtgcagtatttgtctttctgtacttgtcttgtttcacttagcataatgtccaacgggttccccatgtcattgtaaatgatggaattttcttttttatagctaaataacattccatcatgtatacataccacattttctttatcgattcatctgttgatggacagttaggttgcttctgtatcctggctattgtgaataatgctacaataaacatgagagcacagatacctcatgctgatttcaattcctttggataagggtccccaaaccccaggctatggaacagcagtggtatgtgtggcctgttaggtactggatcgcactgtaggaggtgagcagctgcgagtgagcattaccacctgagctccatctcatctcagatcagtggcagcattaggttctcataggagtgtgaaccctattgtgaactgtgcattgcaggaatctaggtggtgcactttttatgagaatctaatgcttgatgatctgaggtagaatgattgcactctgcaagactccccacgctcatccctgtggaaaaattatcttccacaaaactggtccctggtgccaaaaaggttggggactgctgcttttggatatatacccagaagtgggattgctgaagcatatggtagtttaattttaattttaatttaatttagtttaattaatttatttttagcacctaggctggaatgcagcagtgcaatcatagctcactgcagcttccaattcctgacctcaagccatcctcccaactcagcctcccaaatttctggaactacaggaatgagccatctcactcagccctatttttagtgttgggaagaatctcaaaaagtaatgactgtactaatttacaccgctaccctcagtatacaagggttccatatcctcactaatacttatcttttatctttttgatagtagccattctaagtatgtatagttttaaaattatgaagtttaaattgaaccttaggaagttgctactctgtcaccaggctggagtgcagcagcgtgatcttggttcaccacaatctccgcctcctgggtttaagcaattctcctggctcagcctcccaagtagctgggactacaggcacatgctaccatgcctggctcatttttatatttttggtagagatgggtttcaccatgttgtccaggctggtctcgaactcctgacctcaagtgatccaacagccttggcctcccaacgtgttgggattacagacgtgagccatcacacccagccttgaagttgccttttttatcttcagtagtgcttcttggcttaaattcttttgttttataaatagtaatggaagcttgccagttttattttagaaagtatttgcaggccaggtgcagtggctcatgcctgtaatcccagcactttgggaggccgaggcaggcacatcacttgagcccaggagttcgagaccagcctaggcaacatggcaaaacctcgtctctacaaaaaatacaaaaaattaacttgggcgtggtggtgcgcgcctgtagtcccagctactctggaggctgaggtgggaggattgcttgaacccagggggtagaggttgcagtgagccaagatcttgccactgaacttcattcagcctgggtgacagagaaaaacaactctgtctcaaaaaaaaaaaataaataataaaaaataaagtatttgcatgatatatctttttctgtctttttgattcagatattgtcagctgagtccaatctaacaaacttatattttaaccgaagctttagtactgttatatttaataaactaataatatatttgcacttaaatacaacatctaattttatgctttttaattatacatgatttgtatttctttttttcccatgtaagtttttagggtatacatctttaaaggccttacttttcattatcgttcagtttaacttattttctaatttccatttttcttctgtgacctatggtttagttagtggtggatttattttccaaaatatggatggtgtccagtcaaacttttggtattgatttctggcttatcttgtgtttggaaaatatgtgaattctacagctggtctgtgtaagagttctctgtatcagttagggaagtttgttcttcctgttgttcatatcttgcatatctttactaaggtttagcctgtttgttctataaattacttagagaagctgtgttaaattttcccactaaaattattgatttttgtctttctctgtatttatcagtatgtatctactgaagtcttttcaaatccctgatcagtggtttgttcaggacagcactttgattgagggaggtgacgtggcttaacatagtatggtcttgagctgcctggtttctgtgatttagggactgaaccagctctggtcacatctggattatctactatccagcattcaaatgaaccagattacatgaaaggatatgggggtactctttgggggccacggtgccacaaggcctttggtttcgatctccattgcctagggaattaacctgtgctgtgtgattctagatgttttcttcctgctcccttaaataacacctaaatgtgttattcagcagtgtggctcctgctaagcagaggagaactcggaattcctaccaaattctgataataaaataactttcctccacctcaaccattgtttttaccagtcctgtcaactgttagctttcctggatttaatgatctcaagttgaggtcaatgtcaacagctttatgggatgaataagatgaacgcccataggaaagtcagtctcttgaacacgggttgttttcttttggttaccctctaagattttttctctttgatctccagttatttgaaggattgaaggcatttcgaggagtagataataaaattcgactgtttcagccaaacctcaacatggatagaatgtatcgctctgctgtgagggcaactctgccggtatgtaagtgtaggagtttcttttgtgtttcttttaatgtaacgggtcacggtgttgaccaccaaataaataatttctgaatagttagataaatattcagtacaaaccatatgaacattaacattatttctgatctactttagttaggtaaaaatacaagaaaatggccgggcacggtggttcactcctataatcccagcactctgggagactgaggtgggtggatcacttgaaaccaggaattggagacaagcctggccaacatggtgaaacaccatctctgcaaaaaatacaaaaattagccgggtttggtggcacatgcctgtggtcccatcggtgtggctgaggcatgagaattgcttgaacctggcaggtggaggctgcagtgagccaagataatcacatcactgccctccagcctaagccgcaaagtgagactctgtaaaaaaaaaaaacaaaaaacaaaaaacccaagaaaataatatcatttggcaattccacaattttttaaaatcagtgtctgtgggggattcatatgcaagtgagagatgaaagagtaaggaagaaaaatgtatctcaacctaaaataatatttgaagaccacatgaaattaatattgaaaatggaaaatatggtgtgcagcacaggtattttgcggatattttgcctaattgctttagatgctagcaagatatagtaacttaattattttgatattttatcttaagtaatgttttgagataaaaagatatcaaaatggtttctcatggccattgaatcgtggctgtcacaatgtttcttatggagcagaaatcattgtaagatgggttagattttttttttgagagagagtctcactctgtcacccaagctatagtgcagtggcacaatcttggctcactacaacctccacctccggggttcaagtgattcttgtgcctcagcctccttagtatctgggattacaagtgcacgcagccatgcccagcttaatttttttaaaaattatttttagtggagacatgatttcaccatgttagccaggctggacttgaacttctggcctcaagtgatctgcctgcctcagcctcccaaagttctgggattacaggcatgagccaccgtgcccagcttcagggatttagcccaacctatgcattcaggaagcctgaggacggctaaatccaagtgttcttcattcctctgcctatttttgtaacccgcatttcacccatctcctttggaggccataatatagtagcagaggggaaattaaggtaaattctttggactagggcatagtttcgctcttcttctcattacagctagatcactggggaaaagtctttaaaatggggctggaaggaaagggaagtaatatttgttagacatcaattttgctaccaaactgtgttatgtagtttcacattccttatctgtgtaatcacagcagtaaggcgttgctaagaagattatttgttgtacagtttattagtgcctttgtacagagaagaaaacttgagtccagagagattaaatgacttgtctgaagtcacaaagagcaaaaggacagggcaagaaattagatccaggtgtttttattcctggtcaagttctcttctcactgaattctgtctctagacagcaataccaggggctgaggcaggtgctacagggttcacctatatgattggcagtcccaatttctataacattactacattattattgctgttacaggtcaatatttaaatagacaaattctgacttcatgagctttactcagatgcttatgactgactcatttctaccttaggtgacccatcacatctctgaaagtatgtttctctactttgcaagtgagcagagactaaattattttatgaagtatcacccatctagtagatgtaatttttttttctttagaaataaagtgctctttgcttttgcccattttcctattgggttatctatctcttcattgactttggggatatccaaatatatataccagttaaaattctttgttgatcatgctaccaataacttcacccagtttgttgctttacatcttttgaagaacggaagtctttaagtttcaaatagtcacattttatccatttttttccttcatgatttgtgttttacatctcctacttaagaatcctttcctaccttaaggtcacagagatattttgtactttttaaataaagtcttagtattttgtcacatttaagtatatcatctaattagaattgattggggggtatggtaagatgtagggatctaatcttatctttcacatgtggatagctcgtcatcccatcacaatttttggggggaaaatcagaaaaaattgtttggttttattattactttaaaattttttttattggtaccataaattatacatatttatgaggtacactgatgttttcatgcatgcatataatgtgtaatgattaggacaaataagaaagaaataaataaaaattaggataattaggatatccatcacctcaaacatttcttatttttttgtgttgggattattaattttttaacagtttaaatgcttcagtgaggatcatttattattgccacattgtgagaaaattctgtcatttattatgtttttcattctttcaggtatttgacaaagaagagctcttagagtgtattcaacagcttgtgaaattggatcaagaatgggtcccatattcaacatctgctagtctgtatattcgtcctacattcattggaactgaggtgcaaactgactctttattttggggtactttgctgggcaagttattattgtttattgttgtttgaaacttctagcatatagtttgcagtagccccccagtagcatcattaatgacttcttccttctgattgtcaagattagaggtagcaaacattttctgtgaagcgccaatcagtaaatattttttggctttgtggccatatagtttctaataagaaattagatccctacctcttaccataccccaaaatcaattataattcgattatatacttaaatgtgacaaaatactaagacgtttattaagaaatacaaaatatctctgtgaccttaggtaggaaatgattttttttttttgaggtctctctctggttttttttttttgcccacgttgtcgcttaggctggggtgcagtgatgcaatcacggctgactgcagctttgacctcctgggctcaagtgatcctcctgcctcagcttcccaagtagctagtactacaggcatgtgctaccatgcctagctaatttttaaattttttgtagagatgatgtctcactctgttgtcctggctggtctcaaactcctggcctctagcaatcctcccaccttggcctcccaaagtcctgggattacaggcatgagccacttcacctgaccggagaggattcttaaactctgccattttagtactaaagcagccatagacagcacataaatgagtaaatgcagtgctgtttgccttgcccaattaagactagtcattattttctaagtttacaagtgcagtgcctcccattgtggcagtacttctctgaggtagaaatggttttaaaatttaggggagggagagctgctaattttcattttcatgaggtcttgggattacttggcatggagtgagaatggaggttccccttcccacatagaaaaatggtgaaaataaagttcacagtgggagttaaggaaggaaattgaagagctgggatggtaggtttaaataacatgaccttatgatttcctggtgggtcacagtctcttggttgggtgcccttgtgaataaaggcatggattgggcatgcctggaggggccaaggccttttgagcggacgagtatgtttatatgaagaccctgtcacctgtctctggtatctgctaggcagctgtggcttgagagtgtgatattgagggataattgatggaaggagattgaatgtggctggcaggtaaagagatagggaacatatggagatatttagaataagagagtgtgagatagagcgcttttgctatagcctagccattctgttctctactaagtgttgcggggttaccaggttttctactaggctgtatgaatgcaaaaggtagagagatatatagggccatggaataaataccgaagtgttttctttggtatccttgatacctttcgaaagccgtgtaaggatctagataatgaatttcgtgaattgcagtctctctgacaagttttaaagaataggaacaattttaaaaagtcatctacttccataagttttttgacattttaagataattgaatttttttttttcagcttttaagttccagggtacatgtgcaggtaggtgtgttatataggtaaatgtaagccatggtggtttgctgtacaaatcaacccatcacctaggtattaagcccagcatccattagctattcttcctgatgctcttcctcctcccgccccttccgacagaccctagtatgtgctgctccctgcatgtgcccatgtgttctcattgttcagctcccacttataagagaacatgcagtgtttggttttcttttaatattatttttaactttatgataggaaggagtactttttaaagttggttgaaacattgttactgatctcaaagcactaccttccagttattctgagatactttttcagtctaagatctgatactcctattcctggtttgttgagagtttttgtcatgaatggatgttggattttgtcaattgctttttttgaatctcttgacatgattatgtggttttgtactttattacattattaatgaatgaattatatcaatttatttttggatgttaaatcaaccttattttcctaagctaaatcctacttggtcattgtgaataatccatttttttatcttgctatattcagtttgctaatattttaagaatttttgtttcactgttcatgaaatatattgatctagttttcatttttcttttctttcttttttttttttttttttacatctccctcctcttcctcttgatctagttttctaatacagctgcactccaacttacgatggtcctacttaggagtttttgactgtatgatgtttgaaaacaatatgagtttagtagaaacttactttgagtacacataccattctgtttttttgcttttagtacagtattcaataaattatgtgagataaccaatactttattataaaataatacacttttagatgattctgccctaccataggctaatgtaattgttctgagcacatttaagataggataagctaagatacgatggatgtttggtaggttaggtatattaaatgcattttcaccttaaggatattttcaacttaggatgagtttattgagttgtaaccccatcacaagttgaggaacatctatgtatctaattccatgattcagtaaattctttagactgccaaaatcctgtaatctagagttagacaagatcttaaatcaggttttgtggtccatcttgtagtcatgatcattctcactattagggaattcttaactttttgcatttgaatcaccgaggtgttatttaaaatacacatatggaatccaagctccagagactctgagtagatctggtgagtgattgtgatgcctgcccacattcaagaaccttagtacaaaagccctgctgaatggttctctttcactatacactctatcaacttatgtacttgatcacactttggacctcaaaatcaataatttttaaaaatctacttcctaagttgtgaggtacgaattgaaggaaataatgaatactatttggggagtcaacattatttattaacgaataccatttggggagccgacattatttatatttggttggtatatttgtatcaactatcattttctaattaatggtataggcagaataaaccatcacttgtgattcagaaaggaacatgatacaaataacatccaataatgtatatggatttaaatagatctgccccctacagatgttacgcaattcatgttggtaatgatcattcattaggttttcgtggtggctacatttgatatgtgaagtactggctggaagactggtgccagtagcttcaggtttgctgggattctttcatcagagatgactagctttacttatctttttatgttgcatgtttctatgatgggcctatcctgtcattgtcttcatagtataattgcaagctcaactctgtcagttatgtgattttttttttttttttggtcctgtcttgcttttggctgacttctatatgtttttatttcatgtccttttcatagttagattaactgggtcttatgtccaagagatattttgatttctttgaatgaataaatctatgttaggctactgtattaggttttatagacacctagttgatcacttgtgtccagtctctattccctggtatggtagttgctgtgtttatagaacattgaggattctacaatggacacattggtgttgggccccagcccagacccaaatcgaaatttctagagccaggatcagagactctgcattcaacaaactctccagagatttcataaccacttttaaaggactcaccatcccaaaccttgttaaggaatgaaatatatgtctgccagtaatttcagtgctttaagtcattgaaagctgaacttttaatggcaccaaagtggaaatatttatataattgaaagctaaacttcatcctaatggcagtgttgagttcacttccataggccctgatataacagtctaatattattgtttttcacataaaataagattcagtcactgccatataattagggagtggctctgctattggatggacttaaaatatttcattatgtttgccaagctctgtctctttacatgttttataattaactgatccttcatttttattttgttttattttatttttgagatagagtctcgcttggttgcccaggctggagtgcaatggtgcaatcttggctcattgcaacctctgcttcccaggttcaagtgattctcctgcctcagcctcctgattagcggggactacaggtgcgtgccaccatgcccagctaatttttgtacttttagtagagacggggtttcaccatgttggccaggctggtcccaaactcctgacctcaggtgttctgcccacctcggcctcccaaagtgctggattacaggcatgagccaccatgcccggcctccttcatttttaataatcttcatagatacatacttgttgtactaatgtttttgtgcagttcctcatgataaataattaaatcaattactaaaatccttatagatttatgatgataataaatggaagtgtgtattattgaaacatgtttaattaactgttcatatataaccagtgagtagggattggcaattaaaaataccaggctaccagtgcatggaaatttgaagaaaacaacaacctgaaattcagaatactccaaaatctgaaactttttgagcactgacatgactaaaaatgctcattggagcatttcagatttcattttttcagattagggatgctgaattggtaagcataatgcagattaatccaaaatctgaaaaaaatcctaaatcaaaaacagttttggtcagaagctttgtggataagggatagtccaagctttttggactgaagctttttggataaggtatagcctataatacataaatacataatacaggataatcactgacctgaatgtatagcatcagtatggtacacaaatatttaaatccatgtactttgttggatattatgttatataaacttcttgtaaaaagtttagagagtaaaatcattcacattaccaaaagatttctcatatttataaaaaggattatagcagcattttaatcagtatctcctaaagtatttatttatgggttgttaaatctaaaagagaaactacagtctggagggctctaaactactgctgattacatatcagttgggaattaagagaaaatctcagatcataatatttaaataaaaacatttacatgaatgatttctaagttttcactttactagacaagaaactaaaattatatgactgtcatgttcaatattggatacttaacaacactacatccaaggaagccaggttttgctgattttaacctcgtcctgttgagtaactccatgcaggtacagtggtacaaacacatgtggacacacagacccagacctttatttcctcggggattctggtaagtgtagaggtgtcttgaccatagtcaatagcagaaatatgcacaaccacaagctctgaaattccatttgattgttgctcttagccttccactttttaggcatatgtcagtcccatttcatcccacccactctctccatttgggaggtggtagagtgagacaatactgaactataccagggctgagaataagtgtctttgaaaagggtcgaatctgtgatgctagagacagccctggaaactgtcaggagttagcccaaccaggactgtgaccagatcccaggctgtccaccacagatttgcaggctacctgcagatgtgactttttcaaatgtactcaaagacaagctgactttggctaatgcagaaattaattaattcctctttttcagtaaactttatcctcctacacttagattgtctgtaagtacatctctggagttgagctcaactagaaagaagctgtctgcatttagttaataccagcattggatgcacacaatataatttgaataatgtagagcaacattttaatcatctctcataagcagtttccccatttgcaacttcctgggaaatcttacattatgaaatgttcattagaactcccattttaaaaccctgctgccattttgtgagtgggcagaagaaaggctggagatgagatttgtctgtctcaaatgattcactccttcatttctggttcactccacagggagcttaaggacatgtgcgtttcatagacatgcctttcttttccttttatcaccttgttaaatcttaagattgaacatacaattcagcctgtaatcatatcaattcccatgaaaaatattttccttattcactgcctctatttgtgcttatacatctgatcatctttttcctttactttacaattagtttctatgaacagaagaatctgaaagatttaaagactagttagcacagcagcaatttataaatcattaatttgggtactgtctatacatttaatgtgttctttttcatagtcctatgtgaaatacatatacatatatatatattccactgtttataaacaatattcagttttatttgcataactcaatatattttatattaacagctccgtttttagtgtcttaagacatcgagtctgtttttagagatacagtctatttgccttgattttagcctgttataatcagcttattattatctggccactcttaccagtgagtatcatcttgaggctgttcttgctcatttcaacttgtcacaggggatgttttttactctttggagtttaggtacaccaggttattaattatgctcctgattcatggtacttccatcatggggcatataaggtccctgtctttgttttattcccttctatcttcattcaccactctcatttcctctctctccactagaaataattctcaggaatcaaattaatattattctggcttatatgtgtttttaaaaatctcatcgctttttatacatgtaattttaatttatgtaagagactttgtcctacagatttcattgtgtttcttctctttttcgcccagcactgtgtgttccatttctatccagtctactatgtgtacatcaagtccatcatttctaactgttgcatagttcatgatgcgaggcatcttccacattgtatcccaattccctaactggaatcccagttccctgctacctcacacaatgctccagtgaacagctggaaaatcatacaacccaaggaattattgaaagtgattatatcccagcaaaaggcccaggcccatcttacacttccaccccaagaaggtactgctacttttcgggaatggcctggtctccttggcgaaattggcatttgatctgttctcatcactgtcgtctggcatcagaagtgaccccacttgtcaggcactgtactcagtgctttccatgcactaactctgataacaatcttttttttttctttttttgagacagagtcttgctctgttgcccaggctggagtgcagttgtgtgatctcagctcactgcaacctccacctcccaaattcaagcgattctcctgcctcagcctccccagtagctgggactacaggcgtgcaccactacacctggctaatttttgtatttttagtagagatggggtttcaccatgttggccaggctggtcttgaaatcctgacctcaggtgatccacttgacctcccaaagtgctggaattgcaggcaagagccactgagcttggcctgataacaatcttgtgagcaggtgcttatgcagtattttagggatgtgaaagtaaggtccaaagcggtgaaataagagcctgtattctcttaacctccatcccgcaacatcttttatgtgtcagtccctgcactaagtctagggatactgtgctgagcaaaaactatcttcttgctttcacagagctcagtgtctggcagggggtcagactttcataatataaacccactaaatgagtgcatattgatggcggtcactgctgtgaagaagtgggaatggttagcatggaaacatagccccaatgggggcgactaagttctttcccatctcattctactatgtctactttcatctctacttttttcttttctgagctatcagctttcttgctctcaactatatttgatgtatttaaccagattttatatattgtattatgtattttataacatgtatatatatcatataacatacacatatacatacatacacacagccaattaagtctcaagttcaattacaatgcttctaagtttaggactattcattttcattttggcagagaaattatctggtaaaaaattcaagtagaaccaaaggtatacaatagatgggaagtttccttttcactctcacactctcatttccatccagggttctacaattcatctccttccaagcaattcctattgccagcttttcttataccctttcagaaatacacacacacacacacacacatatatacacacacacacacacacccttacatgtgtttgtacattatctctctttttacaaaattggcagtgattctttgtcctgtttctgccactactcaaaaattttaaaacaaattacacacctataaacatacaatttaaagaaaagagtgaaagtgaaaatctaaggacccagcacatggttaagatgagagcatgatgggttcaatggaaagcctttgtgtacctttctcctttgcctccgttccctctccaatagagtcaaccacgttggaggttatagcacttccttctttatgtccccccatctcccatctggtatggtattctcttttactgcagatggacattttggcagacatatgtagttgcttctctttggtatttacctaggagttgaagtgctgggtcacagggtgtatgtatatttcactttagtagatactgctgttgtaggactttctccttagtttagctaaagatggggtccttgtcccaaggccatgaaaaattaggctcgcagacaatttgaaaggtgagaataatggaacttattgggaaaaaagggaaacagggactccccacaaagccagggtcctgctagcatgcttcctgccttgcagattgaatcccaggtaccacccaggaagaggaggggccaggctcctccccactgtgaatggtgtgaccgtctgtggctccccagtgtgcactcctcccagtgtgcaggccggttggagtttctctggggtcttcttcccacttggctgtctcactgccaaactcccaaagtgcttataccagtttactctcccatcagtggtgtatgtatttgcttcatttctttgccaatactgatactgtcttattaactttcctcattctaatgtatacagtcttgtgttatttgtggtttaatttccctgagaaccaattatgttgagtaccttttcataggtttaccagctacagaagtcctcttgtgaagtgcctttgcaagtcttttgtctttttaattttttgcatctttgtatattctaggtataaatcctttgatacatatatcacaaataacttcctagtctatggcaaatcctatgttggataaacgtactgcaaatagtttcccagtctgtggctagcttctgtgtctgtgtcttgctttgtcactttcttactgatatcttttgatgaacagaagtacttagttttaaagtagttaaagttttctttatgttttatactttttatgcattttaaagaaattttttgttactccaaggtcatacaggttaaataaattcttactccaagaacattcttttaaagttttgctttttttcatttaaatgaaatccatatgaaagtgaactttgttatcaagtaacatatacaatttcttttatttttctgcacggagaccaagttgtcccatcaccatttattgagtggtctatcctttcctcactgattacagtgccagttttgatatgtcatgtttccatagatgaagaatattttggggctctctatctgtaccttcctttttaaaaaatataaatagtggtgatactatgaacaattttgtttgtattattgttttttgcacttaaaatttgtcttggagatcttttcattttggcacatacggatacacccctatttttttttccattttcctagatgtggggtatccattggacatatgtaccgtactgaatttaatatagaatgtcataaattacaagatgtaacattattttatacactgagatggagaatcaaactgcaacgcagtacttccctgatcatcctgagtgattcatgagttagttatactagcctcttatttctttgaggtgtacgttttctgagggaatctgccatttctcctgccatgagttgcattgcttggctcgtgataggcatttttatttttgcatgtaattttgtaacaaatgctaacactgctttatcttctttttgtttttgtttattgagacggagtcttgctctgtttcccaggctggagtgcagtggtgcaatctcggctcactgcaacctctgtctcccaggttcaagcgattctcctgcctcagcctcctgagtagctgggattacaggcatgtgccaccatgctcggctactttttgtattttttgtagagatggggtttcaccatgttggtcaggcttgtcttgaactcctgacctcaggtgatctgccccactcagcctcccaaagtgctgggattacaggtgtgagccaccagccagctttatctttttaaaggtttcttcctattgtgggtttcattagagggcttggttgttgctttgcaagaaaacattgacttgcttttgtttaatagtcttataaatatttgtttcactaacatcaaatacatgccatgctcctgcttttgagcttttctgtgcagtaacttttcttctcagtgctaaatcataagtttttaaagacatttaacatggcacactcaacatgtgtcaccaatgcccatagccactggaagtatcatcagtgtcaacagctatgacgtttggcaatgacagctttgccataactgctgcttagccaataacaattgtggaatgctgagtccagatctcaaacatgttaaaggtaaaaaaaaaaaaaaaaaaaagatattttcgagtctgtaaaacatggtagcgtatccggaattggtgggttcttggtctcactgacttcaagaatgaagccatggaccctcgcggtaagtgttacagttcttaaaggtgtcgtgtctggagtttgttccttctgatgttcagatgtgttcggagtttcttccttctggtaggttcgtggtctcgttggctcaggagtgaagctgcggacctttgcggtgagtgttgcagctcttaaggcggcatgtctggagttgttcgttccttgcggtgggttcgtggtctcgctggcttcaggagtgaagctgcagaccttcccagtgagtgttacagctcataaaggcagtgtggacccaaagagtgagcagcagcaagatttactgcaaagagcgagagaacaaagcttccacagtatggaaggggaccccagcaggttgccactgctggctcaggcagcctgcttttattctcttatctggccccacccacatcctgctgattggtccattttacagagagctgattggtctgttttgtcagggtgctgattggtgcatttacaatccctgagctagacacaaaagttctccacctccccactggattagctagataaagagtgttgattgatgtatttacaaaccctgagctagacacagagtgctgactggtgcatttacaaaccttgagctagatacagagcgccgattggtgtatttacaatctcttagccagacgtaaagattctccaagtccccactagactcaggagcccagctggcttcacccagtgtatcttgcaccagggctgcaggtggagctgcctgccagtcccgcgccgtgcacccgcactcctcagccctcgggctgttgatgggaccaggcactgtggagtgggggtggcactcgtcagggagactcaggccgcacaggatcccacagcggtggcggggggcgggaggctcaggcatggcaggctgcaggtcccgagccctgccctgcagggaggcagctaaggcctggcgagaaatctggcccggcgagaaatctagcgcggcgccggtgggccagcactgctgggggacccggtgcaccctccgcagctgctggcctgggtgctaagcccctcactgcccggggctggcagggccagccggtcgctccgaatgtggggcctgccaagcccactcccacccggaactccagctggcccacaagcaccatgcgcagcccgggttcccgcccatgcctctccctccacacctccctgcaaactgagggagccagctccggccttggccagcccagagaatggctcccacagtgcagcggcaggctgaagggctcctcaagcgcggtcagaatgggcgccgaggccgaggaggcaccgagagcgagtgagggctgggagggctgccagcactgtcatctctcagtagcataatttatataaccagtctcttgttgattaaccattatattattgatacaacaaatataagaactgttactagtaaattgagtaaagcaggaaaattaaatttggtctcttactgatcaaccattattagattgttgataacaacggttataatgttgatcaaccgttatattgttgatacaattatatttgatgtatttaaccagattttatatattatattctatattttataacatgtatatgtatcatataacatacacatatacatacacacacacagccaatataatttcactctcagtttcttgttaatcaactattatattgttgatacaacaaatataagaactgttactagtaaattgaataaagcaggaaaattacatttgggagccttaaagatgtaggttttcttcaagaaatttatgttatagttatatcccctgttgcatgtgaagacatacattcaaggatacttactgcagctcacacaatttgctgataggttggatgtgggtgtgagagaagagatgctgttttccttttgggcgatggcaactggatagtaatcagttactaagatggagaagaatgagaaagaagtctttttttgtttgtttgttggagtgatatgggtagaataaagagttaaaacagtcatgcatgtaggtactatagatgtgaaagtctattattcaggggagagtttggaatttaagggatagattcttgtctttaagcataaaaatgcctttgaaggtgagaaactagattacatctttaaggggagaactgtagatagagatgaaaagaaggcaaggactaacccctggggcaggtcagcatttagaagaaagggagtttgtaaaatgctaagctgtctgagaagtagcagcctgcaaggtagaaagaaaaacaagagaggtttagtggactggaaaccaagtgaacctggaaaccacaagcagctgtggcaaatcctgccacagtgagatgaggcctgagaactgagtattggatttgtcaatgtggaaggccttggtgatcttgataagcatgtgttagtagggtggtggggttgcagtgtttgggatttgagagagaatgagagaatgggtagctgtgatgctgaatatgtata[450 bp omitted]gcctagtcaactgagccaaactggatataaccacaaggtcaaaggcaggagccagtgaggagatcttggttttgaggtcattcctggtgcgataataaccatcctgtagcattttcttgtcacttagagaaggcattagcaaactttttttgtaatggtcttaatagtaaatatttttgactttgtaggctatatagctactcacctctgcttttatagtacaaaagcagccatagacaattcataaataaatgaacatgttccaataaaagcaataaaaacaggcagcagtctgaagtttgtcgactcctgatttggaatcattccagaaagtgaaataaaagcatggcttcttttttttttttgagacaaggtcctgctctgtcacccaggctggagtacagtggtgtcatcatagctcactacagctttgacctgctgggctcaagtaatcctcccacctcagcctcctgagtgtctaggattacaggcatgtgacatcacacctggctgatttttaaattttttgtattgatggggtcttgctatgttgccaaggctcacctcaaactcctggtctcaagtgattctcctgccccaggattcccaaagtgctggaattaaaggtgggggccactgtgcccagccaaagcatggcctttctaagggtgactcactgtagcacctcctgagtactttcctatcaagtatcctggaccactttttaaataattcattctaaaatccatatttaggattgattccaaatttgccaacctgtatttcccaaataactggcatgataattcttgtctttttcccaaatgctcattttccactcttcaaacgttgagtgttgactgaagttctgtggtcatgtttacagtcatttttatgctctttgtattgtacatatggaatgtatttaccatttctgttagcaatgatttcttgcaaaaacaataacacttgctagttttgcgtgcttaaaaatatcgagccctggcgctctctacatattatctaatgtaatccttatattaaccctgtgagtagtcattatcacttcttttacacaggaggaagttagagaagagtgttaagtgttcttttagtcttttccactttgtctttagttttctcttagctgttcttttaaattctaaggtcattcttatctaaaaacttaaaagagttgatcagcctttttatcaagtgttaaatttataccatcttttttctttgaacagggctggcaaataaacctggatttatcccttagccctgttacagcaagtctcagaaaatttggacttcagcttccccagtgatacattttcaaatgcctatgtatggattgcccattagtttattggctagaactaaaggaaatcaggcaagagacaaaggacattttctctagggtgtcagtcaatgcaaaatgttaggactagcatcagatttttttttttttacaaatgaaaataattgaagtgtggtagaagttcctctagttctggcagtcctaaatattgttaactgaagaatgatggggctcataaatttggaaaggagagagaggggaaaagagaacgggaatttatgctgagcagggtggctaagtatatatattcaacaggctataggaggagctattagtattcacgaaggggtggcacacacatacatagtaggctaacgtgtatgcagcatgcatcacaagtcactttggggtggagccttaacatttaatgtattacagttagggcctatacatcaaaaggtgaagcagaggacacgaaagccctctgtgttcagcctctgtagactggccagaaccactctgtggtcagaggtctcttatcaggaaagaattcttgttgttgtgttgaaactgcaaaagggaggggcagtgtcaggcaggtggttgataccagtctttcagaagcactggtttctgtttaacttttagagaagaaagcttaattggagtgttactggaaagggataccagtctagaccacaagagaggattcttggatctcacacaagaaagaattcagggtgagtccacagagtaagatcaaatcaagtttattagagaagtagagaaagaaaagaatggctgctccataagcagagcagcactgaaggcttctggttggctatttttatggttatttcttgattatatgctaagcaaggggtggattattcatgaattttcctggaaaggggtggggaattcccagaactgagggtttctctttcttttagaccatatagggtaagttctggatgttgccatggcatttgtaaactgccatggcactggtgggaatgtcttttagcatgctaatgcattataaatagcctaagataagctgtgaggatgaccagaggtcaatttcctcaccatcttagttttggctggcttctttactgcttcctgttttttcagtgggttctttgtgacctgtatctgtcttgtaatgtcctatctcatcctgtaactaagaatgcctgacctcttaggaatggagcacaggtggtctcagctcattttatctatcccctattcaagatggagttgctctggtttaaatagttctgacatattttccccaatacccccaaagggacccttaatcccaaaatttgcagacagatgaagatccatcttctgtagcttcttctggctgaatacaggtgatgatatttttgcgtaactattcagggtagagaggagctcagtgagaaagcatcagtatggtgaaggccattcctaactcccgagttctcacaaaaggtgatatctggaagattaataagtgttcaatttaagaaaacgttgagtagtcttatcctgcattgctacacaaagagtaccacagcaatatattctacaacagtaaagcaaaataagtataattatcccaactaaactaaataacaagcctttccatgaactaggcagttgttggaaccaagcttatatggggttgctagccaattccaacacatgttcagaattaaaatactgatccagatatttatgttacccttctgtttcttctgagcagcagctagagatcactggttggttcataggaacaaacagggtcaatctaaatggcagaaaaaactcgaaacaatgaatgggactagagttgaataacaagtataccatagtttctgaaacataatttttctctctccagtctcccatttctattgaaaacaaatcatggtaggactgatttgtttgcacagtaagctttagtcttattatgcttggcctggttatttgtataaagcatagcaataataattatttgccacgtaggctttttaaaaattgactttgatgtaactttgttccataagaaatctcagattagactttctaaagccttgagctgagacacagatttatctgtgcctgcaaatacttgtatgagttgtgtgaattctccttttgagatcccaagataactggagctcctaggcctgtcagaaagtgacattctttacttaccacaggtcaggaaccctgtaaaggaattgaatagacaaggtatgaggccagcttttcccagaggctttcatcagttctgtaagtcaactttgattccttaaagcaatctgtttatatttgaaagaatgccattccagtcaaagccctggtaaaacaggcagtgtctctaattgtgtcctgttacaaaggaaaacagatttttattgcacatatgcaaattactatgctgccataagttaagaatactcacaaatagttttcaaattcttgagaaatcaggtagaaagaaatatgctccaaagttttctcataggagtataatttactcaatttttaacaactgtaaatagctcaaaaaaaaaggtttcttgactctgaaaaatgaaacaaaggatcagcaacattttaagcaaaaagtcactagaaggttattttgttcttttattagtttagtccatgctgttaattcctgtttgctcaatatttatgaacatattggtttcccaagggagactcttgaaagtttttttcctctctatcttaatggcacactttacaaaatttttcagaaacctgcatttaagagccctctatctgattataaaccatcttttaaagaggatcaaaacaagacaacaattttctgtggataacataaagtcttaggaaagccgtggttaaagacacaattgactagaaattttggttacttctgtggcatacaacaattttacataacagttataattattactgataacataaactaagtcatatcagaatttaggagtttcccataattttggagcacataccaataacatatttatacaaatacaactcaaagaaagctaaacaccatttcatatttgacagtgcttcctgtatgattttaatataccaagtaagccaaatatgtcatttttggacttaaggggacctcatatctaaagtattgaccagatcaggaaaaggcataatatagaatttgattttggaaagtttgtcaaatatcaaagatttaaaacacttgatattataaaatcgaatcccaggtcactgtaaagtcatttatttagccaaaatgataatacaaagattttccaaaagcaaaatcctttttttttttttttttttttgagacgagtctggctctgtcgcccagctggagttcagtggcgccatctcggctcactgcaagctccgtctcccgggttcacaccattctcctgcctcagcctccggggtagctgggactacaggcacccgccactacgcttggctaatttttttgtgtttttagtagagacggggtttcaccatgttagccaggatggtctccatcttctgacctcgtgatccacccgcctcagcctcccaaagtgctggtattacaggcgtgagccactgcgcccagcaagcaaaatcctttactcattgatagagggaagacagctttccaaacaatgtctcactttttcttctttattttgttgtttattcaaaaggcaaacaaaaatcttccatgatcttttaatattacatgaaaattttgttcaagagagaaagccaaatttcatctttgcattaatgaatgtcaaatccaattcttaagaaaaccttgtagacaaattattcaatcttaatcaattttaccatgagataagattctcataaaccttttgtagtcctttacaatttttttttgttgttgttaaagagcagattaatgctctaagaaaaccctgttgtgcttttattccaatgttctatttatggaaaaactgaataataccctttaactttagctaatattttaacacacagaatttcttttacaagattaattttcactgacctcccacaacttactcaaacctttagctttatcctatgtaacttaaaacagtcttttaactctgtaaactaggcaataagaccacattcccatgccttcttataatcttttaccaaaaacacattctattttccttacacgccttgcaggtaacactgtttctctggtagcctcaattacatgtgctacaatgttaactcttagcaacttttatatttggtgaaaagtctgataaataagtggttttaattatgtaccaggtgtggagcctaggacgccagacagaagtgcagataaggtctgagtctttccagcatagctagggggcatggccaactccacatgtccccaggccctacctagaatctaatggctccaaagcaggtgagttgaacaattatcaagttaaagaagcagtttatggcattgaagcattcagcaaatctaatttaatctgacctaatttagaccagatgtctaaattttgaagacatttttattttaccaatatatttgattctctttatttcccaaagattattaaagtcccatgaattaaaaggtgttaaagtttttatttttctgacaaaatattcaatttaagtgcttatttttcaagccaattaattagagctcttttctatgcatatcacacatacaacacacaaaaatacacagacagaagacccagtagctgttaattttttcatttgccagcttttaagaatcttaattggattactggcttcagggtggagcaacgtgtggggacagagccgggaaaacatgcagtttctggggcctaataaacaggtgcagttagaaggcaaaacagattccccaaaattacagatctcatttttatattggattctggatcccaaaaagagggaatcagcccatcccctctgggagttttggaaggtgtagaagaatgtttccataccttctaggtggccaagagcatgcttctctgatccaaacgtgcacagagtggggtattcccctataactgctattagccttcccttaaagcatatttcctgcctagttattacacaccaaggttaaaagctctcccataatgcaaagtaatttctgatacccctacaagtaaaaaacattaggtaacacaatgcaaatcagagcaatgccttggattttgagagggatttgcttgccttcaattcctggggttccatgaggaaaacagatttttcccaaaatggagcctgtggtgctccctcagttttttctaaggaagcccaggctgttagaaatgatcttaggtcctctcaatgtgggcatcaagagtggcaagaaaacaaaatgagaaaaacaattcagttgactgagaagaaaaaacttttatctagaaaaaaatcaatataaaacctgccagatagatagatagatagataatcttggacatcacttttaattaagctgacttttaaccaaatctcttattatcagactctagccaggacaaacagctaatatttctggcttttgaactttaccaaaagtaacctcccaggtgaaaccaataagccttaactaaggttatgatttaaccacaggtgtgggaggtattttcaaagaggtggtaagcagtttttacaagatctggaacctccaaacatagctcagagaaaggaagattcaagacagggagtcagaagttgttcatgaggggaagataattaataaatggcaaaggtcacatagatatcaaaccagaaaggactcattcccgaagctaggaattgaatccaggccaccactgtgaaatagcaaagccttagttactgagctgcagtactgcacagtctccattgctcctccgagaaggagcctagagcagccaattttgagcttgcaaaggcttttaactgctcaagataatttttaggactaattgacaggaaccccaaaattcacaccctctggatggcagagatcaggagaaagtacccccacgtggttacaaggtcaagctttcaaggacataaaacaagacgagagggaaacttcatccagtttttgtttcagggacctgcagaaaagtttgtaactgaccagtttgcgggccagcttgaagaccagatttgtaggattcctaggcctgcattctatcctgtggctagctagggctgccataatagaatattacagactaggcagcttcaaccacaggtgtttattttctcactgctccaaagtctagaagtccaagatgagggtgcctgtaaagctgatttctggtaagagctctcctggcttgtagatggccaccttctccctatgtcctctctgggcctttcctctatctggccaagggagctatctctggtgtcttttcctcttcttataaggacagcaggcctatggattaaggcctcactttcatgtcttcatttaagtttaattacctctttaaaggcccgatgtccaaatacagtcacaccgtgggttaggatttcaacataggaattttagggacacaattcaacccataataggagggcattggaaggagagtgttccaggcagaggaagtagtgcagtagagcatatggaagtaggaaagtgaggagcaatggaaggggttcagtatggtttgagcgtggggtgtgtagagggtgaaggctatttcacccagtgcagtaagctctatcatccacaccggggttttacagtgggagaaaggagggtgtttatttgcaggtcaagaagcaaacagaatcagggagctcatgcttaagacctgaactccacagtggcttacatgtaaggtgcagaggttacaggcaaaggcatcaatcaacacatggaagccatatattggtttggcctaaaaaggtgggatatcctgaagtaggggcttacaggttacaggtaaatccaaatattttctgatttgcacattgtttaaggaaggggatatttgtctaaagatgggatcagcaggccaggtgtggtggctcatgcttgtaacctcagcactttgaaaggctgaagaaggagggtaacttgaggccaggatttcaagaccagcctagtcaacatggcaagactctgtctctaaaaaaaataaaaaagaaaaaaagaaaaagaaaaaaaataaagatggaatcagcagaaaggaatgttaggtctggcccatgggcggacttcctccagacttctcagaaagaaatttaagacaaagaatggtgccaggcgtggtagttcacgcctgtaatcccagcactttgggaggctgaggagggtggatcacttgaggtcagggatttgagaccagcctggccaacatggtgaaaccccatctctactaaaaatacaaaaactagccgggtgtggtggtgcacgcctgtaatcccagctcctcaggaggctgaggcaggagaatcgcttgaacctgggaggtggaggttgcagtgagccaagattgcgccactgcactccaccctgggcaagagagcgagacttgagactccatctaaaaaaacaaaatggaaaacaaagaatggtgataattcagtcctcaattccttttcttttttttttctttctttttttttttttttaactgctcctgcggagcagggctacctcatagccagtatgtccagagttgtctcagttccctcgttatctgtggtctggaggatccatatgatggtgatccaggttctgaaaaacaactctggaacatctgttaagatgttatctttagtttctataggaaaccaaacatcttctgactctgacctccttggtgattattttaagctactgtttccctttttgcttatcgagttgctcatttacttctcaaggctagcaggatgactggactttctcttgaaggaactcaagctgttcctttatttttatgctcaggggcggggggcactcagcaggtccctaagaggtatccccgctgtgtctcactatgggtgaaggctcagcgggaagaaagctagataccagttggaactctcttaaagtaaggagatcttgggtactttattaatatttttttcaagctttggtaaagtatgaaataactctggattaagaggagaagaactagaacttaataaccatgacatttgggcaaattgtttgaagcctcagtttcctcaacctaaaaataggaattataactttttgaattgttctgttgtatgagataatgacagtgaaatattttggagccaaaaagcaatgcatactattgggggttattattattttttgatctttcagcaagccagctatagtagcttttcctatataaacacagtatgaattcagtgccctcgctttcctgaccctcacagcattcaagccctgtatggaccgctgagctctcccttgaagcaccccttagtccagtattctttactattttcccctttaacaatttaaacttctttcaaaacaactggcagtagttttttaaaaaagaaaacaggctactcttcaaattaaaaaaaaaattgtcttgctttaggaaaaatgttcttctgtcttttccaattatcttatttcttctgcctctcatctgccttgcctaggcagaattattctcaagcctgcacatgctgctgtgcctctctggcttctaggccaaaacataggctaatagtactcttctcagctcactgagctctttcctgccgtcattcaaatcacctctgaaatcctgccttttgataaagtaatttctgactgatcagaggaaagtgatgattttctctgtgacatgtctttttattttccatcacactcagtgtcttgtccttctatgcaacatatccatgtatttaaaaacccttgtatatgtatttgccatgtatttgtgaggtatagctcgtgaagtaaaaaaagtctttatttttttaaacacatcatcatttcagcttcaaagtcaatgtggtctcttgagaagttaaatatgctgcatttgaaattttatgtttctcatttttcatgtttttttttaaagccccttttaattcctcatgtatttgaatattccaggaagctagtagagtaaaaagccaaagtgttaaagtgtttataaggaatgtgactcatcgaaattgactcacacaattcatcagctattgtcatccatatgttctcattatttatgtggcttttgctttatttaatcagatgactgaacttatcatcgtgggattttgcttgtagttgtttaatattatataataaaatactcttgtgtgaaacaagttaattgactttttttaattaaaaaaaatttatgtgagagtcaggagttacatgtgcaagtttgttacatgggtatatgttgtgatacaaagattttagcttctaaggatctcattgcccaagtagtgaacgtagtacactataggtagtatttctaaacacttttcccctccccctcttttggaatccctagtgtttattgttcccatctttgtgtctatatgtacctaatgcttagctctcacttataagtgcggacgtgtgatattttggttttctgtttctgtgttaattcatttaggatagagagactccagctgcagctgtgttgctacaaatgacatgagttcattcttttttatggctgcatagtattccatggtttatatgtatcacattttctttattcagtccaccattgatggtcacctgggttgattccatgtctttgttgttgtggacagggctgtgataaacatatgagtgcagttacctttttttgtataacagttcataataaaatactcttaacagtagcacagaatttagattgcttttcaggctagaagggataattgaaacatagaaaaaaataatgactcctaagcatagaaacagacccaatcataaagctctcttcctctctttctgcctagtgttagatcttattcattgtcttaaagcactgtgaccattttcagtgaaatcacagttttattcatgaaaagacaatgaattggtgtaagtaatcatttgaggatgaaggtgactagtctgtgatcaacaccagtacttgaagtacttgtaaaacatgaattgaccttggttaaattgcagaaaataaagtattagtatacataaacacattttctctcagcattgaaaagttatagtctataatttacctgcttgctaagaataaaaatattacttagaggtttatcaagaccttttttctacaaatggatttaatgtacagaattattccattttctatctgtgctctgtatactaccacctagtggaataaaatgcaaatttacctgtcaaaatcaggagaagaaaatgaaccaggggaaatttatttcaggaaaaaattttcataacacgttattgttacttcttttagtataatgtagtttgcataaaatacattagtttggagtgaaaaaagtcccagccatttttgtgatagctattaaaatgctattagtttgtccacaaataagctattctattcagaaacttagaagctaggtaaattattgagatgatgccagcatattatatctctaaattatgttaagaagcttctctaaattcctcatcactagggtgtattagtccattttcacactgctataaagaactacctgagactgggtaatttatgaagaaaagaggtttaattgactcacagttctgcaggcttaacaggaagcatgactgggagacctcaggaaacatacagtggaagaaggtgaaagggaagcaaggaccttctcatggcagcaggagagggagagcacaggggaagtgccacacacttttaaaccatcagatctcaggagaactcactcactctcacaagcacagcagggaggaaattcacccccacgatcctatcatctcacactgggcccctcctccaatttgacatgagatatgggcagggacacaaatccaaaccgtatcataggatttgttaaaaaaatctaacatgttctgcttcaaggcacccatgaaatgaaggtgtcatttcttaactgagaggttaaataaaagtgcagagataagatggttaagttttatcgtagctgggaagaaaagcgggtgtgtgtattatgcttaggtttttcctcccaaacaatgaaacccaaaaaggcaaatgaagctttaaggcgctttatcctttactggtaggatggtcctcctttaatcttcagtctctgttaaagaacaaacacaagctaacaatcaaaacctgttgttgcttgctgacggatttctctaacatagtcttccatcaaccatcataggtttgttgtggccacccaggccctttggtcgtcatgttcccatggaatgctaatgaaattaccttcccatttcctaaggtgacatgcctttcagatggcattggtgtgtgcttgtgtaaacacatttttttgtgctcatgaatattttacctgcctgattttggtgatctgagtgttgagcagtgggtgagggatggtggggcaatgggtagtaaggggaagtttaattgaagttcagataaaaatatccctccagaaacattacaaagccacaaaatcagctgaagttgagtcttctattgtaaagattctctttcttctcctgacagatccccattcctatccaggtagaccaggctctagtgaagattggacacaagtggtttatatcccgaagctcttaacctaagagtcctgccttgtttttttacttcatgtggtcttatattgctgaggatagcccagtgatcatttctaccttaatatgtagccttcaaaacgttgggtctctcagttttcttccttaataaacaatgaaccctaattatttataactgctcttgtgatggaggaattggcatgattttgcattgtgggcttctggctttacagtgtttgtgggaaagatggtcttctatctttgttatttataagtcattcattccctgtttttttgaagatattgttaaataaaaaaacttcagctgaattaaatttaaaagtttttaattgagcaaagaaccattctcaattcgggcagccttcccatccagagtagtccctgtgacttcagtgcagccacatggtggaagaggatttatggacagaggaaggaaagtgacatacaggaaacagaaaagagattcagaaacagctgaattggttataactcagcgtttgccttatttgaacatggtttgaacagttggccacgtttgattggccaaaactcagtaattggcacaagagtaggctaccatctgtttataatgtccacttaggttatagttcatgatgtgcaaagaaacctttaagctgagcttaaaatgtaatgaggcagctgtaggctaaacttgatttaacagtacttatccctctgttgaaattgcactcttgctacctgctagttgatgtgggcaggtgtgctaatgacacattcgcctgcacctaccacctgctgaagaccctgccatgtcctgaagcagtcacttaggctatgaaacagaaggatgagttagagaagtaaatattatattttaccccccaaagcctaaaaccatgtctaggttctcccctttctcaattcccaatcatgcaaccttgaaaggtgttatatagatagttgttagaaatatgtctgtcctccaaaaccctactaacacgcaaaaatggacaaatctagcttttttgctaaaatcctaacaactcagaaagcaaagcaaaatgaaatgtatgtactccattctcaggatttccttcttaaaaaccactaggctttgtgtaactcaattttaaaagtatggtaatagctcctgtaattcgatggcttcttctgggagacagatataaatctattctagactttaagactggtgtccacattttaagttacagttgtatgtacttctactttgttgcagccttctcttggagtcaagaagcctaccaaagccctgctctttgtactcttgagcccagtgggaccttatttttcaagtggaacctttaatccagtgtccctgtgggccaatcccaagtatgtaagagcctggaaaggtggaactggggactgcaagatgggagggtaagtaaatctgtgtctctgtctaaaggaaagacaccttcatgaccatttagttagtgccatttcacttcagtatgaacacatataatacttttcaaactttaatgctcattgtgtttcatggttaattttcagtttaatctttcagcaagccagctgtagtagcttttcctatataaacgcagtatgaattcagtgccctcgcttttagatgtgctagtttaaaggatagcccatggccctttgtaagggagaaacactggatatgatatctagggaagaactgaagtaagaaactacaacaagcatcacatcggtgctttggataaacttcccctgggcgctggtctctggctgcaggctgacggctggcattaaaaagcatctggtcctgggacccaggctctcagttggctccagggagtcatgtctggggaaggtgcccgcttcactgaagtgctgtcttcattgccacagattgtggccacacctgctgccaactggctgcgggacagccctgctttggctctgtcaggccagtctcataggccatatgtagctggcaggaaataaaagagcatttgaaaagtgttggacgatttcaggggtggacttggccatgagttgggaatgcccctatgggtgaacgagaataactggtttaagcagcatgggttcttgctttgcatgtatcaaatggtgctgtttgcatactcagggcagcagctgtcctagaaggtgactccatggcagtcttgtgggccctggtaggacatttaggtccaggaggcaggggagagtcacatgacgtgctgctggggtattagaggcaatgaccactggctttgacccctctgtagtcttgctgtatttcctttttcttttctctcctcacctacccaaattaaaaaagaacggttataaaagtcatccccactggcaactttagcaactgcattccctcaatgggtagagaaatccaaatggagtgcattaaaactaggaagtctattctccttctggcttagagcacaccttcctgtgtcctaggctagccaggttgaaaactcctttttttgactcttgatttctttttttactggttcaaacttcttcgcagagcatgtgcctatgtaccactgcataccatatatataccatatatagagagtaaataaacagtcttgatgaaaagtaataaggaaaaagtttccctgtttaaaatattgctttctagctccccgacctgtttaggaaaaagataacctggggacacagaaattgcagggcaatctttattaaccggtatttgggcaggttgtaatttattttgtaaacaatgatttaatgcactattgcagaatacatgatcactgtaggccagttaaaaattaatgttttcagtaccacacagagtgaaccctaatgtaaactgtggacttgtggaccacactaatgcaagatgataataagaagaaaaactgagagggtgttcgggaaggggtataataggggaattctgttaccttttgctcaatttctctgtgaatctaaaagtactctaaaataataaaatctattataaaaatatttgattcattaggctcaggtggactatgatccatggaaattgacttgaaatctcttaggaaaggaagagaccggagaagaaagtattgaactcataaattaaaaatggcaagagggaaggtggtaaccaaaaggatgggcatttaacctatatgcctatcacttccaaaaagttctagggccgtctcctcctatgcttctgacctggagaggtacaaggggaacaaaatattccgcatttaatattatcctgttgagttggcaaagacatttggagtcaactttagttttgtgtattattacatctgtaaacctaattaagtcaacagttacccttgacacctgtagtcaactggtattattaaataactattgagtctcataaagtcaagaactttctgctttctatctaagtgaatctagggcagagactgagcatcaggattctttagcatgcagccaagcttgagaagcactgagctagagaaaggtcttgcactgtagaaacagctttagttccaggtgattccttggttaatttgggaggaataaggctttctgtcactctctctctctttctctctttttctctctctcttgcacatgcacacgtgcacacacacacacaaattatctctcttagttttttcttttttccttgcattctgattctgcatttaagagtacaagctttgaagtcagaaagacctggcttaaaaacctaactgtcataatggtgcgtaaatgtcgttatagatttgtccaaacccatagaatgtacaccaggaatgaacactaatgaaaactctagacttcaggtgataatggtatgtcaatgtggttcattaatttcagcaaatgtaccactctggtgtgaggcattggtaatggtagaaactattcatttggatggggagaaagggatatgggaaatctttgtacttgcctttcagttttggtgggaacctaaaactgctctgaaaaaaacctgaagtctttaaaaacaaaccaacctaattgccttgggcatgttacttaactgctctatgtatcagtttcctcatttttaaagttgaggcaataataccttgcacagattaagtgagataatagaaagtgcctaggatagtacttggcatatagaaagctctcagcaaatgcagtatgataacctaatggttaaaagcttgggtttaggagtcaaatgtctgggagttacacacttaactatctgtgagatcttctacaactgaatcctctctccaagtcttccaatgaacaataaagtctagggttgtttttagatgactcaatgaaataatgtagttaagtacttagcacccagtctggcaggtatgggttgcatatctcttatctgaaatgcttgggaccagatgtgttttggatttcaaattttggagtatttctctttgggcatccctaatccaaaaaattcgaaatccaaattgagcatcatgttggcaccgaaaaagttttagattttagagcatttcaaagttttaaattagggatcctcaacctgtagtaaactctcacagtcactgatgttgtgaggttttctcactttctcatttcatttcctggactctctttatcttagaagaaatcagttaaattttacataatagaatttattcttttggagggatgtatttaatatgtctattctcccagataacctatttaaaaccatattgaaatgtttctatgtcaacagctttcttactttttcatttttctgtttcctccaagaacatgtttctcttatgaatattggcagcacatgggcgggaacccaactatattaccatggtatcagttatcctgtggacattaataatacagcttacacctgtgagagaactctgggaaaattaaaacttgtttgggggaataaagaccatctacagaatataataatacatcaatcaatcaattaaaacttaaacataaaaaacccttttcttttcagtgcattgaaatagtcactgtctttaatcctctttccttgctcagtgcttcatgaagctgaggagccatggttttaattcagctacactttcagaaatgtgtatgcatttgtatttagaagcttctttgaaaggctaaatattcatcctgtaagaattctctatgtgttttttaatacagtctaaagggcattttgtatatgaaaaaataatttattttcaggtagggtaaaacttcactgcttcactacttcgtagttgtgtctacgaatgagaaaaaattcaaataaaatagttattattattagtttttagagatgcagtcttgctgtgttgcccaggctggtctgggacttctggcctcaagccatcctcctgcctcggtgtcctgagtcactgggattacaggcatgagccaccacaccccactgaaatagttattttttaaaaaacttaatttcattaggatgtaacagtctcatgtaactcatcctttggcttttattgttattatttattttttccaagcaacccaatgagatatataaagcagatatttttatctgccagataattaaatgagggaaaaataaggactaacttgcttaagttcacatataccaaatagtggaaatgcaagagctgtcctcaggtctgttaacaacaaacctgtggtctttctaccagacgtcccctgcaatctggtttatactcattattaaaaagcatttgtaatttaactcagttatctatttactatcagttatgaataaggattatttgactttttatggtcattaaacaatagcttcctatctgttgtctttgtctttttaatttttatttattttattgtttttttaatagcttcctatctgtataccagacttgcttcatctccacattgaccaagaatttatattttgtcatctgtatttagaagcatatgttttaagcgtcttttaatggctctttttttttttttgctgggaggggacagtctcgctctgtctcctaggctggagtgcagtggcaccatctcagctcactgcaacctccgcctccctggtgtgagtggtgctcctgcctcagcctcccgagtaggtgggattacaggcgtggtccaccaaacccagctagttttttatatttttggtagagacagggtttcaccatgttagccaggctggtctggaactcctgacctcaagtaacttgcccacctcagcctcccaaagtgctgagattacaggtatgagccactgtgcctggcccttttaaggactctttttttttttttttttttttttgagacagtctcactctgtcgctcagactggagtgcagtggcgcgatctcggctcactgcaagctccacctcccgggttcacgccattctcctgcctcagcctcccgagtagctgggactacaggcgccagccaccacgcccggataatttttagtatttttagtagagacgaggtttcaccgtgttagccaggatggtctcaatctcctgacctcatgatccggccgtctcgcctcccaaagtgctgggattacaggcgtgagccaccgcgcctggcccttttaaggactcttaacattaccttggtgtgagtcaacctcatcgtgctccaatggcaatcaccatagtatgatgtctattttccacagcttactggaatatttcagctattagtcaatattctttcagttgcaagtcagaaaaccaacttgaaattattatttatttatttatttatttttttgagacggaattttgctcttgttgcccaggctggagtgccatggcacaatctcggctcactgcaacctccgcctcccgagttcaagcaattctcctgcctcagcctccagagtagctgggattacaggcatgggccaccactcccggctaatttttttgttatttttagtagagacggggtttctccatgttggtcaggatggtctcaaactcccaacctcaggtgatctgcccacctcagcctcccaaagtgctgggattacaggcatgagccaccgtgcccggcctggaaatgatcttaagcagacaagggcttatgaaactaggatgctaggggctaaagcaattatttccaagtttcttgtgtcctttgcacatccccctttttcttcccttcttcctctgcctctggtcagagcttctggctccatgttggcctagggctctcccacttcagccgctttcttctgtgaagtgtggtgatcatggacacagccgaccccagttttacagcataccaagtaagcaaccccagaagggagaaaatgcctgtatttcaggttatagacattaaaatgagtgaatgcacccaaaaaaggaatcatgtgactgtcttaggttatatgcccaccctttaactcagctgcagcagggcaagatgctatattgtcatcagttgtggtagggcaagatgctatattatcagtccaagcagaatgacatagctctatagaaagactatgtttttataagagtatggaatatagtgcagatgaaaacagtagatatacactaacatgtggctctaatgtttaatttttattttttttgagacagagtctcactgtgtcacccaggctggagtgcagtggtgctatcttggctcactgcaacttttgcctcccgagttaagatgattctcctccctcagcctccctagcagctgagattataggcacccgccaccacgcccagctaattcttgtattttcagtagagacatggtttcaccatgttggccgggctggtctcgaactcctgacctcagtgatccgcccatcttaggctcctaaagtgctaggattacagacataagccaccgcgcctggcctcatgctcaacttttatttagacaacagtacaaattgtaattttacccagatgtaaaagagtctaagagacctaaatagatattttgtggtagattacattaatgtaatgtaatgtaatgtaggagttttacattactacatttgtagttgttttagttgtttttcattgtttgtttctgtgtatttctggggatttcatggtgcaacaggaggactagagtttattcccgatccctgactgtcttacggcagtacttctcagacctactgagttatacaaccaggggtgtagggaggcaagcagtcatcacatttatttgaggactctcatgttttgtctaaaatattcatccttattttataatatactccataattttcccatataagtttagataaaagatgataccttaaaagtattataacactaaattgtcattccgggaaaatgtgctgtgttcctttcattttaaataatctgagatgaatggtgcaggctgagaaaaataggcttttgaaatactttttggtcaacatcgagacttttaacatttgtcctatcttttaggggaatttagacattgggcattatgtattccttggatacattaaaaggtgttagataagagcgctcacacttgctgctcttctattgcaacttgacagaagttacttctctaaaccttagtttctcatctgaacaatggaaataatgatagtgtctatctcatagtattggtgtgagatttaaatgaaataattcatgtaaaattgcttggtgtgtggaaacatagtaacttttaactgttctcattaacttggctatttacctgtgttcttctatcattacatttcaagttaaaatttcaaggtttcacgttgttctctctccaatgaatgcagttaaatcacttagattttctaatgagttttcctttaatgttatgcagttgactagagagtgtatatatattaagaacataataccttcactatgtccacatgtgaattaagagcttgaggctatcagagggtagaagatgagggagtggggatgaagtatgtttgtaacctgtgtattttctctttcttaaaggaattacggctcatctctttttgcccaatgtgaagcagtagataatgggtgtcagcaggtcctgtggctctatggagaggaccatcagatcactgaagtgggaactatgaatctttttctttactggataaatgaagatggaggtaatccactcagatttcactgtgtgcatttctcagtcattttcaacaggaccagaaagacaagagctagaaacttagtacaagggagtaagtagcacagttccaaaggctaagtaaggactactgtgcttttgctgcccaaatagacacaagtttcttttttttctttctttcttttttaaagaggtggagtctcactatgtcacccaggctgcagtgcaatggtgtgatctcagctcactgcaccctggttcaagcaattctcctgcctcagcctcccgagtagctgggattgcaggagcctgccaccatgcccagctaatttttgtatttttttttttagtagagatagggtttcaccatgttggtcaggctggtcttgaactcctgacctcaggtgatccaccggccttggcctcccaaagtgctgggattacaggtgtgagccactgcacccggccgagtttcgatttaaagaagctctagaggttttttgtttttcgttttttgtttttctggctctagatgtactgattattgagatactgagatgtcacattaagggatttaagttaccatgattggaagatttgcttccttatcccttctgcagttccccaacaattttcctatctgaacaccttgcattgagacacaggtctcagatcaggtcaatggtcattcaccatataccgtatataaaatgctagagtaataaatgcagtgtactgattctactggaaggattttgtgtactctctggctgtaattgttttaacaattgttgccttttctacatattttgaaaatgtatcacaatctctccaaatttactctagaactcaatctgattaaagagcaccattttaaaagataaatcaatgtatcttgggattgtaactagatcctggttcattcaagacaatttcatatatccactatagatatcaatatttctctattatctttaatatcctgagtactcattacttttctttgctgtttttttttattagttggcagagaccataggggttcagtgaagtgttggcaacgtgtatgatattgaattaaatggccaacggtgggagaaaaacaggcatttatttctattagaattttgataatcataccaaatttagaagcgtatttttagacttgtttacattcttaggttgttcatttcacagtagtaattatagagactagaaatataaatgatgtttccaaatacttatgaagtctcagtgttagtagtttcaattaaattttttaaaatgcagtttatatttgaaagtagctacagtagcctctcttgctctaatgttatttggctacaaaaagaggaaaatggtaatttagatgtggctgaattcagagctaagtactaattttagtgttagttgcagagactaacaagatgagtcttatactgcagtcagaggtagaataaacagaagatatggtgagtaagccttgtcctgggcttggccattggtagtccttggcatatgaaaaaccagatacagatcattctcatccttccattcctgctgtttgtacttggcactgtttgaaaataaaatttatacaggaatatttatgatttataaatttgagttactgtatgtgacatataacaaaagctacacttggaagattgtagccagtgttgacctctgcacttagaagataataggccgattcaacccttcttcccatctgcccactcttacccccaccccaaactccaccaaaaaaccacacagctcaaaacaaaaacagttacatcattcagaggtggtaccatcattatttttatggatgggagatgtcagaatttaagtacactctgaatcagagctacatgatttaaccagaaacaccagaaactgtcctggtggaaaattgttctttatccaaacaataatcatgaaacatttccaccatggcttttaaaggtcagaatagaaatgagtgagtttgtcttctgcctcttgcaaaatatacaagaccttaagactgttagttactattcagattatggttgcctgggataactttagttttaatatactccttcactttggggatgttcatctaacagaacaaataaaattcagaataaggagaaaggaaatagaatatatatttgaagtaaatagaatgttaggaaaaacctttgggctaaaaaaaaagacatgcaattctgaagtaactttgatttatatcatatgattttaagaaaatacaatgaacaaacgagttgaaaatcagcacaatactgattttcacaaacgttaccgataggaggtataaacagagttctttcggtaatagcctgccgtcttttcatgagcgcccacacacactgctcctgttggttgagatggctggtgcaggaaggtggatggggtggtggatagtgtgtgttcaaagcacagtgctgtgcacagtcactatgtgtggcactcagcttgtaactcatgggagttttgatttcagtaacagcacccatggtggcaagatcacacatcatcactctgttgatgagtaatttaacccatacgcttgctattcaccatttgaacaaagcattgtatcatatcctggaccctggagataccctgaaaaataagacccaggccttgtggttgagttcacagtcactttgggaaaacaaccacagcagtgaatctcggtattgctcaggccacatcatgagtcttctcggacacgtcaggcgtgtatacggactcgacttggagcactcttcctcagatgtctgtaccgcttgctctttgacatcctccaaatctttgcttacaaatcccattctcagtctggctttccttgagctcttaatcaaaatcataaactccatttcccatttctcctcagcattccagcattctccattgcttttccttctttgtttccccctgtgtagtctaacatactatcaacacaataaatgtttacctgtgtctattagaaagtaagcagggagatatgtcagttttgttcactgctgtattcatagagcttaaaacggtaaacagcactcaatatgtatttgtagaataaatggctaattgtgctgatggtgtttagggcacttatgcagacctacattcctggtttccattagtgtttgactttgggaagtcacagatgaatcctgctgttattgcttctaaattcctcatctcctaaaaatgacttctttgtcaaaaacaagctgcatttgtaggttctgttttcctcatgttgggcaatctggagtgatttctggctcttgtaagtatgtttgtggttgcagaggaaaatgaatatttctcacccaaatgttgtcatgtcatcatctctgtctggcaaccagagaagcagatgttctgttccttgacctcaggctagtggttacagttctgggtgttaaacatgtttcacaaaacagcacttgcacatgcggggctgctgttttcatttaacttcatgtagtctcagggctcagcaagctttaggaaaggtccggtttgggggcactggaagtgtgtgtgtgtgtgtacatatatatacacacacaaatagatccatacatttatgtatctagttggctagctattgcaaaacacatgtttattttgagatcatcaacacttctaaacatgacaaagagtagccctaagaacattgccaagaacaaattttctcctttccagaaagcaattttcagcagatgattttcagaaacaaaattcaaaaaagccatactgctgtatcctagcaaagataacttattcgtttattttttactcaaaaacatttattatatacactctgggctaggcacaatgcccagttttgaggatagaaggatgaagatagagtttggtattccagatagagcttgattgttgggcatgtctgatgtaaccccagtggagtgggcgagcctagaaccaccatgtattgagggagagggtggtggcctcagtgtcaggactcactagattcagactcctgggtgtcagaagtggggaggaaagggagatgctgagtgccagagggtactgtaaggagagcttgtgcagctgatggatcatgcatgatgcctgtgaacaattgtcctactagacctcacagtagttagggatgtctgcagtcatctcacagtagagcagtagctcagctttggagttttgtttcttgaatgtcttcttttttaaccgtacacgtgcttgagctcactctgataagcccattacatttgaatctcagagagcaaaggcagcatctccatacttgttgctgatgctccaccaggtttgaaaatcactaaagatagactcttaggctgggtgcggtggctcacatctgtaatctcagcactttgggaggccgaagtgggcagatcatctgagctcaggagttcgagaccagcctgaccaacatggtgaaaccccgtctctactaaaaatacaaaaattagccaggcgtggtggcgcgtacctgtaatcccagctactcaggaggctgaggcaggagaatcacttgaccctgggaggcagagggtgcagtgagctgagatggtgccactgcactccagcctgggtaacctaaaaaaaaaaaaaaaaaaaaaaaattagactttccaagggcagcgtggaagcagtgaccagcctgagtaggcacgcacacttcttggggatagcctcctccatagcattcttagaaggtttggtaatgaccagtttttctgagtaagaccctatctacattattctaattagtaaccacctttcatctgctaaggtaaattttcacttcagaatattcctcttaagaccatgcaataactcttactgtttgttggtggaaaaccatctcattattttactggttaagggtaaactgaagatgattagataactttccttccttccctccccccttcctcccttccttctctttcttccttcctttctccctccctccctccctctctctttctttccttctctctttcttttcttttcttttttctttctttctttcttttttctttcttccttccttcgttccttcctccctccctccctctctctctttctttctttctcttttctttctttctttctttctttctttctttctttctttctttctttctctctttcttttctttctttctttctttctctttctctttccttccttccttcctttctttctctctctctccttccttccttccttctttccttccttccttctttccttccttccttctttcttctttttttaaataagggtctacctgaagtgtgaactgatttgggaaatttgatcatgcagaacagtaaaattttctttatgtttgttgctagcaaaattgtgatggttttttaaaaaaatggctattgataataaggcatgcctaatgtagtgaaagtttgaaaatgtcccaatttctgattgacagaagaagaactggcaactcctccactagatggcatcattcttccaggagtgacaaggcggtgcattctggacctggcacatcagtgggtgggtgcctttgatatgaacaacttttgtaagcctgaaataaaaaataatcaaaataagcccagcctagtgttgaaataatatcctgtggttccaaccaatgttatctaatctttaaattctaacgtgaatgaaaagtattcttctagaagggctttcttggcaagactattaaaataagtattgttgatagcaagggcagagagaaaccagtttagcaagatgtcatagtggagaagtattctagtagtagtctcagtctaccaggtatctcccaccaacttttgtctggttcatacctgatgtgcttccatccagacattccttaacttcccaagtctgtgttgcttccaaatggcaatgatacttcttcctttcctttatttataccagtgtaaccatgcttgccgtagaaatgaaataatttcactgacatataaatgtttactaatataacattattggtttgactgccttctttttctctctgtcctacccccatcctccaaaattcatatacatgcctattttaaaatcagaacatgcaagcaaatgtaaagttgttttcagtagactttcaaattcgtgtgacacaggcaagcatattaaacaatttggtggaccgggtgcagtggttcatgcctataattctagcattttgggaggccaaggcaggaggatcacttaagcccaggaattcgagaccagcctgggcaacatagtgagaccccgaatctacaaaaaaatcaaaaacattagctgaacatggtggtacatgcctgtagtcccagctacttggaggggctgaggtgggaggatggcataagatctggaggtcaaggtcgcagtgagctatgatcaagccactgcactacagcctgaatacagggtgagaccatgtctctaaaagtaaattaaataaataaataaataaataaataaataaataaataaataaaataaaatttaaaaaggtttggttttggaaatgacgtaatgtattcaagacaaattattgaatgaattgggtgtctggtaaaggttcttggatggaacttttgacccaggtgttaaaatggtctccaaagaacatgaaaaggctttgagcttactgtggtcaaagagtactagtagtaataggacaaatgtttagaaacacacacgttatctaggagcataccagcatggtttctctggaaaagactttcaaaatagatgaaatgtgctataaataattctacaaaaccctgaagtagacaagacccaactgctacatgctggctggcgcattgggcatgacatttacaaaccgttggtataattttcaaacagcttgccctgtcctaaatatgtttgcaattggaaagatatttttgaagctcagtaatttttgttttattaaagaaaaatatcaaccaagtacagaaggttcgacgacaagttgcaagtggaaatactttcccacactaatgatttgctagcatgaaaaataggttattatggaggaaattttttcttgacttcatagctgtaatttattttaaaagctattttaaaacatgagacgtgaaatgccaagaggcatgtagggggtcaccactatttgccagataggggaaattgtccaaagataagtaagggtgagcagagcaaaaacaattctgcttatttacaaaagagttttcttttcttttctttttcaggacacagaactcagcttgttttcaattaatttgcctgattttctgcagttcatttacttttgaacaacataattgcaattgtagactgagagaaattgaaactttcaaagagccatatttctattgcagatatattttcctgctcttccaaatctacttacagcatgagttcttcttttaaatattcaaatattttgaatattgccaagagctttgatttccatttttatctcttgtgggtttataaattaagaaaaaatactcatcttatttttttaaacctctctatttttattgccctttattcaaataacttgttgacaaactttgaacttgaaccactgaggtaaaagaacaagaattaaacagatagtttaaacacatagcttaaaaggatctttttcccatttcctatccttgagcaaagaatatattcaaacactttggcagaagtcaatgaggttataccactaattccatgatgaaaatcaactgaatgtgatactgaaagagaaggaagagaattgtcactgtaaagtcaactgttagtcatattaggaaaaaaaatacatacaatacaatttctcaaataaagtccaaatatacattcaacgtttaaaaataatgagtatttcagatatttgaactcagtctgttctttattccataaaagatataggtaagccgtgcacagtggctcacaactataatcccagcactttggcactttgggaggctgaggtgggaggatcacatgagcccagcctgggcaacatagggagacccctatctttacaaaataaaatataaaatataaaacctagttgggcatggcagcatacacctgtagtcccaggtgctcaggagactgagacaggaggatcacttgggcctgggaggtcgaggctgcaatgagccaagattatgccactgcattccagcctgggtgacagggcaagaccctgtcttaaaaaaaaaaaaaaaagaaagagacaaacgtagaaagagtaccaaatttggagccaatcagatcagacctgggttcaaattgagtttctgtcacttacttcctttgtggccctggagatgcccttcaacctccttgaaccttagtttcctcatctgtaaaatggggatgatagtactcacccttaaaattacagaacttggcataatagcgggtgcttgataaatggtagctataattattaatattatataatacattgttctcctttatggtaaagtaggttttaagacactgatttttttgttttgttttgtttttggagacagagtctcactccgtcacccaggctggactgcagtgacgtgatcttggttcactgcaacctctgcctcctgagttcaagcgattctcctgcctcagcctcctgagtagctgggattacaggcacccgccaccatgcctggctaatttttgtatttttagtagagacagggttttaccaggttggccaggctggtctcaaactcctgacctcaagtaatctgcctgcctcagcctccccaaatgcagagattacaggcatgagccaccgtgcccggcctaagacactgttaacacggagcatgcatcaagcagcatttgggatgcatcaattttgtgagactttatacaagttaacaaataagaaggcaaaaaagaaggcatatgttaaagtataccatgtgtcttgtggtgataatcttatattttatattctgataatctcatatataaatctgtgaccttgaagtaggttacttaacacctcgatgtgttcaccagtaagatggtgtgccacttccagctttcccttaaaggatgattgtgaccttgtctaagtgcaatcagaatgttaagcagaacagtaagtattgcaattgttttgcatgccttttcctttaaaatatacttgttattttttatattccatgcagggtgaatttaaggtgtcagagagatacctcaccatggatgacttgacaacagccctggaggggaacagagtgagagagatgtttggctctggtacagcctgtgttgtttgcccagtttctgatatactgtacaaaggcgaggtacgacaagtatttcctcatttcctatcatttccaatcacattaaattacatttaatttaagtgtatgaataaaattgtatctggacccagacccaagatgcaaaagttttgtcgttgttgttgtttttctttattttaaagagatggagtctcgctgtgttgcccaggctggagtgcagtggctattcactggtgtgatcatagctcactgcagcctcaaactcctgggctcacgcaatccttctgcttcagcctcctgagttgctgggattacaggagtgcgccaccgcaccatgctaggtcttttttgttgttgtttttgttttttaacttggcactacaaaaaaaataactgggacagtttatccagatgaaactgtattagcatatatctactatgtttccagtgatttcatgtaagcttaaacatggtgggaagttagttttgtccttggacacgtgtaagatctgtcttacctacatgtcgggattggagctatgccgacagtcttctactcttctctcttccttcctaccagctcactagggaaggctctataggtagttacatttcagtttctggttaaccaaaagtacttccaaaccactggattaggaatggcaaatagttatggaaaatgcattcgagtggtcaatcccttgatttttttttactattaatgctgttatcattaatagtaagtagaccactttacaagaattattcattggcaaacctggtgcatttactaaaatcttacaaaaggaatttgaggatttggttggaagaaatgttctcctcttagtaaattagtctgattttatatgtgccatacttttgttttcttgtcaaattgttttgcttttcactttataacaaagctccaatacttatgattaacattggcatctaactttataacttaaaggcatgtaagtattagtcttataatgtgaactggcttaagttattcatattatagcagatccttgaacaacacagggattaggggtgtcaacccccatgcagttgaaaaatccacatacaactttttttgtttgtttgtttttttaaacggggtctttctctgtcacctgtactggagtgcaggggcacaatctcggctcactgcaacctccgcctcccaagctcaagcgatcctctcacctcagtctcccaagtagctgggaccacaggtgtgcaccaccacacccagctaattttagtattttttgtagagacggggtttcaagatgtttcacaggctggtctcaaactcttgagttcaagtgattcacctgccttgacctcccaaagtgctggtattacaggcgtgagtcaccatgcccggcccacatataacttttgacttcccaaaaacttaactactagtagcctgctgttcaccggaagccttatcaacaacaaaaacagtcgattggcacatattttgtatgttatgtatgttatatatgtattcttacaataaagtaagttacgaaaatcatggggaagggaaaatatatttactattcattacatggaagtggatcatcataaaggtcttcatcctcattgtccatcatgttgagtaggctgaggaggaggaggaggaggagggattggtcttgctgttttaggagtggcagaggcagaagaaagtccacgtataagtgaacttgtgtagttcaaacccgtgttgttcaagtgtcaaccgtaaatgcaaactccactggttttcaaattttactttagagttattttccctcagctgattggagttttgctcaactcctctgactttaataatggctgcttcatttgttgaggttttagaacttgcttttaagggattgctcttgacataattgcatcaacagatagactgtttcatgggagaagaattgttctgtttcatgtcaatacttacattgataagaatgcatcaaggtaatgtgatccatccactgaagttgtcattaggccagattttttttaagttgaattattatttcacttctagaaataagaagtttataaagtttagcataattttaatgatccaggcttaggaagcatttacagccaaaaagtaagtatatataattatcatattatactaaagggtataatatgaaaagtgtttgagagcacagactatctcctaaaatcaaactatcaaaacctgcaagccagcaaggcatgagtaggcatgactcagatacaaattagaagcatgaaatctctttcagccatgcatttaatcatgctatccaatattgtggaggtagtggcccctggaagtttaccttgggccagagataggtatagaagccccttttatgaagtcatagacttgctttaatttatgctcccagaatgacttgcattaaactgtggcaaaatatctttgagttctcatattagccagagggttaatatgtagaagacaatcattcatccttacagattctcagaatcttggaagaggtagggttctttaagtttagccactattttaggtaactgtagctcctccttggttcttcaaatgatcctgaaggctggtatacaaaccagttatgccctaaaattaattggtaggtaggcaatgtataacctgtcattggctagtttttattcaaattttggatatgaaagtctttggcataaggtgctagcactcagagtcagtaggttttagtgctattccttaacttcagtggaattgccttagtatagcagaattgcttgagtgtcttatctgttatcaccatatacatgagtaccctcaaattatctcatttccctttcttttgtagacaatacacattccaactatggagaatggtcctaagctggcaagccgcatcttgagcaaattaactgatatccaggtaaagcttttcttttcttttcttttctttccttttcttttcttttttttatgtcaccttatttctgtcagagcttacaactaaattatatttcaatgaagaggattaaataatacaatttgagatcaataagttaaatttaaggaagatattcccaacacaatgtgtgggcatgagcaaagcagaaatgggaaagaagatgtatgttttaaaaaaagaaagaaaatattgttcaggactccacattacttaacattaaaaaatagatgtaatttttggtaacatttaaaaatctcattaagaaggataacataacttttgttaaaaaaaggaagaaaaaatttgaaagtagaagcaacttcaggaagaaaattacagtgcatgtgattccaacactgagatataatcactgttaattttttatgtctttttatttttgagctggagtttcactcttgttgcccaggctggagtacgatggcacgatcttggctcactgcaacctctgcctcccgggttcaagcaattttcctacctcagcctcccgagtagctgggattataggtgtgcgccaccatgcccagctaatttttgtgtttttagtagagatgggatttcaccatgttggccaggctggtcttgaactcctgacctaaggtaatccacctgccttggcctcctaaattgttgggattacaggcatgaaccactgtgccctgccattttttgatgtcttaaccttcaatattttgtaagcatttatatactttatttatttatttatttatttatttatttatttacttatttatttttgagactaagtctcgctgtgtcacccaggctggagaacagtggcatgatctcagctcactacaacctccacctcctgggttcaagcgattcttctgcctcagcctcccgagtagctgggattacaggtctcatgccaccgttcccggctaatttttgtatttttagtagagatgaggttttgccctgttggccaggctggtcttgaactcttgacctcaggtgatccacccgccttggcttcccaaagtgctgggattacagccgtgagccaccatgcccagccagtatacttttagatagttattttttcctaacaaaatgggatcatattgtacataattttgttacatgttttttcactgaataaatgctttgcttttttatatcaataagtagttttctccaacaccatttataaagtttaattgaattccattatattgatgtaccataatttttttaaaaaattatattattgaacatttatgttgttggcaatttttttttcactagtatggacagtacatcctcgattacttcctaaggataaatctgggatcaaagagtatacacgtctattttttcatactgctaactttgttttgcctattttttttctgagcaataatctacagtaatgcctcatcaggcagttaagcaggcatgctaaataccagataacactgggctactcagaaaagagattatcctgtaatttgcaagcatttcacaagttagaagactttgttgaagccagttactatccttgtcaattagtaaaaatatccaagagggcctgagacttacattgaaaagtaaaataaagtttgatcatttgagtgatgtcggatggcattaagtcatgaaactaagtgaaacttaaaggtggctgagaatgcaacaggcctccagagagcaatggaggtccttgggtagtgataaaaatggcatttctggctgggtgcagtggctcacacctataatcccaacactatgggaggccaagacaggaggatcgcttgaggccaggtgttcaagactagcctaggcaacatagtgagaaccttcctctaaaaaaagggaaataaaataaaaataaaagtttaaaagagagtttaaaaggcagttttaaaagagacttactcagcaagttttctgccaaatttacagtattaaaaagaaagaaagtgtgtttttgtttctgtttgtttttttgagacagagtcttactctgttgctcaggctggggtgcagtggtgcaatctcagctcactgcaacccctgcctcctgggttcaagtgattcttgtgcctcagcctcccacacagcagggattatgggcatgcaccatcatgcctggctaatttttgtatttttagtagagtcgaggtttcgccatgttggccaggctggtctcaaactcctagcctcaagtgatttgcccaccttagcctcccaaagtgctgagattacaggcatgagccaccgcaccctggccttgattgtggttttttaatcaatgagctgccatacttctgctctccagcaaaggttttctatgagaattttctgtaagctaagtaaaggaatatcttaatattggaagaaataaaatttagtcagagttgttttctacctttgtacacagcaacacttacaagtaatttgaagagtagctaataaaaatttctgcatggatggcttaggcattttaatttttttaaggttgcctgagtaaatctgaaaataataaattattacagttttgctcaaataaagaacacaaatagaacaaaaaatacataactggctagattacatgaaagcctttttccaaaacagaggtttagaggccagggcaaataggcaggaaaaataaataaagggcatccaaattggaaaagaagaagttaaattagctttcttagcagatgacattatcttacacctagaaaaacctaaagactccctcaaaaaacctgtagaactgataaatgaattcagtaaagttgcaggatataaaatcaacatataaaaatcagtagaatttatatatgctaacagtgaacaatctgaaaaagaaatcaagaaagcaatcccatttataatagccacaaaaagtataaaatacctaggaatcaatctaaccaaagacatgagagatctatacaaggaaaagtataaaactatgatttaaaaaattgaagaaaacacacaaaggtggaaagatattccatattcatggattggaagaattaattttgttaaaatgactatactacacaaagcaatttacagattcaatgcaatccctattaaaatactgatgactttcttcacagaaatagaaaaaacaatcctaaaatgtatatggagctaaaaagaccccaaatagccaaagcaatcttgagcaaaaagaacaaagttagaatcaccacactaccttacttcaaaatttattataaaactataataaccaaaacagcatagtactgatataaaaacagacatagtagaccagtgggacagaatagagaacccagatacctaagtccacatgtttacaaccaactcatctttgacaaaggtgccaagaactgtaacggggaagacagtcttttcaataaatggtgctgggaaaattggataattatatgcagaagaatgaaactagattcgcttctcttaccatacacagaaatcaaatgaaagtatattaatgacttgaatcttagacctgaaactatgaaattacttgaagaaaacattaaggaaatgcttcaggacattggtctaagcaaagatctcattctgtcactcaggctggagtgtagtggcatgaacctggctcattgtggcattgacctcctgggctcaagcaattctcccaccttggctttccatgtagctagaaccacaggtgcatgccaccacattccactaatttttaaattttttgtagagatggagtctcaccatcttgcccaggctggtctcgaactcctgaactcaagggatcctcctgtctcagcctcccaaagtgctgagattactagcataagccactgtccctggccagcgaagatttcttatgtaagacctgaaaaagcataggctatcaaagcaaaaataggcaattgggattatgtcaagctggaaagcttctccacagcaaagaaaacaatccacaaagggaatagattacccaaagaatggatgaaaatatttgcaaactatcaatctgacaagggattaataaccagagtctataaggagctcaaacaactgtataggaaaaatctagtaatctggttttaaaatgggcatgagacctgattagaaaactcaacagaaaaaaaaatttgattaaaaatggataaaagatctgaatggacatttctcaaaagaagacagacaaatggccaggaggtacatgaaaaaatgcgcaacatcactaattatcagagaaatgcaaaacaaaaccacaatgtaaaatccacttgccctagttaaaatggcttgtattaaaaaaaaaaaaaaaaacaggcaataacagatgctgggaggatgtggagaaagggaaccatcatatattgttggttgaaatataaatagtacagccactatggagaacagtatggagggtcctccaaaaataaaagtagaactagaacttccgtgtgatccagcaattctaccaccgggtatatatccaaaagaaaaaaattagtatatcaaagagatatctgcactcccatgtttattgcaatagtattcacaatagccaagatatggaattaacctaaatgtctgtcaacagataaatggataaagagaatgtggcataaagatatatatatatatatatatacacacacacacacacacacacacaatgtggtactattcagccataaaaaagaatgaaatcctgtcatttgcagcaacatgtatggaactggaggccattttgttaagtgaaataagcgagggaccgaaagacaaacatcacatgttctcatgcaggtgctaaaaaagtagatcctatgaagacagagagtagattagaggttaccagaggccgagaaggggagtgggaagtagaggataaaggaaaaaaacaagaatataaatgtatttattaccattaaactgaacatttaaaaattgtaaagatggtaaattatatatgtgtattttatcttaattaaaattttaaaaatcaggagtttagaaatttttaagagaagtgtgcccatagtgataagaaagaaagacccttttggaaaattttcttgaacaaattatacagtattttcttaaacaaattgtacattctgtagcagttaatacaccaaataagatttcagggttacctcttggagattgtatgaaataaaaacatttaggtgggcatgatggctcattcctgtaatcctaaaactttgggaggctgatgcaggaacaatacttgaggctagtacttcaagacgagcctaggcaacatagtaagacccagtctccacaaaacaaccaaaaaaaatagcaagtgtggtggcacacacctgtagttccagctactcaggaggctgaggcaggaggaacacttgaggccaggaatgtgagactgcagtgggctatgattgtgccacagcactccactccagccttcactgtagaaagagaccctgtctcgaaaggaaggagggagggagggagggagggagggagggagggaatgaaggaaggaaggaaggaaggaaggaaggaaggaaatgtaaactcatttgatttggctgtaaaggattaatagaaaaggaaaacgtagtcactaggctgagaaaaattgaactctattgaattggtataaagatctaagtggaggtgtttggcagacatgatcatgaagctttcactgaggaaggaaactctaggaggcaaaagcagaaatgcaactcatcaaaattgaaatggtgacaaaatatgtgcattcaaacctgaaagtgactgaaagagaagcccaaacacacaattttggggtaagatgggaaaccattaccaaagttctcagaaagagcatttttaaaagtaagattatagaagccaaaaggatatgtagtagtctgttctcacactgctgtaacgaactacctgagactgggtagtttgtaaagaaaagaggttttattgacgctcagttctgcaggccatacaggagacatggctggggaggcctcaggaaacttacagtcatggcggaaggcaaaggggaagccagtacatattacatggtgggaacaggaggaggagagggagggtgggaggtgccactcactttttaaaacaaacagatctccttagaactcactcactatcatgagaacagcaagggggaggtttgctcccatgatgcaattacctgacaccaggcccttcctccaacatgggggattacaattccacatgagatttgggtggggacacaaattcaaaccatatcagaatgttagtgactaaagtaaatgttcttgtttaactctttaatgtgtatattgagtgcaagccatatgcaggggctattctaggtactggtggtttactcaagaaaaagggggcaaaaaaatgaagaaggtggccaggcatggtggcttacgcctgtaatcccaacactttgggagactgagacgtgagaattgcttgagcccaggagtttgagatcagcctggtaacatggcaaatccctgtctctacaaaaaaatgcaaacaaacaaacaaacaaacaaacaaattaatcgggcatggtgtcacatgtctgtagtcccagctacaggttgaggtgggaagatgccttaagcctagggaggttgaggctgcagtcagccatgatagcaccactgcactccagcctgggcaacagagtgagaccccatctgaaaaaaaaagaagtcaaaacaaatgaaaaaaaaaaaaaagtcaaaacaaatattcagtgtaaatgtgagaccatgtaaaaaagtttaaaagtaaaatatatagtttaagcagaggatgggagacggggaaaaaaccttttctccctaactttatatactccctctataaattagtgcttatggccaataagaaatgaataatttcttttttcaccgttggtagtaaagtataatggtagttaacacaaaaaactaaatgatatattcagaacctcatactaaacaaagaaacaaaggcatgcaatcacaggacaggtggaaacagtggttctgaactaaccacaaaccagaactaccaaatgtgctacaaattgtttagtaacaaaggaccatcccttcagaattgaagagcacgtctcagttatctcatgcctatgtgcatggaacttaaagtctcaaaattactcttacaagatggcaaattgaggctgtcagctaagctcctagattgtctgtttctccaagaaaaataaatttcagtaattattaaggaaaaagcatagaattgcatcatgttttacatttcattacttttggcatgacatgggagcatggatgttttctacaaagtgctctgataaattgaagaagaggccaacaacagccaccgaaaaaaccttcaagattcttgccagtatggctcaggggaaaaattccctcataaccacagatttgacttttcaacttctgtacttctgcatatgagtaataatctctgaggttaagtattcatcccatttagctaattgtccacataactccctgggtcttagattgctctataaatacctcctaagagaagaatttttcaaatgacagtttcgtttttcctttttcttcttttaaagcaacaaagaaaagcacgtctgtgtttatatttaaccaaacttaaacttggagagcattggccgtgttgtcgacgtgtttcttttctctactgttaaattccttactgttccagttactcaccatcatactcacctttgcctctgccacttggggtcctctgttctgcagttgtgttctgctctctgatgcctccaggttttgctgcaccttctagaaattgctcacctggataaggccttggctgtcctttatgactcatctcgttcagaagccttttgaatctctcttgaagaatattccctttgctcagtccaaatacacattcactcacttgaatgctgcttcttcctccagtttcacagtgctggggatgatcccgtaaggcctttaaattacattataattagtcatgcacttctctctgctctggggctgtttgaatcgttcactctctttatacctccagtgttcagcacagagcctagggtataatgcgtatgcagtaatgtttcttgaaggagtgaatgggcaagtgaaacaccaaacaaatactaaagagcaaaacatgtattgctcttgtatattaacacattccgagaagagatgggaggaaggtcttgaataatatcaaattatttcttaagagatcttgatttagatttttttcaaaatgagatacatgttgacactgctgtcaacaaataatcacataaaagctagagcctggcttttaagtatcagggggagcatgtgtgaataatcagcattgctgctgttgaagctccataaagtgggaagcagcgactgcaaagatccagagatggacatctgaagcataggaaaggggcagcttgaatgagataggagcaggatctgtattgattgcaggtcaccagatagaattaaaaaaatctatgttctcactagtggctacagttttcaaggacaaatgactattagtggttattgtatttttcttgttttcaatggagcagctccatgacttagttacataagaagttaaaggctccacccccttccctaccaatgtcttaagctgtcctccgtgtgcatacaaactttgtttccagactgccctcgtgtgactcagtccctggaccagcttcccagccccttctgtttccagcacatcctcctccacgtgttacaggattacaaagctttgcacagcctttcaatagggtttagagcaagaatgacagattgctacctggtaggcagcactgactatagttttattggcgttgcgtagagtgactgcatgacatgcaggttgtgcttttgttttgccaggaatttaaaggcatttagcaaagccgtatgaaattatctgccttatgtacctcgaatgtgaggtaatgaacttgtcattagtcgtgttttagtttagtgttctcgctggaatttgcaaaagattaaaattctgcacatttcattaagtcttccacatgggctcaaaataccatcccgcaggctcgacctgacttgccacgttgctttgacaccatctctgattccagtgaacaaaactaagtaagtgtgacttacagccgccctaccaaacattgaaggtgtgagcctgcactgttgttttgtaatgacaatgacaagagtataatgacaagagtataatgacatcctagtccatgaagacatgttttctcttttccctccctctatgtatacttacttactcttaaggaaataatataatttctatttctgcttaaatctgccatctctacttagaattattttcccttgaaaaattaaattgcattatccatcagccaaatggaaaatctgattactaaatgcctacttctagacattatgaattacctgtaatatcacatttcttgggcacttctcagaatgctatgattttacataaaagcataaattacagaatgagaagagtaaagcttagtgcatattatgcaggttcgcagagtgatatgtggcctacgactgtcattgtaatcaaaattgatttttgatcatttataaaactaaaacaactaattgaaagcaaatttactttaactgatgaaattcaagatgaagtgacagtagtcatgaatcacagttctgtagatctgctaaaatgccaatgaactgttattaatggtgaaagtgtttaatatattaatgggaatccaagtaaggaaaataaaacacatattttgcccttaccttaagtcatgttgacatcatacataaatcaggtagaatttgaagatgtttcatccagcattcatcatgaagcaacagagtcaatagcgggcagttacagtctgtaggcaatgctttctggtgtggattatgcaagaaacttacagtcatttggcttcctttattcccctttgcatgtaaactaccaggtggtaggtagacccattcttggctgccagtatttttaccacttggatagattctgctctctgaggtctttaagacaaacacagcacatgtacattgtgatataggagaaagaacatcagacagaggcagagaactgggcttgtcaaaattaagggtgacctagagccttagtgtccttatatgtaagatgagaagcttggattaaaattcattgctccttacacttgatttttatgcagcagaactttcttcaaaagagatcactcctggaatcccaatatacaaaatggataaaagtaggattgttctgaagtaaagaagtaaaatccagagccccacttatttgagtcatctcctaccttttagatggttattaacattgtttctagttcagaaattctgatgttttatattaatttaaactaaagttaaattaggactagaagagccatttcgtgtgaaaatagacatagtctgagtgatttaggcaaacccatagtgacagatttagtggcctgatacactggcttggaaagatctgttccaagtcagtctcaatacacaaggctcggtgaacacatggcgagcagtcttggtggtggtcaagaacatggaatttgctgtgagagagagcttggttagggtctgggctcttccatctgttaactgcaaacttgagcaagttattcaatctccctaatattcagttttctcattcataaaatggattgataatggtaccttctatgtacagttactgtgggtattaaatgaggtaataagcctgtaaaactcctggcatgatgacattggcctacattaattgctcacagagtgagaacttattataaacacaggcatttttgttgaatgactgactgattgaatgaatgaatatagaactagctttctatttgtgatgtatggaatatctctatttcatttaatttcattttgaatattaaaattcaggcttgcttttaaaccaaagtatttgctgatgcaaagaatgaaattctgactatgatacagttacataacttttgaagaaataagaaaaatgctaacacagcatgaacaactttgatttagagaacagagtctctgttaaaatccatgggacttgtcaacttcatatttttgtttatgagcataaaacactctttagtgcatgtcggaatcatttgatgcttgctgaatcacaggttgctggaacccatccccagattctgattcagtctgagatgaggtctgggaatttgcatttttaacttgttgtctggtgatgctgatgctagtggtctgagaatacactttgaggatcactttttcacagtaaaagtcacagtcattaagcaagttaactcaatgagaaatgataatgaaaaggcatgtacctaaatagataaaggacctataccagctatgaatttgagttcagcaataattgtaaaatttgtaattcttttcaggtatttggtttttaaaaaactccctatgtatgcttttatcttatgttttatatggtgtccctcttttcctctctttctctctaatccagtttttaatgtgaacatgtttaatgtgaaaatgttgttcaaagcagaagcgaaccttttgtgtaaccttggcggtattaagtttgtttgtaagctatttctgccctgttagcttctgtactgaaacacgttttcttgcttttgttgcagtatggaagagaagagagcgactggacaattgtgctatcctgaatggaaaatagaggatacaatggaaaatagaggataccaactgtatgctactgggacagactgttgcatttgaattgtgatagatttctttggctacctgtgcataatgtagtttgtagtatcaatgtgttacaagagtgattgtttcttcatgccagagaaaatgaattgcaatcatcaaatggtgtttcataacttggtagtagtaacttaccttaccttacctagaaaaacattaatgtaagccatataacatgggattttcctcaatgattttagtgcctccttttgtacttcactcagatactaaatagtagtttattctttaatataagttacattctgctcctcaaacaaatgcaattttttgtgtgtgtttgaaagctaatttgagaaaatttcataggttacatttcctgcagcctatctttatccacagaaagtgttttcttttttttaaatcaagacttttaaaactggatttcctcccatcactgttttttgaaggtcctccaagtccgtgttaaggtaaatatctgttttcttcctgatgtcacagcctgagcatactctgtgcattaggaagacctgagtgcatttcccaccattgtcctttccacattatgttgtagctggctggctgtcaggcgactacaagactgagggtcttgtgccttatagatctttgtatcccccatggctgacatatagtaggtactcagtaaatggttttataatgaatcagtgaacattttgcttctatagaagtgtaccttctttgtttctatattatgaaacctctttattagaatttgtgattgattctgacagtgtatagatttaccttatattgtctttattttccatgagctactaagtcattagagatactctgaagcatagttagtttaggaaatcacttcatattgattgtattagaattatcttggaattgaagatatatccctagagcaggggaccccaacccccaggccatgggccacacagcaggaagaggtgagtggtgggccattgaggagcttcatctgtatttatggctacttcccatcactcgaattaccacctgaactccacctcttgtcagctcagtggcagcattagattctcataggagcacaaatcctattgtgaactctgcatgcaagggatctaggctatgcgctccttatgagaatctaatgcttgatgacctgaggtgtaacagtttcatcctgaaaccacccttcaccctgcagtctgtggaaaaattgtcttccacaaaactggtccctggtgccaaaaatgttggggaccactgctctagagagaggtcatgatatcataccaaccaaatggaaatgacaaatgttttatgtcaagtgttaattgcagaaataaatcttttttttttttttttggtagaaaacaaagaggcatactctgatttttatactctgtttttgcaggtgctcttttctttgaatggagatttgatgagcaagtggttaggatgcagggagagctactatgggtgatattttccttgtttaggagctgtgagttaaaattgtatcctttgtggtttatctaaggaaagtcaaatcttgacagaaaacatttttccttggaaggtcaactctcagacattgtattttggtttccctcagtcctcataacttccttcttgctgaacatattttattctcttttcagagaaggaaaataaaaaggattctaaaagtttgatgcattggaaaaatttccttgaggcatttagcaacacatagaaaatgggctttgattcttttccaaaacttttagccatagggtcttttatagacagggatagtaaaatgaaaattgagaaatataagatgaaaaggaatgataaaaatatcttttagggggcttttaattggtgatctgaaatcttgggagaagctgttcttttcaggcctgaggtgctcttgactgtcgcctgcgcactgtgtaccccgagcaacattctaagggtgtgctttcgccttggctaactcctttgacctcattcttcatatagtagtctaggaaaaagttgcaggtaatttaaactgtctagtggtacatagtaactaaatttctattcctatgagaaatgagaattatttatttgccatcaacacattttatactttgcatctccaaatttattgtggcgagacttgtccattgtgaaagttagagaacattatgtttgtatcatttctttcataaaacctcaagagcatttttaagcccttttcatcagacccagtgaaaactaaggatagatgtttaaaaactggaggtctcctgataaggagaacacaatccaccattgtcatttaagtaataagacaggaaattgaccttgacgctttcttgttaaatagatttaacaggaacatctgcacatcttttttccttgtgcactatttgtttaattgcagtggattaatacagcaagagtgccacattataactaggcaattatccattcttcaagacttagttattgtcacactaattgatcgtttaaggcataagatggtctagcattaggaacatgtgaagctaatctgctcaaaaagatcaacaaattaatattgttgctgatatttgcataattggctgcaattatttaatgtttaattgggttgatcaaatgagattcagcaattcacaagtgcattaatataaacagaactggtggcacttaaaatgataatgattaacttatattgcatgttctcttcctttcacttttttcagtttctacatttcagaccgagcttgtcagcttttttgaaaacacatcagtagaaaccaagattttaaaatgaagtgtcaagacaaaggcaaaacctgagcagttcctaaaaagatttgctgttagaaattttctttgtggcagtcatttattaaggattcaactcgtgatacaccaaaagaagagttgacttcagagatgtgttccatgctctctagcacaggaatgaataaatttataacacctgctttagcctttgttttcaaaagcacaaaggaaaagtgaaagggaaagagaaacaagtgactgagaagtcttgttaaggaatcaggttttttctacctggtaaacattctctattcttttctcaaaagattgctgtaagaaaaaatgtaagacaaaaaaaaaaaaaaaaaacaaacagaggcagaggcaggcagtagcaagaaagcagagcgtaacatcagctagatggtaacatgcaatgtcagctctcttgaagacatgggaaacctaagttacaccttgggttaaaattcttcaccatattagttttgttgcttcataaaatttacctaagcaagtggtcttgcttgcctcaaatccaagcagtcttgaacacttggaggcaattaatgagtatatcttagtcaaaagaattgttggagctttttattaaagctacagtttcagttctgcttttggggaattgtgctatgaaagcagctgccaaaataagctcatttattttcttcaatcccactcagtgctcagtcactatattctgtttcctttttttttttcaagttgcatatttggtttccccttatgattgggaaagatgaattttcagcagaaaacattgtttgttcactttcaaagagtgatagtttctaaaacatttagagcaataaatattcatcagaggtaccaagtaagccggcagaagagttaagggttagagaaatcccttatttcatgtcttgactctaaaattatcaaagtacttttccttgtaatgtggatttcttcttatgcggatatgcaaaaacttcagttatacgtagtaatgctagcaggtaattttagtagacattttataacaactgtcactttgtttcgccacatgtagagtttgttcagctattttccagatatctccccacaaaaggaggcaaagggtaccagcttttcaatgagcattacctattacttggcaaagatgatgaagactctattaatagttcatttgataaatgttgacataaccaacaatagagattaggaagttagttttaagaaatcaatggcatatagacattaccctcatggagtttgtattctactacttgaactgattgtagctataaaagcatagttagatagctgaatagttagatcataagcaaagaaggccagaacacatctcttatcaagaaatcaatgaatagtttatctcatttttaaagcaactttatccttctttaattccttcctttcttctagtgcaaaactacttaataaggttggtgtttaggttagtgttcacaccattcctcatctggtgtgaattaccttctctttctttactatttactaccaacctagtacatgtgttgactgaattcttttcaaacaatgttgagttatcatggtgcacctaataaattaacaccacagattacagcatccttgctgattttctcagcaaagccagattagatggaaataaacaaagaaaatgatcctagagtgaatttttctagaaaatatctattatgaaccatgctgtttaaagtattagcttgaaggtgatggatccagctattcagaaaataactttcatataaccatgattttgcacagtatgaggtcttaaatgtgtggaaagagataaattttttatcattaccacaaaccccttttaaagattcaaaggtggaagaaagtgatttattttttctcttcagcatacatatataaaagacttgtcagatgtttaatttggggaggttgataatgaaacatatcaacagagtatagtagttatagtagtgtttgtgggtaaataatttcctggggtcagacatatataaacatatttgcttcaaaatgataaaggcatgaaatcagtcttaaaaattgaaatgggggtgatgggggagaaaaagaagaacaaatttgaagtgccctttcaaatctgctggatacaagtattgaagttttaagtcatcttattctgtctgaaagtgtatttttcattctacaatagacccaatcaacaagacgtataacttgagttgcatgatgttcagtttatgtaatctactgttgggatggtaagaattgatgtaggctgtggtgtaagaatgaattaaaatatagtttcactggcttttctctacatatccactatcacaatggctaggtttcctgttgctcactattggattctggagaaaaatttaatgaaagatgatatcagaggaagaataagtggaggtagagaagaaaggaatgatagaggaggggaaaaaaacaaaacatatttttgtgttatccaaaggagctttttccttattctgtcaagcattgagatcttcttcagctttcaatgtagttgctaaatacaaataatgctactaggtagtgactaaatatagcaaacacttcatcagatattagaattaggtcacactattgaggttataatctgaaggttgtgttacatagaaaccactttagattattatcaacttggactaggctttattttataatagcatagtaagtaatatctattgtgtcatttcttcaaccattttattctaagatccatgaagcttcttgaggccaaataaaataataagtttagacaagaagtagattgtgacttttttcccttagagatactatttactatctcctatcctgataggtggaaggtttactgaattggaaattggttgactattagtttttaactaaaatgtgcaataacacattgcagtttcctcaaactagtttcctatgatcattaaactcattctcagggttaagaaaggaatgtaaatttctgcctcaatttgtacttcatcaataagtttttgaagagtgcagatttttagtcaggtcttaaaaataaactcacaaatctggatgcatttctaaattctgcaaatgtttcctggggtgacttaacaaggaataatcccacaatatacctagctacctaatacatggagctggggctcaacccactgtttttaaggatttgcgcttacttgtggctgaggaaaaataagtagttcgaggaagtagtttttaaatgtgagcttatagatagaaacagaatatcaacttaattatgaaattgttagaacctgttctcttgtatctgaatctgattgcaattactattgtactgatagactccagccattgcaagtctcagatatcttagctgtgtagtgattcttgaaattctttttaagaaaaattgagtagaaagaaataaaccctttgtaaatgaggcttggcttttgtgaaagatcatccgcaggctatgttaaaaggattttagctcactaaaagtgtaataatggaaatgtggaaaatatcgtaggtaaaggaaactacctcatgctctgaaggttttgtagaagcacaattaaacatctaaaatggctttgttacaccagagccatctggtgtgaagaactctatatttgtatgttgagagggcatggaataattgtattttgctggcaatagacacattctttattatttgcagattcctcatcaaatctgtaattatgcacagtttctgttatcaataaaacaaaagaatcctgtt

SEQ ID NO: 87 - DNA, 244021 bp, Homo sapiens
tgaccacagtctgcagaggccagagagagcaggaaaggaaatggaaaggaacctcaccttcatgcttggggaaaaggagaaacctgtgttaatgtgtcttcccaacatcccactctcttcagcaatcgctggaacagccatgggccatccctgctgagtcaggaaagaagctgagggaagagtcgggattgaaaagcagcagacaaggtaggtgatctctctggtcactggcccttctcttgtaataacaaaatgagcagcatatacagcctcgtcaccagagtgtttctgaggagggtctgctggagatatggtagacccgggtgtgtgtctgaattcagtcatttttctatcagcctgttctggaaagcaggctgtattttccttctgtcttctatctcttctgaaaattgttgttgctcctgtacgtatttcagaaacttggaaggttttttaaaaatttttcattataacaaattatatgtgcgatttattaaaatgatttcattggtggtaactccacaagcatggttttgttccagaattttcgttgcataatttttttcaattttcaagacataccagagaggacagtgtacatatactgtagtatatggtatagaataatatattccgagaaatatactgtccattcacagggctgtcaacctcgtatgataggctctcccaggaagtcacgtatatttttctgctttggaacctagagagttaaaagtcctgaaattactggagcagaatcaagcctatttacctaagcttatcacatcggcagccaggtcaatcatttactgagactaggccgtttcttaccctgaatcaggaggaccaccaaagcctttgctggcctgagtccctctgtagcaaaggcatgggcaacacagaagaaatgctcctctgaagctatagtccagattctcttctcaccagaagtaagtttttctccttccgagaatagtaaatatcccaagaccccccttccccagctcaatgataaacaaacatgagcaaaactaatatgcaaacctgatgataccaatgccactctatgtacaaagcttgtggctttggagggagcttccctcatcactggaggtctatggggaagaaggagatgataactatgaaacaagttattgagtgattcttgaggaagaataaagttataaagtaatcaccaaggaaaacatggaaattttccccttcaagtctacacactctagaaatatgtaatttttatctaatatgattcactcttccttaagtctgaatataactcctctaattgcagaaatgttgtcatatggtcaccacatacaactttcgggcctgtgcagtggttcctggctcctatagtcattagttagaagcctagtaatgctgaagtcctatttttctgaactccctttagggaaggagttgggtcatgtaggacaaggtaatgtttgacattatttttgtcaatcagttgtggaactgaagtgactcccctcaggcagggtttgtggctgaatatttagtgtctgaggcagttaactagatgcaagagtggaggccattgtagacataaacccttgtgtgactttgggtaagtctgtggctacctctcaagaatgttgtggagaattatggaaaactgatacgtttctgtgaagatattaagcactgcaaaatgttaagtgtgaatctggctggtatccagaggatgttcatagataatgcaagtgatggaggtggttttgacgagggaaaaggatcttggggtgatcaaatgcattggctaggtcgggcatggcaacccatgcctgtaatcctagcactttggaaggtgaggcagaggattgcttgaagccaggagttcaagaccagcctgagcaacaaagtgagcctctgtctctacaaaaaattttttttaaaaatttatgcattggccatatttccccacattactgaaggctgccttagggacagacacacaggtctgacctgtcctttttttgtagcttctggctcagggcctaaaacaaactggaagcccctaagggtatgtacagctttttctttccatttcctgaatattggatagtaagtagagggagactattcttcagattgactagattagaataggcattgtcattgtttttcaacgttaggtagttagaatatagaagttaattaatttgcccaaaatcatgcaattagtctgagccaggattctactcagttctgccttgttcccaacccagtgcatttcccataaggtcatggagttgaccatgtggataagcataaattggagggtcactgaggtaagcaaggctgactaatacagtcagaagttctgaagttctccactggctcttggatgtgccatgcctgagcctctgtaacaaaaaggccagtagtggacttccaaaaaggataaaacaggcaagagcaaaagcaagtgtttttagtcatggcagtcactggagtcttctctgtcctgtatattttctaaataacccagataatcctcaggctaaatctttgtccctttttatactgtagactcaaattctgagccccaactaaagtacaacatctgaactctttccagagaagaaatgaccctatcccaatctttctcaaggaactcaagaatttactatctcatctcagcaaatacccactcatttaaatctaagagacttgggcacagagaggcttaaagcccgagaaaccatcaacagtccctcctgtcaaggctctcaccatctgcaacccaaagagacccatgtcggcttggagtctaaatggctttttggtgtcatttgagcagtgaatgagtaatgtacagcagaagccttaatccgccccccacccctagtttcacttttgttcagatatgtcctaaagattccattagctgtctgtcataaattccaaagtagccacaattcctgagcatttacaagatcaagataaagaaatgccatcatgaaatgaggtcgactaaatgtctttgaacaaagggtttctagtgacttgcctcacatgtatctcaagtgtgtgatagcaaaggcattacaaatagagattgcatcaccatgtctaccagcaccctttactaatcaactgaccttgcatgaactgtacttacatgccatcattttcattaaccaaaacgctaggagaaagaaagttgaagctaaaacacaaagactcatcacaacatttcacctgtgtcaagtacttattatgaccaaaacatgaactgctgccttcttatctacactttttttcatttaattttcataacaaacctctgcaacttgcccaagtcacagagctagtaagatgaggtaaaatttgagttgggatctgaatccaaatcccatgttcttcagcattctgttctgggaaacatactcacccaacagtgtctacactgttcacgttctaaatgtagaagagtaaaaaaagttctttctaaattatttgatcagatccttagagtatatatttattcccccttcccactcacacaagatgttcttgatgttcttgagtgtaagcataaaactcagtatgacagtggttttcctctcctctagaaaaggaaccacaaaacacacatgcacacatgcacacacacaatagcaattgcccaagagtcagtgctttgattcctttctgaagctgagagagaaaattgttcttatcatctcctagtttataaacattgttttgtttgtttgagtgattgactttaacataatgtacaagacaaatttgtcatttattttaccaagatttttttaaaagtttatttctgcagtgaaatttcagtctttgaaatcagctaaatttttcaaaactgtccagtatgtcaatagttgtatttaatcttcaccacagccctgtaagatgagtactgttttcagatgatatcctttcagataaggaacctgagactcaatacaggtgaatggccttctcagtctcactcagctaagtcccttagatcttgggactccaaattttttgttcttttttaaattaaatattcacgcagttccctggattcctaagtcctacaaatggtaggaatggggcctacaagctttttatttaaattttcagaaattaaaaatgccaaatgactacacagcctgttctcaggcagagaccactcaaatattgattgctttgctttgggctagaattctgtcaggtcagtgtggtaatgctgttattctaattagattttcacagagtaatgaaaataaatacattaattgttacttaataaaatcttccttaaaggcaaaaaatctttcaagcccatgtgcccatgagcaaaataagatatcaaaggggttcttgctagaaggataagccaccactgtcttctaatcagttgtgtgcctagagaacggtatacatgagtagggactagagaccccacagtgtcttgagatgcacaagccctctctaaccctgtaatcagatggatgtctcatgagtcaaacagttgccaaatggcatggaacctaaggaagtccttctacaaattgagaatccattattgtagtttcaaccctacagaaaccagctacagttacaggaggaaaccttatgccctaggaattccatttaagtcctaagatgttctgaagggtccgggagccctgcatcagctatgcatctggaggagatccagtgttttcttatccctaatgtttcactgggaattgcccctggctggctgcctgagtctccatcccatgcgacagtcatgttgtccacatccttgctttggtgttagtgtgcatcctcatcatactttttggtccccatttctgtgacttctgaggttctaatgatcttggtgcaggagaacccatagttttgggcagtgatcaagcagagtgaatgaaacttctgcccctgacccacccaaaacttgttcccctcctctctacagttccaaggtcaagtttcccatgagagcagtaaaggaactgaaggtcacaaaatgctggcaattcaccatgccttggaggggttcccagaaagtaaaatgaaaatgagattgttttcacataagacctctgtatttggaggacaggattcaaacagtttgaatgtgcaatttcactgtgcactgaggtaacccccacaaagtcttttttttttcaaaagccaaaataatatcaaaaatacttcctgcagagaactctaactaggcagaattcttttttgtcatcactgggttgatgttttcaaggattcatttctcaagataagccttatatagtgcatttggctggagctcatgtgtacttctgtggaatgatggctttcgtccatggggcctactttgtggtgatctcattaggtttcacaaggtaaacagctgaaaacttgtggttagtatgtgagcaggcttcaagagaagagaaaacccaggagaggtcggccagaagatgttgcagtgaattggcaggtggcaggcttctctctgtgacccaaggaaagccaatacccctacgaattccaaggagatgtacttttaatttcaaatacatgtatcccacaaaatttagctctgcttcctagctaggaatcctaatcataggaagagctaatggctagacttcccagaacgtgactgttctctactcaaattcatctcattttgcttttctttgcaaaatgaaaattctccattttccataagaatagtattgttatagaatacagttgtgttgataaattatagtccaacaaattaaactaaaatagcccaacagaggcatcctaggcctgacatcattgttgtctttctctgtggctttatgccaatttttacacatcttggggatggcttagtttcacatctttactcatctgcgttctaattttggataaccacaaacatttattgatgggttatccactcagttcagcaacaatcatctactctttcccagaagtgtgttagacactgtctttgacataggattaaataatcttgccacttaccagagatgagaaggttttaaatttatccagtaggccaaaccacagcttctttagagtcctctatatttgtgtgtatgttagtgtgtgtgtatgtgtgtgtctgcctgtgtgtatgtatctgtgtgtgtatgtgtacttttaatcattatacagtaccaagaagataatgggttctcagtaaatatttgttggtgatactaaactagtaatcagctaggaatttaatcaagaaattgatttataaaaagaaaactggaattgctaggggagactaaagaaagaatcagaagtgttaaccattggtgtagagggaatagggcatcaagggtctacttgctcttctgccaacccccaactgaatggtacagcacataggagacctcggttgtgtttgattctgctactacacacaccaacagggcaactctgggcaagtcacttcggctttcgtggcctcaattttctcattttcaaaatggaggcaggggattgagagtataacatctctaatgtcttctctagttttgatattctgtgttctatgaaaaactagaaaagtttacttcagaaagttctttacggaaaatacagaaataattttaatttatctagggagatcattcctatctcttgggtaaataaggggaatgaaaaagctgctcaagagatcccagctatgccaccttgaagatgttataaattggtgagtctgggcattgatctttactagagaagaagcccacttggctgggagagtaaagaaaccacatctgaattctcttgtccagcactcagctttgccacgcctgtgtgccactaatgcaagctccagcaggcagtcagtcatgactatcattctctctttataaataaacggaagcccttaaaggtgacgtgacttgcccaaggttacagaaacatggcagtgagtcagatggaactgtgtgtgtttggaggaggaggagaagatgacattataaacaaaaggcagagagtgagggacagatccacacctcttctgaagttaaaaaaaaaaaaaacaaaacaaacaaaaaaaaaaaacaatggtcacaggctacagaaaagctttgagtctgctctgaatcctgagatcacccctgtctccctgcctctccctgagccaccccaggcaccctgcccaggtttactcacccaggttgttgctaactgggtgcctgtgctcgtgtcccttcttgtaagcttcataaaaggctatttgtaatgaagagagggcatatcaaagaagggagactgcatcctccaggccccgaaccaaaaaggcaggtttttttttaagaggaagtctggtttccctattaaaatctgcagaaatgaatggtcctcaagatgactagcagaattatgacattctatttcaagcatttttaaaatttttttttacctgaggttattttacttctgtttgctctccttctccacataaaaaggaaagaataatgcttgctcactatgatactgtatgagagaaggcagcccgggcagtacaactcaaaggaacctactaattgcaccaaacagcaaggcacagctagacatttcagtaaataaagtgtgatatcatcatggctcacacgggtttaccttatcacccagacccatgcctagggagtgctaagaccctgaagaaccacaatcacaagtgatggcaaagaacctctggtccaagaagaaaaacgctgaaagaaattggacatcaatgatcttatgtctcagttgcatttagaggctgcatcactttgctgcctattattgtcctcattaaatatgagagagagagagagagagagaattaattaactatcatcaccaggggatatctggtaattttcgaggtacatgaagtgggcagacgatgccataaattcagtaagaacacactgatttcttggcggagtcttcaagtgactttctgctttactccacaaaaatcttactgagtatacccacttctctgtttctactctattcctaatatctaactaacttcttcttaggtagtctcttgggaagaaggatagataacacgtaacacaatatataatgcttagttgactgtcacaaccgtattaactacactcactttttagaagccacaaaactaacaatcaccaaaagtcacccttggcttgcccccccaccaaatacattcacttaaggtaggctaggaagaggacaggcttatgattcaaccatatagtatctcttaacaaagtcagagaatcagaacagcccatgagtccaacaatgattatcaatgtcaaacttaactcaaatacagacctcaatgcctcatttcatgcccatcaagttaaaaaaaaaaaaaaagaaacagtggggagaggagaggggggagaaaagctaaaaacaaagaaatatgaacaatgatgacaaggtgctgaaacatggagacaatctcacatagtcctaatgctaaccaccaagtaccagctggcacctttacaagttctccaatcagtgagcaccattgcttcttgaattgaactgaattcctattattggactggattctctagcactgccagctttctagcaggagaaaaagagtttcagagcatgaggtaaaatagaactctgttttcctactttcaaaaactcatctcatacacctacccacagccctcactcattgatagtcaaggaagtcagagtccatgggtctcccatctgtgcccgagcacctgtctcacagtgaaaaagggaagagggggcttatccagtagaggctttccagaagatgcagaactgtttctgataatcccatgcttcactgcccactaggccaaaagagagggaggcagcattttcaacagaggagactttcatgccataaatcttcaggcatttgtgggcaccaagtgtcttgctgtgactgagatggaactaaaataatttacaagtttgtgtgtgtccatgtgtgtgtgtgcatgtctctgtgtgtgtgtgtgtctgtgtgtgtgtgttacgtggaaagaattttaatatgagaagggcattaaatcagttttgcaacaagaaaaatcctttgtctggactatttctgggtgttggttacacaaaacctaaatagttgtttaatttctggaattaattagcaaatatctgtttgaaacactagtcttaaagacttctattgatagcatactcttttctctaaaattgccacaacacattttaatcatttttagaaaagatacactacaagatccttcagcatgtaaaaaattctttcatgatgtctaaacaaatctcaggcctggttaattatactgaacttcagatgtcttcaggtaattcttagcatgctgaattttataccccattaccaatacatcttattttagatggtgttatgagtaagattaaccaataaaattcaggtaaactcatcactggatacagcagactgcacatcatttggttagattgtatgctgagtctactctccaaatgtatttattctcctattctgcagacacatactctacacatgtctggtttggcttaatatttggctgttcccctaaagggattggttgagggtcaccatattttctcttttaaccagtatctgataaaactctaactgggatactactattcttcacatgcatttatatcaaaagctatttactcccacttcccccaggccaaagtcataatagcatgttagaatcaaatattttccattgttcttttatatatatatattttttattatactttaaattctagggtacatgtgcacaacgtgcaggtttgttacacatgtatacatgtgccatgttggtgtgctgcacccattaactcgtcatttacattaggtatatctcctaatgctatctctccctcctccccccaccccacaacaggccccggtgtgtgatgttccccttcctgtgtccaagtgttctcattgttcaattcccacctatgagtgagaaaatgcggtgtttggttttttgtccttgcgatagtttgctgagaatgatggtttccagcttcatccatgtccctacaaaggatatgaactcgtccttttttatggctgcatagtattccatggtgtatatgtgccacattttcttaatccagtctaaagttgttggacatttgggttggttccaagtctttgctcttgtgagtagtgctgcaataaacatacgtgtgcatgtgtctttatagcagcatgatttatcaaatattttccattgttctaacatagatccaataagaagacatttatagagtgcctaacatgtttgacaccttgctaagggatatagattcagagatgagtagttgacagttctgcccaaagaaagatcaacatgatcaacatcttatagagaaaatgaaccaataaaggagccaacacagtatcatatgtagtcataactgaacacaaagcagaaaagtttcagacgggtgctccccaactaccaaaggagttggggtccaagtggtattttaaagaaaagaaaatttggattcacagtcttcctttctaaaaatccaggctatgaagaaaaagctacttccttttaggaatttatctgaatatcctaaggaggtgaaattacaagagtagagacagttgtggtagccatggctaaggaagtttcgatccctggagaaagaggataagaggagagtctggggagatccttttaactaaaaggtaggaaaaagaattcaaactttgccctgaatcacagtctctgcctaattcacatcgtttggactggagacttaatttagaaaaattctgtgcagtccagggctcgcatgctctcccataccctagggacttctgcctcgtggacaagcttgttataaatctgatttctactcagttatgaattgaacttcatttttcctgggagcaactttaaacaggaatagtgaacaaagtaaaaatctagagaagtagcagtgagatcttctgatgtcagcagctggcaccaggtaggaagctcaaggttaaagaataaacatgaccaacccagcccccatcccaatagcctacattagcatccaaatccaactctccaatactacacattgtaagcagaatataagtcagaagggtcagcttagtagctctcaacctagcctggctggaaatccttcttaagttggcttaggtaagcttttagtgtataagtgaaaactttcatcatcttaagcaatttgcctgtttcctgaagtagggctaacaagatggttgaattttctgattcttttagaaactcagatcataaatcacactcttaatgaacaattttcatattggtttcatttttatcatccattggaagaatatctataaaagttaattaggatagatttggctacctaaatatttaaaacttatttacaaatgcttaaacaaaggtaaaaatagaaatagtgaactgagaaagtacatttgcaacataaaaaacagacgaaaggttactgttcctaaagagtacttataaatccttaccagctagaggcaataatagcccagtaaaaagttgggcagaaaatgaactgacaactcacaaaagaagaaagacttatgatctataatgatatgaagaaatgttcagccacagtaacaatgaaataaaggcaaattgaaacagtaaggtagcatttcatttttatgagattggcaataattgagtaatattagatgttaatgagcatgtggggagcagacccttccgcacattgctgctggtggaagtgtcaattgctacaacttcttttttaaggacagtttgtcaaaacatattttaaaatgttttaacaaatataactttggatttattcacttccaggacttatttttagaaaacaataatagcgcagtgcataaaaagtttcacacagtacttaaatatttttgtaaggtttgtttataacagcaaattttgaaaacaactgaagtgctcatcagagaggacttagatataaacacaaacatacgtggatactgtgcagccatttcaaatgatgagatccatgttgcagtagtagctccgagctaccagtagtagttcagtggccaatagatctgtgtttaaattttagctctattcattactagctgtgtgaacttgggcaagtcatttgacctctgtaagcctcactaatctcatcttaaagaaacgaggataacacaacttcctatatcttaacatcaaagtgaattatatgaaaggatgaatgaaaagctcttagtataccacctgacacacagtaagggcagaataactgtgaactattgttagtgacagcctgtggattcaatcctgctatgtgaggaaaattaagatgaaaatagcactgtcagtttctgtgcaagatggcaaactagctccatggcttttgatcctcccaagaccttattaaaataaatttaaaaccaaaagaataagctcataacagagaagaaagaaggggctatcaataaattgctggaagacagaaaacaaatgggacagaggaacaaaacacagagccaaaatagttgcatctgtaaagcaatgaagatactatttaaaaacctaaataagaaagttcttttagtgattacaattattagtcataaaaattaatagactggaaaattatgttgaagctttttgaaatgtagagcaaaatgacataggtggaaatgtgaaaaaacagatattaaataataacagttaaaattaagatcaccaacatataccaaaagcactagaatatttgccaggcactgatttatattaattgcatgtgttatttcaatccgtcttaccagcaatcctatgaggtagctaatgatattattctctcctaatagttggagaggttgaagcattaagaaattaaaaaggccaggtgtggtggcttacacctgtaatcccagcactttgggaggccaaggtgggaggattacttgccagaagtttgagaccagcctgggaaaacaggcaagacaccgtctctacaaaaaattttttaaaaaattagctgggcatggtgacacaccagtagtcccagctactcaggaggctgagacaggagaattgcttgagcccaggagtttgaagctgcagtgagctatgttcacaccactgccctccggcctgggcaacagagcaagaccttgaaaacaaaaacaaaaaaagaaagaaagaaaagaaaagaaaagagaaagaaagaagaaagaaaagagaagagaagaggaaaagaaaagaaaatttgccccaggccacttggctagtacttggggtgtgcacacagccagtgtagctctgtgctgaattgtctctgtcacctgagtacctccaaacctctgctgagagcacgaagaagcaggaacaacatttttcagagtgcttaccccacatggtttcagattacagcctcaagccagtatcagtgactggaaaggtattaaataagaaaagactattattctctaaaggcagttgcagacagatatatgggcaaaagttggatgtgaggtttgaagcagcttaacatttgagcatctagaatcaagcactttggagttatggactgagcgagtcagtgacaattcaagaaactttcactcttccagcccttccaatgcttattccttctgttgagacacttcctactgagagaacacagaaagtcttttatttccctgacgaactcatataggttccaaatgctgagacctaatcctggaagtccaatatctaactgacaggtgtttcagaaatagcacagaaaactgaagggaagaaattatcaaaaagtagaatcttagtgctcaaaagatacaaatcttacatgaatagggttcatgtccagcataatgaattaaaaagtgaaataggccagctgggtacagtggctcacacctgtaatcccagtactttgggaggccaagtccagaggatcgcttgaagccaagggtttaagaccaacctgggcaacatagcaagacccctcccctacaaaaaacttctaaaaattagctgggtgtggtggcacatatatgtagtcctagctacttgggaggctgaggaaggaagataacttgagttcttccaggagttcaaggttacagtgaactatgatcttgccactacactccagcctgggtgacagagtgagatcctgtctctaaaaattttctttttaatttgaaaaaggaaaaacaaatatgtaggcaactttttggtattttagaattttgaagactaaaaggacatatatttcagagaggagaaaaaagtaacctacaagaagtgcaaattaactggttctcacttctcatcaccaccatatgatgctagaagatactgggaaatgccttcaaagttagggaacgtttccacctagaattctatacccagccaaactataaatcaagacttagagcagaatatagaccttttctggtagtaaagaccaaaattttaacttctgtgcaaaatattttaaacaaggatgaaattctacttcacttgataaactttcagcagaatgcaagatgatatgtaatcattttaatactatagatttattcttatgagtattaaaaatatgtagcatagcaagcttccatagctatgtatattatttagaagaaaagtattacatatatttaggtattaaaaatacataatagaatagagagtaggtgactatggcaaaattgtgaagacagcacaagaatgactgaaatttgggaaacaccttgctaaagtaaatgccttaaggtattatttattccaaatatatctacattggtaaatatatttataaatatatttacaaaaatatttgtaaaagaagggactttcatgtaaaagaagggactttaaggacactacagagccaaaagcagaaactcatcaactgcagcaataccaggacagaggagcccagagactgtgatttgttggctcacccataaagttggcccagcttccttgacttagactcatattcattgttcttcccacccccaatccccagtagcctctgactatgtttcccaggaagcctctcccgcagggaagggaacatgaggatacactgagctgtgtgtttgcctacaagttccacttctcattataaagcagtgtttagcagtctgactcatgcatcaatacctttatttttacttcctcccattttctctcttattcttttatcctgttgggttgtgtctttttgtataactaatctcaaatgttatttggagtgagaaagagtttaaacaaatatcactaatgaccctaacttcactttcttgtgaggtgtggcagcccctggaccctgattccctgtgggcaactggatgcgctggagcttctggtcctacagagctgggattaacccagctcttttgatatgttgctcagggttcttggttccacaatcagactaactcaagctgtaagcagaaaacaaatttattgaaaggaggtcaaatagtttacaagagagctaagaatgctggtgaatgaggcctggtgtatgggaaaaaaacacaggaagcaaaatagacccaagatggcatgtgaagtctgtttaagaggctaccattggcattgtcaccatgaccactagctatgatttcaccagccacacctgactctaccctccatcagaggcaccaaccttaatctctaaaggttcactggaaatttgcattactcagtgaagaatcaaatcctagccagatgttcctagtggcctgagcttccggggaaggaaatgtctaaccctttgggcttgggctttctttattggtatttcctgaaataggagggcagggcaggcaaaatagtcaaaagtccatttcacttggtgaccctgtgaggctctaccagagcagccagccaactcatgtccctgtttattgtcacctcttttttctttttcttttttttcttgagacacttgttgcccagactggagtacagtggcgcgatctcggctcactgcaacctccatctcctgggttcgagcgattctcttgcctcagcctcccaaatagctgggattacaggcacacaccaccatacccggctaatttttgtatttttagtaaagacggggtttcaccatgttggtcaggtgggtcacaaactcctgacctcaggtgatccacccacctcggcctcccaaagtgctgggattacaggcgtgagtcactgcacccagccatcacctcttttttcttgtcaaatttagcagtttgcaagtcgggatacttatgctacattagttatatttgtataatatatattttttacttatttccaagtcatactctaaacatgagtttctcatttacatttttagagtctttttatgtgtacttctgaataaacatgcatgaggctgagaagtctttcctgttaaattctactgggacataagtttcacattacctatgagcctttttcattgaaaaacaaaaatccttccagaacaagagaaggctaaaaaaaaaaaataagaagaataaaaataaaaaataaaacagagaaccattttgaggataagttcaaagagactgaatgttccaatgtaattaaccaccaacaatgtaagatgcttatttcatgaattcttgaaagagatcttaaactatgatagcacagaaatcactgaattgcttaactcaagagttaaatagatgtctctggtaaattggtaccaaaaaaaaaatctgtgaggaaacaaagacatccattttagtggcatgtgaaagatgatgtaagtataaataaagaaatatcaaccgttggttgatactctttgcactaaattatattcgtaagcaagatttgtatgttttgttggatctgacttttcactaccctgttacaataatatttcttttgtttgttttagtctcctttacatttacagtgtcctggagggtagtggtgttaaatttaatttgtcaacctacgtttaattttacaagaatccagatcaaactgctatataaacaagaattgccttgcaggaacttcttagtgattaggctggagaagtcacagctgaactaaaaaatatgctgccagtagtactttttcattttcccccttataattttaatggcccaaatgaaagagccttttttctttaacaatagtatccttgttgaaagtcctttaaagaactgttctacgacactgaaacagtctaattaaaccattaatataacaatgatgtcaagagctgctaaattcaaagaaggcatttccatttcatggtaaatattgaaggtaatttttttctggcatgtagcatgagtcccagtttgggaactcttgtccattacacgtttccttgcagagaaatatcattaatctgtgatacttactacaatagtgtattatttgcctcaacagaggtagtcattgaaactgcatattatcaaggcagctggcccattaagtttttacaaaggattaaggggttatatgagtacccaacagctgcaccagctaagataaaacaaaggttcccaaatcttatgcctattagtatatggaatgaaatgatacattctttatccatgcagtaggatattcatatttaaaaagaaaattaaattagaaataaaagctcattcattcaaatgcaaagcattgtgcgaacacaaatgaagaaatgtagaaagaaatacaaaacatttccccttctcttgagaagcctacagagtctcagtaggcatgatttaaaagttcaaaacattaaataaaattaaagatttaaataaaagcctgagtcaccaaagaaattctgcaagttagttcatgaataactgctgaacaatacacatggctgcaatgcaagtttcagaagtgagaacatttcagggccagaggttaaaggagaaagttgacgtaatcaagaccttaaagattggtctgaagtgtgtgtacgaaagttggaagtaatctgagagatcatcttctaccccagtgtttcctaaacttacctgttaaaaagactcacatatgagaaatctaaaaataaaattccccgggggccggatgcgatggctcacacctgtaatcccagccctttgggaggtcaaggcgggcagatctcttgaggccaagagctcaagatcagcctgggcaacatggtgaaaccccacctctactaaaaatacaaaaattagccgggcatggtggtgcatgcctataatcccagctactcaggaggctgaggcatgagaatcacttgaacctgtgaggtgtaggttgcagtgagccaatatcgcaccactgcactccagcctgggcgacagagtgtgaaactctgtctcaaaaaaaaaaaaaaaaaaattcgccagttcttttctctgccctattgaaccatatatgccagagaaagagcccccaaactgtgttttttaaatgctgcaggtaatcattttcatctggaagttctgggaaaattgttctaagccaacctgtgatctcagcaaataaaacactaaacaaataccaaatataaaaaagaaaaaagcagaaaggagacaatggggtgtgtgtgtgtgtgtgtgtgtgtgtgtgtgtgtgtgtgcagacagatagtaaccaccagggagtccagcagggaggaagatttgcgcaggagccagggccaaagggctatggcccaatgcctttcacataatgaacactcaagaaatatcttgcactgactccattaaaaatgaagcaaagaacaaaacgagctataactttcaagcatttgatgacctatttattacttattaccacctatgttctactcattttataaaacctctccttagaaacacagcccgtgaatcttaaagtcaattgtggattgtgtagcaagacagagtcaaatccctcagtgcccaggaaaaatttaaatgccaaggaggtaaagagacctatgttctactcattttataaaacctctccttggagacacagcccatgaatcttaaagtcaattgtggattgggtaacaagacagagtcaaatccctcagtgcctaggaaaaatttaaatgccaaggaggtaaagagattttgctggggggaggggggagggatagcattaggagatatacctaatgctaaatgacgagttaatgggtgcagcacaccaacatggtacatgtatacatatgtaacaaacctgcaccttgtgcacatgtaccctaaaacttaaagtataataataataaaaattttttaaaaaagagagattttgctgcaatgagctagaaagttgaaattcaagaaaaggagactctgagctgcatctcagagaatctattcagatgcttattagattgtggtagattttgctaaggcatgtgatagaatgaatagttcacaaaatgattttaaactggcttagaacaccctgaagaaaattgttcaaaactaactcaagccctgagcaaaccacagaaacataaactaccatatgggggataatctcactgtggcagggtggagcaaatgacttcatgcattttttcaccatcccccaccatcagagctctggttcttaatgcttctctccgcatttctctagtcagtggaagtttctaagtgtgtgtgtgtgtgtgtgtgtctgtgtctgtgtgtgtgtgtgtgtgcattttaagacacaaatgcctgtactcatatcctactaaactctaaaattctatcattcgcttttctcataggctctctacttttttaatggaatttgtgaagtcccttaataacaagttgatttataaagcttaaatagaaataatgttttcacattaatattttattacttgacattttagtacatgtagtttaaatgtcagaatcagagtttactaaaaacatcaagttttcattcgcttattttctaacaaaaatattccaaatgcatctattttgctgttagtatataaatgtcagaatcagagtttactagaaacatcaagttttcattcggttattttctaacaaaaaaatttcttttttattattattttattttattttattattattatactataagttttagggtacatgtgcacaatgtgcaggttagttacatatgtatacatgcgccatgctggtgtgctgcacccattaactcctcatttagcattaggtatatctcctaatgctatccctccccactgcccccaccccacaacagtccccagagtgtgatgttccccctcctgtgtccatgtgttctcattgttcaattcccacctatgagtgagaatatgcggtgtttggttttttgttcttgtgatagtttactgagaatcatgatttccaatttcatccatgtccctacaaaggacatgaactcatcattttttttggctgcatagtattccatggtgtatatgtgccaagttttcttaatccactctatcattgttggacatttgggttggttccaagtctttgctattgtgaatagtgccgcaataaacgtatgtgtgcatgtgtctttatagcagcatgatttatagtcctttgggtatatacccagtaatgggatggctgggtcaaatggtatttctagttctagatccctgaggaatcgccacactgacttccacaatggttgaactagtttacagtcccaccaacagtgtaaaagtgttcctatttctccacatcctctccagcacctgttgtttcctgactttttaatgattgccattctaactggtgtgagatggtatctcactgtggttttgatttgcatgtctctgatggccagtgatggtgagcattttttcatgtgttttttggctgcataaatgtcttcttttgagaagtgtctgttcatgtccttcgcccactttttgatggggttgtttgtttttttcttgtaaatttgtttgagttcattgtagattctggatattagccctttgtcagatgagtaggttgcgaaaactttctcccattttgtaggttgcctgttcactctgatggtagtttcttttgctgtgcagaagctctttagtttaattagatcccatttgtgaattttggcttttgttgccattgcttttggtgttttagatatgaagtccttgcccatgcctatgtcctgaatggtaatgcttaggttttcttctagggtgtttatggttttaggtctaacgtttaagtctttaatccatcttgaattaatttttgtatatggtgtaaggaagggatccagtttcagctttctacatagggctagccagttttcccagcaccatttattaaatagggaatcctttccccattgcttgtttttgtcaggtttgtcaaagatcagatagttatagatatgcagtgttatttctgagggctctgttttgtgccattgatctatatctctgttttggtaccagtaccatgctgttttggttactgtagccttgtagtatagtttgaagtcaggtagcgtgatgcctccagctttgttcttttggcttaggattgacttggcgatgtgggctcttttttggttccatatgaaatttaaagtagttttttccaattctgtgaagaaagtcattggtagcttgatggggatggcactgaatctataaattaccttggccagtatgtccattttcacgatattgattcttcctacccatgagcatggaatgttcttccatttgtttgtatcctcttttatttcattgagcagtggtttgtagctctccttgaagaggtccttcacatcccttgtaagttggattcctaggtattttattctctttgaagcaattgtgaatgggagttcactcatgatttggctctctgtttgtctgttattggtgtataagaatgcttgtgatttttgtacattgattttgtatcctgagactttgctgaagttgcttatcagcttaaggagattttgggctgagacaatggggttttctagatatacaatcatgtcatctgcaaacagggacaatttgacttcctcttttcctaattgaataccctttatttccttctcctgcctaattgccctggccagaacttctaacactatgttgaataggagtggtgagagagggcatccctgtcttgtgccagttttcaaagggaatgcttccagtttttgcccattcagtatgatattggctgtgggtttgttatagatagctcttattattttgagatacttcccatcaatacctaatttattgagagtttttagcatgaagggttgttgaattttgtcaaaggccttttctgcatctattgagataatcatgtggtttttgtctttggttctgtttatatgctggattacatttattgatttgcatatattgaaccagacttgcatcccagggatgaagcccacttgatcatggtggataagctttttgatgtgctgctggattcggtttgccagtattttattgaggattttcgcatcaatgttcatcaaggatattggtctaaaattctcttttttggttgtgtctctgcccggctttggtatcaggatgatgctggcctcataaaatgagttagggaggattccctctttttctattgattggaatagtttcagaaggaatggtaccagttcctccttgtacctctggtagaattcagctgtgaatccatctggtcccggactctttttggttggtaagctattgattagtgccacaatttcagagcctgttattggtctattcagagattcaacttcttcctggtttagtcttgggagggtgtatgtgtcgaggaatttatccatttcttctagattttctagtttatttgcgtagaggtgtttgtagtattctctgatggtagtttgtatttctgtgggatcggtggtgatatcccctttatcattttttattgcgtctatttgattcttctctcttttcttctttattagtcttgctagtggtctatcaattttgttgatcctttcaaaaaaccagctcctggattcattaattgtttgaagggttttttgtgtctctatttccttcagttccgctctgattttagttatttcttgccttctgctagcttttgaatgtgtttgctcttgcttttctagttcttttaattgtgatgttagggtgtcaattttggatctttcctgctttctcttgtgggcatttagtgctataaatttccctctacacactgctttgaatgtgtcccagagattctggtatgttgtgtctttgttctcattggtttcaaagaacatttttatttctgccttcatttcattatgtacccactagtcattcaggagcaggttgttcagtttccatgtagttgagtggttttgagtgagtttcttaatcctgagttctagtttgattgcgctgtggtctgagagacagtttgttataatttctgttcttttacatttgctgaggagagctttttacttccaactatgtggtcaattttggaataggtgtggtgtggtgctgaaaaaaatgtatattctgttgatttggggtggagagttcagtagatgtctattaggtccgcttggtgcagagctgagttcaattcctgggtatccttgttaactttctgtctcgttgatctgtctaatgttgacagtggggtgttaaagtctcccattattattgtgtgggagtctaagtctctttgtaggtcactcaggacttgctttatgaatctgggtgctcctgtattgggtgcatatatatttaggatagttagctcttctcgttgaattgatccctttaccattatgtaatggccttgtctcttttgatctttgttggtttaaagtcttttatcagagactaggattgcaacccctgcctttttttgttttccatttgcttggtagatcttcctccatccttttattttgagcctatgtgtgtctctgcacgtgagatggatttactgcatacagcacactgatgggtcttgactctttatccaatttgccagtctgtgtcttttaattggagcatttagtccatttacatttaaagttaatattgttatgtgtgaatttgatcctgtcattatgatgttagctggttattttgctcgttagtggatgcagtttcttcctagcctcgatggtctttacaatttggcatgattttgcagtggctggtacctgttgttcctttccatgtttagtgcttccttcaggagctcttttagggcaggcctggtggtgacaaaatctctcagcatttgcttgtctgtaaagtattttatttctccttcacttatgaagcttagtttggctggatatgaaattctgggttgaaaattcttttctttaagaatgttgaatattggcccccactctcttctggcttgtagagtttctggctagagatccactgttagtctgatgggcttccctttgtgggtaacctgacctttctctctggctgcccttaacattttttccttcatttcaactttggtgaatctgacaattaagtgtcttggagttgctcttctcgaggagtatctttgtggagttctctgtatttccttaatctgaatgttggcctgccttgctagactggggaagttctcctgtataatatcctgcagagtgttttccaacttggttccattctccctgtcactttcaggtacaccaatcagatgtagatttggtcttttcacatagtctcatatttctgggaggctttgttcgtttctttttattcttttttctctaaacttcccttctcgcttcatttcattcatttcatgaatggagctttcagctccatcagctcctttaagcacttctctgtattggttattctagttacacatttgtctaaatttttttcaaagttttcaacttcttcgcctttggtttgaatttcctcctgtagctcggagtagtttgatcgtctgaagccttcttctctcaactggtcaaagtcattctccatccagctttgttccgttgctggtgaggagctgcgttcctctggaggaggagaggcactctgctttttagagtttccagtttttctgctctgttttttccccatctttgtggttttatctactttttgtcttcgatgttggtgatgtacagatgggtttttggtgtggatgtcctttctgtttgttagttttccttctaacagacaggttaacagctgacaacaggtctaacaacagacctcagctgcaggtctgttggagtttgctagaagtccactccagacactgtttgcctcggtatctgcagcggtggctgcagaagagtgaattttcgtgaaccgcgaatgctgctgtctgatcgttcctctggaagttttgtctcagaggagtacccggccgtgtgaggtgtcagtctgcccctactggggggtgcctcccagttaggctgctcaggggtcaggggccagggacccacttgaggaggcagtctgcccgttctcagatctccagctgcgtgctgggagaaccactgctctcttcaaagctgtcagacagggacatttaactctgcagaggttactgctgtctttttgtttgtctgtgccctgcccctagaggtggagcctatagaggcaggcaggcctccttgagctgtggtgggctccacccagttcgagcttcccgcctgctttgtttacctaagcaaccctgggcaatggtgggtgcccctcccccagcctcgctgccaccttgcagtttgatctcagactgctgtgctagcaatcagcaagactctgtgggcataggaccctccgagccatgtgcgggatataatctcctggtgcgctgttttttaagctcgtcggaaaagcgcagtattagggtgggagtgacccgattttccaggtgccatctgtcacccctttctttgactaggaaagggaactgcctggtcccttgcacttcccgagtgaggcaatgcctcgccctgcttcagctggtgcagtgtgcgcgcacccactgacctgcgcccactgtctggcactccctagtgagatgaacccggtacctcagatggaaatgcagaaatcacccatcttctgtgtggctcacgctgggagctgcagactggagctgttcctattcggccatcttggctcgaccacaaaaaaatttcaagtgcatctattttgctgttaatatagcttgaagaacccatggcttgacatgtttcataggattgcagccatgggaggggtgagtcatcaaccacgataaactcatgaagatggttttataagctactagatgcggcacagacagagacaacaagctatgttttgctaatgggtcctatcaatatggggcccaggccatctttagcctataagcttcatcccagaaactaggagtcagtcagtagagtttactgtgatattttaaggaagaaaggagaaaaatgactgctcttcagagctgattagagtaaaaatgtaattatatatgtgcataaatatcctagtgatatatcttttttttttttcaatgattgtcttagtccactcaggctgttgtaacaaaataccataaactaggtagcttatgaacaacagaaacttatttctcaccattctggaggctggaaaggccacaattaagacaccagcagatttggtatcaagtggggatccactttctggttcgtagatggtgccttctcactgtgtcctcacatggtggaaggacaaactagctctctggggtttcttttgtaagggtaccaatcctattcatgagagtttcagccttacccaaaggctccttctcctaatgctgtcacattggtgattaggtttcaatttatgaattttgaggagacaccaacatttagaccacaacattgagattttatatatatttacatgtatatatacacacacacatatgtatgtatgtatatcccgtgtgtgtgtatgcatgcacagtgaggaatatatgtttagcatgtaaagttactctttgcaccaaatggtttcaagacagcaaaataatataacacctactaaaggccaggtaattggacattatccaaatcagtcatcatgcaaccctataaggtggaaatttttatccccaatttataagtgagcaaacaaatctcagattaagtaatttgtctaagggcacacagcttacaagagatgacgtcagattttggatttgagtttctctctttccaaattttttattcttaatcaataggctataattgggtgacaatcaagagttcgttgggaatattgttggttcataatagcaacaatatgcagtttgtaggacaagaggctttaagggcagagatctaaatgtatctgtcaaacagagaaagccatgtgaagtttctgtgtcttcatgcctctgtattggattcaggctgtagccacaatacttatgcaaaagcatttcaggggagacattgctaggcaatcttcacttccactaggtcagagtttaatgcacataatacttcttgccttcatgtgcatgttgctaacccatattcctgactgatattctttcagtatgtccacaatgaattaaagttaagaccagagagcaatataaagtgctgagcaaaactcttttgaaattcacaaacattgtccatcagcagaaaccatgtttacatttttaaaattcctattttaccttacgtggactgtaagatggaatccaaagatccctcaaaccaaaacttagtttcaatgcatctttgttgagataaaaaaaattgtcctactccaaagatactaaatacaggtctcatcaataaccatagcttccattttctgtcaaagtcaaataaaattttctactatttttcaattaggaaaagcagcatttcagataaaaaactaggcttttgtaacaaactagcaaagttggagttctttttattgaaatttatgtttacatggttattaaaaggtttgtgttggactgcgggactcatcttactctggcttctggggagtgaactagaaggcagaaaacgtgttctgttttcttgcttctgcgatgtgtatacagttttttgtttgttttttttttcctgagagccacgtgggactggtgaggctgagaagcaaaatttgaatcagagcttagattaaaaaactgaagcaataattttctccattttcagttttagttgttttatcttttgtgataaattgtaggtgagaagtttgggagaggggccaggatgctacttagttcattcatagcactgcttggaacctttagaactaagtcggccaggtgtggtggctcacgcctgtaatcccagcactatgggaggccgaggcgggtggatcacgaggtcaggtgattgagaccatcctggccaacatggtgaaaccccgtctctactaaaaatacaaaaattatctgcgcgtggtggtgcgtgcttgtagtcccagctactagggaggctgaggaaggagaatcacctgaaccccggaggtggaggttgcagtgagctaaggtggcaccactgcaccccagcctagcgacagagtgagactccatctcaaaaaaaaaaaaaaagaaaaaaaaaactaaacacatttgaatactaatcccagctttgtgatcctcctattccacctagaactacagtgttattcaatttttttgcttctgtcatgaagataatttgaagctaatcatccacaatgggaaatgagcaagtggttccaaaagcagaagtgggtatgggtacacatgggagtgtataaagctcaaagtctccttatacacggcattgattcagaaaggaactgacactgttgatgaaatttatcacacaagatgggacgtgaacaaatccttcatcctaaaaaggcagaaactcagaagagaatgactagggagaatgagtcactagcagctgttaagaatcatagttagatctctattcctgatttaactctctgctttatctaccccagaggccagtcgttctcaaacttcagctgcattcagatcacttcaagggcttgttaaaacaggattgctgatctacacacccagaatttctgattcagtacatgtgggtggggcaagagaatttttagctctaacaagttcccaggtgatgctggtcggggataccacaccataagacccactgctttaggcaataccggtttcagaattgagccacagaggccatgactggtttatttacctggaaaaccagcccaacatttttttttaatagcagaaaaagcatacaaatttatttaatgtgtatacataagaagaattacagagtaattacccccagcctgacatttccttaaaataggtgcttgtatgttcacctaaaaggggcactgctaaaagagaggatgaggggtcagaggaacacattttatccaaaaagggatgcccccccaatcccatccgccacattcagctgagaaccagaccagcgtcttagctattagttcattgcatgggttttggtgccagactagacttagatttgagatccaagtctactacctaaggtgataaacttaagtcagtcacttacttttctaaactgcagtactggaaggataacacaattgatctcagaggactgttgtgaagtttaaagaagataatgtttaggaagctttaacacaatagctcatgtatagtaaggcctcaataaatgctaactatatgtattatttaattatataactagcattaccatattattattatatagccaatatgtgtaatgttttgacactgtcaataaattttgaggtgtttatcccattttcagatattggaaactaaggcacagaagggttaagtaccttgcccaagggcatcctagggagcgctctgaagttatgccttgtgatgccacaattatcatcattctaatcacaggcctctaagtgtgatctgatccagaccttccacccagccctcccaagaacctggccacactcgtcaggattaaaggaggaggtattatttcttcaagccctcctggagtctctcttggccttttttggctcacatactgctgtacgtagtttgtgtctgaaatggaaaatttctgtaacacaatacccagctctgatccccacagactctcaaataatctttctcttttttttcttttggtttgggttaaaatatgacttcatgtgcaaaaaagaagcctcatttcccagcactctcagcagattcataaacattgcagactcaaagccctctggttcctaagagttccaaagaattaattctccttttttgaaaaaggagagcaatgactaagaagtgagaagagaaatggaaagattaaaactagctgcctgtttggtgcagggtatatagctctgagagcccaccctcttctgcacctgcaagaatccttgcatgtctcccagcacttctacaggcagccccaaggaaaggcagggagccatagctgcactgagctttatgatcctgcctgaaagtgagtatgttaggaaactggacaatgcaaatcaaggattttaggtatttgattcattgactccctagcattcttctcccctggagagtcaactcttcacacactgtttatgctgtgtgaacaatacagtgaatttcccttgagtgagttatttctatgacaagttactctaacataatagcgaactgcaaactgcacagggctttggagcccaactgtttgactttcatttccacctctaccactttctagctgggtgacctagggcaatttactcacactcttcatgttttagttcgctcatctgtaagtgggacttgtcatcaactgtacattgtgagattttcctaggaataaattacttaataaattatcaagtgcttagggcagttcctgatacatagtaagccccatatgtcttgctattactatttatttttattattattgttactacaactactactctactgcaaggaaaagagcagtgctataatctgaatgtttgtatccccagaaattcatgttttgagatcctaggtgatggtattaggttgtagtattaggaggtgattcgatcacgaggacaaagcccttgtgattaggattagtgccctcataaaagagaccccagagcaggccagccccttctaccacatgatgacacagtgagaaggcaccattcgtgaaccaggaaacagtccctcaccagacactgaatctgttggtgccttgatcttagacttcccagttcctagaactgtgaggaatgaattctgttttttctaagctacccagtctatgataaattgttaaagcagcccgaacagacgaagacaagcagttatggctatgtttgctcaagaaaatataatgccaaaatagaaaggaagcagtttggccttctggtaatggtataactctggattcagacagacctgcacatgacctttgacaccgctactcaagttgtgtgacctttgacaagctatggaacctctttaaatccactttcccgtttataaaatggagatagtaacatttacctcatagggctacagggaagatctgatgaagtaatgtttgggaagttctcaactgttggtcagcagcccaggaatggtagttattgtgtggcaaactggtcacatgaacaaagaaatccattaagtaagtttctcctaaaagcacttacaaccaccctacttgatacaactgactaaaacaatcccaacatctgagattcttaccaaatatacacagacagagtacatggtaaactagcacggtcctttgtatatttttctgtctcctgtgttaaacatggattgttgttaggttgataaattgcctatcacccctattcccaacctccccttctttatcagtcacacttttgtcccagcatatacatgttgatgtggtgaggttttgccagatttcataaagggaactatgataaaaaaaaataccccactgatcttcaagtttcaattttcagattatatgaaatttgtgtgatgaaataaaggttcttgaggaatcacaggtagggcaccagcatcattcaattccagggggcactgtttccatcatactgtattaaagctaggctccaagggcgcctttaatggagaacacaataggatggttgcctcctggagttgtgcaacagaatagctctgatctcaaagtgcaggaaacaaggtccactgacacagacttggactctaacctctcttctttttgatgagtcagactctgtcttccaaaagttaatttatacttgctgagtgagaacttgctaatacccaagcgacatcaccatgaagaggaattgtagaatcacagatctgagagttgaaagaccagcactggtcatcgggtccaccctctccagtgccctaggggaacatgccagtgcagttccagtttgcctttgttaatagggccaaaaaaagtctgaggcttggcttccaaggagtattagagttcaacaaattctcattctcaataggcaggcgtgaaacactcttaacccttggctcactccaccagcacatgtgtttgaagccccttagtcttcactaacgcactttctaaagaagtagaaggaagttgtgatatcagcactgaagggtggtgagaaaaaaatggatggacccaaacaccaatggaagaagatcatggaaagtattgactccagaacactaacaagtgactgtgctttttccttttatactttccccttctgccacccccacaggcttcttacacaatgtatcatacagcactttaaagctgaaagccatccacaaaattatcttgtcctaaggcacccagttttcagatgagaaaatgagtctcagatgtcaggcagtgcaaagcatccaggaaagataatcgatccaaaaatcacttacatttttagctgacttaaaacggagagagaaatgtattcaggtcagagcaagtggcatttttaactccattacataaatatagaagctaatgctcaaaataaaatggtgatgtaaacttggttcataaacttctctgctgggttagacagtctatggtgacatcagggcttgaagtgaagattggaactaggttatatccagaagttccctgagaagggaggctgagaggtgagtgaaaaaatatgttcccattatttgaaacttaaggtggaaaagaagccaacctctaatcaataatgtagatttactttaacatttcattgttgccatttcttcttttatatgcacacacacacacatacacatacacacatactgcaaatcagaagaatagaaatctgaagtcaaaacaccaggatttttaatttactacctgtgtcatctttctcagtttcacattgtcttttccataaattaaaatttattatagtgtctttcttacagctttgttgtatagatcaaataagataatgaagtgtacctgctttgtaaatcatgaagcagtaatttttaaataccttttttcaagaaccttcttaagaatctgattaaaggccaggcatgatgtcttatgcctgtgatcccagcactttgggaggccaaggcaggtggatcacttgaggccaggagttcaagactagcctgggcaacatggtaaaactccgtctctacaacaacaacaaaaaaattagccgggcatggtggtatgcacctgtaatcccagctactcaggaggctgaggcagaaaaatcgtttgaacccagaaggcagaggttgcagtggaacccaggttatgccactgcactccatcgtgggcgacagagtgagactctgtctcaaaaaaaaaaaaaaaagaatctgatgaaatctaagaaaccttaccaaaatttttacacgtgcataaaaagagttttgcatgtaatttcatagggttttcagacattctgaagacaccaatttaacacctgcttggatagtgcttaccaaatgtagaatattccagcctggacaacacagtatttttacaacatgggataaattaagatgagtcatttatttatttgataaacgtttactggacccttactaggtagtgcgggctgcagaggcactgatatccttgtctttcaagagttagcaatccaggttgtgcgcagtggctcatgcctgtaatcccaacactctgggaggccaaggcaggtgaaacacctgagatcaggagttcaagaccagcctggccaacatagtgaaaccccatctttactaaaaatacaaaattaccaggtgtggtggcacgtgcctgtaatcccagctacttgggaggctgaggcaggagaatcgctggaacgtgagacgcagaggttgcagtgagccgagattgtgccattgcattccagcctgggcaacagagcctgacttcatctcaaaaaaaaaaaaaaaaaaaaaaagcagtccaaaaacagtattaaagcaaaggagtctctttacatgcattatatcaactgagaaagtcaccttgctatggcatctgtccccagagctccagtgtctggttactctgttcagatggagggtagtctgggtgtctctgatttgagacagagaacctgcatacagaaaagtcaagggacttttccagtggacttggtacacagaaggatttgggtacagatgagcagagagaagctgtattcaactttggctcctcataatctcctgtcttgaacccttcatgtcagtgaaaagacatctgtaaacatctgtcgttcttccacatttcattaagtatgcttcttgtagattgttgacaccaaactagtgaatcaaatatctgatgacataacttagaattggaaacaggcattttcactataagcagaagtttctaaaaaattcctgccatgtagggttcaaatcatttcaccactttctagctttgggaagcacacacaaaaaatgtatttttattatctgaaaatcaggatgataatcatgacttccacatttagctatgaaattaaataattcctctgaagtacttaaaactgtacctggcatatagtgaaagctcaataaatgatgattattataactgtcattgttctcattctcaacagctatctcttacccttgtaggtattcttacccttgtaggaagcccattggttttactggcaatggaaaatatgttttgttgtagatgctatttcctaaaatattatgattttttaaatgtggctactaaatttgtctatagagatgttaatttttgtcttgacttaggtttgattttccaagttcctgcttgggttgtatatgaatagggttatctagaggaagcaggtagaaattgttaagagctggtaggatgtgataaaggttgagatttggaagttaaatttgaaaaaacagaatcagagagagggatgattgatcctgattaggattgtctagaagaaaatgaagaaaaggtgagagttgatagccacaaataggggagtttcccctattagaaagtacccaggaaagctattgtttgccctggccattgatattcaggcaaactacccaatttcgttttaggtgactttgatagaaactggattgcaagaagaagataaaatttcttcatgaaccagaatgaggaagtggtggtatactcagaagagaactaagggattcaaacaaaaaatcctgttgagtccacctggatttgatggtggggttgcctacctatagtttgtaacaaatgtttttcacgtttaagtgagaatattattctctgtaaacagcagactactattatgatgggtgtgtagaggagaaaaatgtaagaggacaactggtgagaggtgtagtgctaaaactatggcctgcagaggagctcttttctatttgcagacctagccccaacccatgaatgaaaacaatagaaatgatctgctataagatttcagggagtttaggggagctccggagagctgtatgtccacacatcagccagccagtccgtccctcacccacaccctcggatcctgccacaaatatttgaatcactgccatagcaatgttcatggacccatgccaaacaaaggtccatacgactgcctgggatttaaatgtcttcctgtgtaatctcatcacccaagtccacccacgtacttggagtttgctctgccctgccagcttcttttgcattgtctagctggacctacattcagaggtccttggagacaatgcttggattcatgtctggaatgcttcagcataccattgaacccactcccacttcatcattgcctggggaagagattcacaagtgcccaaggagcccactggttgccaatgagcaatttctcgagcctttaattatgggccaatgaaaacaatgcctttagtgaactgctgcctccctttcacctctgacccatggtcagacacgtgactgtgagtgttgccagatggaaattgttagtgaagaaccacatttaacagaacttttatttatcaactgagagcagcactcatcagttatcctgtgggcttgagctgtgtttaatatataagtaacctcaatattgtatgggcaacactatgggtttggatgaggattggcctatgaaagaagaatttgtcccctccaagttcccttatcaagcactaggagcatgaagagtatggaaaaaccagtccaaattattaggtaataatgttctgggaggcagcccaaagtccaagtaaatattctcacttgtgtccaaacccttgcttggcagctctgtcagacactgtcttttccccatattctaccatcctagagagtaaaagacaaactcttacctcaaaaacccctgccaaccaagtattcattatctgtctttccctcatctgaacagtttgtagctcagatcaggtgtttgttggagtctgattactctattttcaaataatacagcatacgactacagtgctgatagcaagtttaagaaggttcaacctaagggaagagtgatgttagggaactggagttcctcaattccaacattttccaggtctaaaagtgcactttgtagaaaaaacaagtgcttacattcttagctgtctggatgtgcaatattatctacaacctacagccttagaaacttttcctttgaactcgtgtttcgttccatctctaaactgtatgatctttagctgctctattcagtaagtatttgggcagatggatgcaaattgatgaaacacatatgtttaagacagagattaagaatgctgctgggttaaatatatctgtgtagtgatttccataagtatcttagctgttcagacaacatagataaattaacccatagaatccattgttgaattttagttactttactttttagcgtctcagataattttaccaaatttatgtcactttccagtatttctgtaaaatattttagagaaaaagcaggatcttcaattcattaatggaaaactgatgtaatgagaaaaacaggccagagccacacagctgagagtcattggttgcatctagaagcccatgtttcccttgtagaaggtgcttcctctgggaagggtgcttattacgtcatcaatgtattttttccagataccaggctcttttttgggatatgggaactcagcctggggaaacatttactatccctaagcaagtacttagatctttgtaagaaagctcattattttttttctcctacttttctgatgtgtgtatttccctttccttagagactaccaattagtaagattgcaaatttagtttggcatctaatttatttgttactatttttaatgcaaatgttaagtgggctagcctctgagaatctgtgatttttatgctgttgttccccagacacaacaattctcttgtctaagttagtgcaacacctacacaaacacaaaatatgccaggttataagactacagacacgcacttgggaaaatgctgtgtagtgtataaattaccataacttgtgttattataggaatctgtgagagaattcatatcactttacccatttcataaatggaaaaacttactcagagatatgaaatgacttctccaatattacacagttcccacctcacagaggtagaactggtcaccaaaagtaaaaatcttacttctcagttgaagattttgccaggatatgccgtaagactcttcttagaagatgagcaaagggagacaagaataaaaatcctagtcccagagggctggtcaaggatctgaccacctgcagagaagaatgaccccagaactaaacagtgattggtacgaagccagtcagctgtagcaaagcagccaggatgaggcagcttgaggagagatgtggagcccagccgcctcatggcatgcaggggtttctcccaaggctctgcacacaccattgtgcagctgcccctttctttaatgttagttctcatgaaagttccagtgcagatgaaactgtcagcatctcagcaatcatgggttttgagaaagaagaagcggtgcctagctaaatgtatttgttttctagggctgccattacaaagtaccacaaatgggtggcttacacaacataatttcgatttcaaaatgtcagcagcgttggctccttctgagggctgtttgggagaatctcttctatgcctgtcttagcttctggtggttttctgttacactttggctttccttgtcttgtaaatgcatcaccccatcactgccttcatcttttttttttttctttgagacagagtcttgctcacttgcccaggctggagtgcagtggtgccatctcggttcactgcaacctccccttcctgggttcaagtgattctcgtgcctcagcctcctgactacaggtgtgtgccaccacgcccagctaattttttgtatttttagtagagatggggtttcaccacgtgggccagactggtctcgaactcctggcctcaagtagtccgcctgcctcagcctcccaaagttctgggatacaggcatgagccactgcacctggccactgccttcatctttatatggcattcttctgacatacacatatgtgcctgtgtccaaatttctcctttgtgtaaggatgccagttatactggattagagtctaccctcatgactttaacttgatcacctgcaaagaccctgttcccaaaaaagatcacattcacaggtactggaggttaggacttcaacatcttttggggggacacaattcacccaacacaaaagagtaaatgtttcttcttaaatggaatctcctaattcaaaaatagtcattcttcacatgcttattttagtgttacttacctcaaaacataaggattaactgtcttttttataaagttcaattttttcttgttaggtttttaaatttttttatattttgacaaataaccctttgaatttggtataaaataccttctgctcctcaaaaaaaagactaatgctgcattgaaatggaaggctgcaatcattatgagaatttattactccttcttacttgaactgtgaactttcattcacatcactgagaacaaattatatacttaaaatggctcaaaacctattgtctttttcttactgttactatttttccagaggagaccctgttcagaggaagttattttccaatgtgcccttggaaaagttctacaagtagtattttcaaaaggacttaatttaataattctattttttaaataaattatatttagactatattaacagaaagatttttaaagtggggttggggagaagggaaggagtaaaaagaaggaaaagaagaggaagaaggctaaacctatgaaggggagtaaccatataaatgactaaggctacaggtttttgtttggtttaaccccaaagctggagggctttttaaagctctctccactctctggtccctgaactcagaaatgcctagatcagccctgcctggctagattctgggaataacatttttcttgtagaggaaattgtaccagggacctagccaagtctaaattatctttttgggtttgcattggcatttttcttggttcaaattcacaagtaaaggttgccgcaagagaatatccagggtcgttttctttaccgaagggcttagctatacctatagagcttatctgtttgccttgactgtccatggacctcagggaaagacatgatttcataaacacctcatagagcccatccctgcacactttttttaacaggccccacaggcctgcacccctgaaggagggttggtgtgtatgaggaatgcaatttggattttcttcacagagacgtgagaattcctaagttgaggccaacaactcctcacctatccatttccactcatgtgcaaatcatatatttctgattctcagcactcctttcttgagtttaagtatagaagcaaacaacttcagtaaacagataggtaagaagttttatgctctaaggattgaaattgtaaaggtctaagaaccagtccttattgaaacagacaaacaggaatctcagtgctctgatagcatcgctcgaagtgcagtctgagaaccacttttagcagaattatcagaaaagcgtattcattaaagttaacaaggtttcccaggctctgctccaaacctggagcagaagttcttggagtgagaactcatgaatctcatttttaaccatttcccaggtgccttcaattcacattaaagtatgagagctattgcatgacccaaatgtatgagaagacagccaagggttgtgaatatggatcccaacataggcttgagggggtcccttaaagactaataaaatcggtgatttgtcacacaagctttagagaaaggtgaattttagatagggtttttcctgacttctgatagctgtagcaaaatatgtttccacgatcttatgctctctcaagcactttgcattcatccctgactttgagttacccagatctatttacctgaatttctcctgagacagagacaacgacttcgtatctttctgccttgatatatcccttgactggcagagtgcctgtatgagtaggcacttaataaacttttgttgattaaataaataaacatagctgctttactcatcaggaacttagcaagaaaagagtttatgcttattctcagtaaactattatgatgtactataacataggtttaatatgaggccaggtcttattggatctttatttctaatatctcaaaacattagtttcttctcaaatactaccatgtcacttcttgtgttgaaaacttatttatgcactctcttcccaccacttactgggaaagctgccgtaacagcaggtaccaggaaaaagccaaactggcctaaataaagagaaattttcaaatgacatttagttcatctgtattcagtattaaggtttcttcttcacttagctgagctctataaacacctgtcagtggcactatgagatacagcctttagaatattgctgcttcattcacacagtggactgtagggaggagaaagccagtgccagggagggctccttagttattgagacctcaccttcccacctctgttgtgtgctcttgggagctctaggtaggggtctcactcaagtaaggctgtgagaggtatctgggtgatggatgtgcttcaggaatgcatttcacagcagatgtttttccagacttgctgttagggtgcagtttcctccttcagggagggtttagtggctcaggaaattaataaagtcagacagaaaaaaaattgatcaaagtcctggtgctaatgtatgctctatctcctggaagttaatggagatcagacagcaaaatgctagggatgcgagccccgagtggcttggcgcatctgcatttagaagcactggctgaagaagcatcactgctagaaatgtaagacatgcagagtcctgggaaagggcaccactggggcttggagtggttttcatggtttttttctgttttcatctttcaaagggaaaaattgctgaaataaagctgacttgaaatcatttcaggcatgtgtgtatcctgactagcacattctttgtcatgttaacttcttttgatttcaaagaacactgtcaatttactaggccccaaattcgtggtgtttttaatttaaacagagggttgccaaacctatccctaagagaaatattttcatgatccagctcttttgtcaactccacagctcgggtgtggtttcattccccagttcagcatccctctgtgctgttgagaaacccaagacaatgtcggggaaacatgaaaatactctcgatggattggattctgcctgaatctcatcagaaggatgtgccataaggagtgagttggagaaacaagggaaccgaattaagatttatatttaatagcacaatgtgtggtataaagaaaatatgagagtcttataagaattcctaataatgagataataatcatagctatcaatcagtgaacaggggagtcaattgcagagcacttctcttgtggctctacagatatctcatgtcatcctccaaacaaccttatgagtagatactatcatcatcaccatcatttatacatggaaccaaagagcagagagatcaaaaagagatgactcggactatcattttgctagatgcagggttggtccacacccttagaaaacaaacatcgagaacccaggtctaatctattcagttgagattacttcccccaccgattaaacagatgagtagtcatggaagaaaatcacatagaagagcatgtagatgatactttagaaaaactggttagtcaagaagtaagagtgggaggatgcagagcacgtatgctgcaggtgtgatgctaaatttgatatagcccaaagcattcttctagcagaaagggtgttcaggaaggggtttggaagtaattacacaataatcaattcagatttttggtcatccttcctagaccttttcctaattgttccattttgtaatgtcattcgagtcatgtgcatagaatctggtttgttctgaaggttaaatataaaagaaactagaatactcaggaaatgtaattataaaactagagataaaattttggcttaaagtttgacccagagaataattattttagatatgcgttcccctagtgaataaagtaggagaatgtttacatttttctacaattgaacacctgggaacccattgatatcttactgctaaattagtgagagctcagaatttgcactgagtttatggaaatgggcatttctttctaaaataagttttaaaagtatgcttcattgctttgctataaaactggccctgaagtgttctgacagctgctggtgaaagctttggaacgtatttagctctttttcagagatattgacctcctcacagcaattccaaaggcaagagattcttaagcatagtgggacaatacagagcaagcttctgggctgatgcttatgaataactagactgagagcccctcataactgctatttaggaaggcagtcatgtaagaatcagtcttattcaaatgtggacctttagaggaattacctataggattagagtataagtggatctgagaaataatcccctttatcgtataaactctccttgagtcccattccacatctctttgtcaatcaagtggcactaggggaaggaaaggggatagaaagagaagatagaaaagcaaaatctctttctttaggactgtgtatagggtgacattttaatataagaaattccctttctattaatgtaacctattttcaaagtatttataatttatgggatttgatatctattttaaatcaaatattaatttactaactgagtgcacgttcctacattgcacctctcactccagactaatacagttggaatctccctgcagcatcctggaaagtttagcttcctgagggcaaatcttttcctgcctagatactaaatcaactacatcatattctagaaaactggaaaatgtgaaggaagggatttgtaataactcatacacctagatgtagaactccaagaatctaggcctgcataagagtgccaaggagttacagttcccccttgatgtttcatataaacttcaccttccctttgtcatcaggtaattcaataacgtgtacttcctttagatttggcaatcagtcctaaaaccagtggtatttattatgctttctcccttccaatctttctcaggtagagaagatagaaatacattctgtccaaagatgcttaagctgaagacacttaagtatatttccaaggaaatagaaaatagattcttatctctaaggagcttacagtcaagccaagaaaatttggaaagtgtgtacggtgaaggggccaaagaaataaaggccaccaatcagcataaaaaagagaagccagaaagctgagagccagttacaggcaatgacacaggaggcccagacagaagggctttgatgaggaggcagcatcatttgctgcaggaagttctaagaaaatgagtcttctacaaagaaagtgattcttactagaaaaaaaaataactaggaatcaaggcatcttctcaaggaccaagcaaaatatatttttttctctcaaaatgtcaaaacagattactagtttttactaatgaaacaggtatctatctccattacacaacagtaataggagttaattattaacattgacccagtatgatcttctaaataaggattatgcttctttctcctattttctttctttttttctcataagataatccaaaataccacataatataatttgaagttaatattcagctctaaaatttaggctcagaatttatggtatttctttttatcttattttctaacaaagggatatttagtacagcatcttaaatcagaccagtccactctcaaatgtgaatatttttagaagagcaaaaagactaaaggcactttggttccacataacaaaacagctctttcattctgtgttcatctttatgtgatttctttctgttatgtgccacattttttttcttccaaaagatactcacttgtggtaaccccatatgcatcatatttgcaacttgttgtttgatgccatctgtttaatacaataaaaaagaattagcagtcctatcacatgagctgaatttcatctgattcctcttcaaagaaataggaggcactattctaatgggcaaaaataatgagtgctaaatccttcaactagttttagatgtaaaacacctgttttaccccagtatagatgttacatattcttctacatcattaccctcccttttttttaagctaaacggactggcttctggcaaatccagaccatttaacaaactccagcagatatgttttataagcgtaggagctgactatattgtggagagctccggatttacatttcatcgcacaatcaacctactgccccttgggcactcatacaacctctctgtaggtcttcattttgaaaatagggatactgttatgggttatgtttccccaaattcatgtgtagagtcataaccaccaagacgtcagaatgtgaccttatttggaggtaggtctttacaaaggtaatcaagttaacatgaggtcattgggtaggtctcctctactatgatttatgtccttatcatagggaaatgtggacacaagcacatgaagagaacaccatgtgaacataaagatggccatctacgagccaaggagagaagcatggaatggatgcttccctcatagccttcagaagaaaccaactttgccaacaccttgatttcagacttctagcctccaaaactgtgagacaataaatttctgttgtttaagccacccagtgtgtagtattttgttatgggagccctagcaaactaacaagatgcattatgaatcccccgcattaggctgcattaaggattgcaaaaatatgtaaaatgttcaacccaccctcagagccgtaactgccctttctagaaaaatgtacttgaccatagttttagtgaacttggaaggcaactcgtgctctcatgtaaaatgtgcttcaactctcattacagagtccatagccttagagtatcttgctcagaacatctctactttctacccagggctcaagtcaggacaatttggtcccaagaaaccacagtgaaatgtgaatccctaaaaaaaacatggcaagtgttgtgtggatatacatcaacagaaactgaaactgagggatcacactttctccccagttctcttctgtcatctaatccactctcttccacctaaaattttcctttgctcacacagagttccttactgattccctttagcatctatgtggttcattaggccactcaggcagcctttctttggctactttctcaatagtggctctcaaaattttagcagcatcagaatcacctggagggtatgtaaaactcaggtttctgggccctaccttcggagtttctgactcggtaggtctggagaaaaaactaacaagttcccatgtgatgttgatgctgctggtccagggaccacctttaagaagcactgttctatagtatgacatttctgcttcagttttcatggattacttattataacctttcaggttcccaaaatctatatatttttttctttttcaacttttattatagaatctggggtacatgtgcaggtttgttgcaaggatatattgtgtgatactgagatttggggtatgattgaacctgtcacccaggtactaagcgtagtacccaatagatagtttttcagcccttgcccccctcctccctctagtagtccccagtatctattgctcccatctttatgtccatgtgtacccaatgttgagctctcacttgtgggaacataactgtatttagttttctgtttctgcattctgtttctcctgttctcttaggataatggcctccagctgtatccatgttgctgcaaaaggcataatttcattcttttttatggctgcatagtatattccatggtgtatatgtactacattttctttttagcctgggcacccacagtggattgggcactgggcccttgatgggcacctgggttcattccacatttttgctcttgtgaatggcgttaagatgaacatacaggtgcatatgttcttgtggcagaatgcaaaaatctatactcttaagaggactctgacctccatcctctttttgcctttgctacacaggtctctggccatcctctatatggaaatacttagggtaagtagtcaatcagccatggccaatgaagggttgggtcatacacccaacacttggctatttatcaccccacacattcagatttttaggaagaggagagtcgaggactctgacatgtgtctattcacaaaatgtgagccaaacattcatttacaagtcaattatttgtcacagtaagttctcagatgttcacttcattctgtacattattagaaaggctaaagtatagctcttctgtggtttggaatgcccccaccaaaactcatgctggaatttaattgccattgcaaccacattgagaggtgaccttaaagagaaggttcggcaataaaagtgaagctgttattgcaggaggggatttgctaacgcaggagtgggctcctgatttaaaagaagaagaagaaaagaagaagaagaagaagaagaagaggaagaggaagaggaagaggaagaggaagaagaagaagaagaagaagaagaagaagaagaagaagaagaagaagaagaagaagaagaagaagaagaagaagaagaagaagaagaaaaagattagttcggcccaactttctgtttcacatgccttgctttcttttccattatgaaataacacagcaataagaccctcactggtgccagtgccatgctcttagacttctcagcctccagaaccatgagccaaaataaatctgttttctttataaatgttggagcctgtggtattccattatagcgacagaaacctgctaagactaagacagcatctcagaaccatatgagttttatgctaatagaaaagcacatttagaattctaattcatgtcatctggaactctcatatcagagattattcaggtaaaattatgatgggttatggcagacttgcagctttgatgtccccgtggatagacccaaatgcatcaatagcagcagaaggaaagacaggatcttataacagatgttgataggtgttttcatatgtgagtgcattaactgaatgtttacaaaggactatctgtgtgtcttcacaagtagattgcctgttcctctatagcacactgaatcttgattttcccccaaatcaagcatagagctatacatatagtagatgattaataaatatttaatcaacaagtgaatgatcgtcatccattatgtttgtgtagttacttagaatgttttcttttgcattatcttcctcaacattaaaatgtatggagttttctctaaagtcattttttagcttttatatttcaagttgacctcattatgggccagtcatggagtgatgtcataatcaagaaaaactaaatgccttaaaattttaaaaacataacttctttacttatgtctgatgaactctattgaccatagtgactatttctttaaaatctccttatctctctccacctgctttccttatgctctggagctgctcccaagcctatttttaaactcttgagaaaagttttccctcagctctaatccacatgtctcccatccttctttatccctctcccttttccccaaatcctgtattacattctgtatccacagccctcctgagtcaggattgccaggaaagcttgaactactcatgtaatgctccaataccaataccaaacttaatttgggggctttttatcagcatctccccaataacaatgacttcatcacaatagccttattcctccaggattctttgttctaccttctaaataattgtgtcaagttacaattaatttctcctttgtggatatccacaacaagaacaggctcacatagataacagaaatgatcattagtttttcaaatatgatttcatttaaaagcaagaattttcttccgccttctgctatgcagatgcattcctttctccccacactctcaactctcaaattcttaagcatagtaagtacagtttgggggaaaggtgttttttaatctagaaaagaatccggagaactttgcaagattttctcaagtggttcctatactccctttagtgcagattaaatacagtcctctaaatgatgagatggcagctgtaaacagaagcagtattgccgtggcacaaaactacctcagtcatagggccagaatgcaacctgcctattttgaatttggtcaagcaaggaaagaatgccttatctctatttccctcaggccaagctctgtttacttatgtactgtctcaggaatatgacaggatccaaggccagggtcaagatatggagataggatgtaatagagaaagactaagtgtgaagctaaacttcattatttgcatccaaatgataaaaataatagtagaatctagagatgggtaatgactgcccttaaaattggtagcaaatgttcaggtttttactgggaacaaccttagttatacatggaacttcctattctcagtccaatggccactcttgaaaaggacattacgttcctggcaattaagtcaaaccttaagctagtctcatagttcagtgctctcagttccaaaatataaagcgaggatagtaaaaaaggagagatgctctggcctaccatgagcccctcaaaattaccactctttgagctcaaaagctcaagcttgagcttttacactcaatcaatttgttaagtttttgttcttactattccctcggtccagaatgctctctactctccccataagcttggcaaattctttcttctctgttttggtttcagtttaaacatcacttatgccagagatccttccctggcccttcctattcccctttaaactgggtgagactcctgctagagcttctttctgtagtaccaagtactgaccccactgggtacttatcaggcacagcttaggaattgtctgtctttcttcttaacaataaattccatgaaggcaacaaccctctctacttttctcatcattttgaacaagtgcttagcacatatgaggtgataaatagagctttatttttgttctcaggctattcagagagaaaaaagttttgaaatatttttagacatagtgtcttcttttttaggattctctatatatacattttatattattgcatagcttgaattagtcttgcatactaaccttatatcacatataattttgtcctacttccagtttttcctttttcttcttagttcctatctgttttcccctcctctgtccccagctgctattccaggacagcactttctaaaattccatagttctctgtgcttcaaaattttgagaattcttgctcaacatgactatttctagaaactgcttgcagcagttccaaagtccatggcttcagcatcaaggtcatgggaaaatctttactgttcagagagagatttctagagccctccagtgaatatgtacaaatcttctacggggcaatagcagaagagccaacacgtgataacctttgcttataatattctttctgaaatgggtagcctcaactggcaatttacatctaaaatatccactttgttttagaattaagctctatttatcttagtagtggcacgttctttaaaataaaagaattatttttcaagactgaggcttggagaaaaaaataaaataaaataattgaaaaaacactactagggaaaaagagaaacatgagcaaggtaaagaaattaaaacaagacaaaacaaaaactcatcacctttaaatgtgttcaaatctccaggtccagattattcagaacaaacttgcagatcaatgagggagcaagcacccagggagagaaacaggttgaagataaacattaataactataaaggtacttgtattcccgagacagaaaattgaccttctaatttagagattgatcagcttgctgttgatcactagcaaaattctaggataaatattaaaagccaatttgtgaacatttgggccagaaaaatcttgccttaatcccaaaggagttttttaagatcaagttatgccaaacttgaaacactacatcagatgaatatcaaagagaaattcaattacagtaaggctcttgacaaagtttgttatctttaagaaccagatggtaaactgagggctacataaaaatacagttgggtgaattcagagtcaattgaataagtatattaagggcaattgtttagaggatccatgtcctttgagaggaattctctctccggaatgatcaccctgcctggtgtcactgatgatgatttagatgatattttcagaactgccaaataaccaaactgggagggaaaatacgttggttaataggatcagatcaagattgagaaatattctaacaggcaataaatatcagagccgagaattccacaaatgcatgattaaggacatatgtccgaacaggaatttctcttaataaagtattatataggttgacttacaaaaatcaggaaacacaaacaagcaaacagaaaaaactgtaaatgtgatagtcattaggactgtctgcaaaaattgttcttctgagctcattggaagcttgcatttctttgttcctttgaagtgaggcatgagattttctttgaacaacaaaataccagaagtgtcatgcagtgtgtgcaagttgcctcatccttttttcctgcctcagtggtagtggaagcttctggagccatctgtctgtgtctgtgagtgggtgtgatcagtaggcccctctctcataaaccgtgctgataagcagcataagcaagaactaatttttgattgtgtttagtcactgggatttggggattatttgttcagtataatccaacctattctgagtgatgaaactagtatttcagaacataaagataagaaaaagtgtgtttgtgctgtgttaattccaagacttttagcacacatatgcaatatacacataaattataaaaatgtcatgtatattgtaacatacttgtttacttcattatattgtgaagtaagtatatttctaaatcagttttttaactaaataatagtaatggtccattacttgaacatgtcatacctaaccaattccctattgtaaaaactttattttttctattttgatattataagtagtgctatgataagactctttgcacacatttttaatatttcacttagaataaattaggaaaagtgatatttttgagaacaaattaattgctttcttaagctttgatcatatatttccaaattatactaaataagtaataaaaatgtatagttccatcagctgtgtgtgagaaaatctgtttttccaagtatttgtctgcatagaatattggctattaatttcatttttagcagtttaattttgccagcaactttggcatctagcttgtttgaacatttcatcacatgtttgtgagccattttatttcttcatttgtgactcacttattcatgctctttattcattgttctactgatattagtctatttcagttgattctcaagggctcttgagatattaagtctgttaacccctacatgtattttgcaagcatatttctgttttctgtttattttttgatatttttattattcttccactttggagctttaaattttagttggcaaaatatagcagtctgtcttatgtgacttatatccttgaaggatacatttggaattctcaaatctccaagtaaaattagcattttcaaatataatattttcctctagttctttattttgtttttacacatacatttttaatccatctagaatttatttctgaatattaaatatgacaggattcttcccctcccacccaaaaatacctagtgtttttaactaatcttaaactcaacaagaagcattagagaggcaaacacacacattaatgcaatcttaaacttctttaacaaaatctaggacacaccaagaaggaagtcataattctactactcttcatctgttagaccacttctaaaattcaattaggacattgataaataggaggatagtcagagaagggcaaccagaatggtggtggttcaggaaaccatatcttttgaagaagaattcaaaaaatgttttgctcgggaagagatttatattgacatgaaaattgtattcataattaggaaggattggcatgaaaatgtggtagattcattctgtgtagttctagatattggcatttggcacattaaaatttatagcaaatcttacttaaataaaaggaagaattttatattcaaaaatgaggtacagttatccctcagtatctatggaggattggttctaggacctctcatggataccaaaatccacagatgctcaagtctctgatataaaatggcatagtatttgcactggacctatggacattctcttttaaatcatccctagattacttctaatacctaatacactgtaaatgcaatgtaaatagtcgttatgctgtatcgtttaaggataatgacaagaaaaaaagtcaatacgtgcttagcacagatgcagtttttttccccaaatatttttcattcatggttggttgaatccattgatgcagaacccacagatacagaggactgactatactgacatcctactgctgtaggaattcaaacaattactaaatgccattcaagtttgtacaggagatccttgcttgggttgggatgttaaactgatgacctctaaggcctcttccaaagtctaagattttatgattctggattgtttgacctagctgaagaaaatgacctagtaaataactattgttactttcaaaaatttaagtctgagttctgaaaaaggcttaaagtgggaggataagacagagcatcggcaacttaggggattggcagacaagcccaggccctcccacccaatgataagcagtagaatcttaggcagatcacttatctcacccgggctacagtttgtcattctaaaatgagagagttgaactaaaatatcattaccagatgatctaagagtcccctcaaagcctaagatcctataattctatgtttaataaataggtataataaatgacatagtcaggttttcaaatagaaactcctatgcctattttaataaactctggctgtctcagtgacttgtcctattgagagcctcagatgcaaaaaccagaggttaaatccaaggttcacacatttgtcattcatcaaaaaaaaagtttaagaacttattttgcatggggcgcaatgctaggtactattgattcaagggcaattaaagtgaagactgttgtactgtcaaagatctcacagtttagtggtgatgacagcctagtagaccaacaattatgctactacataacaattgtgttggatgtctttaactgccatagtgtcagagactgacagcctacttggcctttagatatctcaaatataccccaagagactctagcttataatttctatcctcatgcttttgcgttactgaaggtgaatgtgttccctgtttaaaaagtttaataatttgccatttgggagtatttactgtgtgctctatagcatgctatttaatcagaatttctttagagaacagttaactttaaatcaaatggaacttataagtgagatattctcctttatctttggatatttttttgcacttgggtttcaaatgctgaaaatgaatgttctctccatcataacattcacagacccttttcctgacttttcatggtgtgtgactgtggcctgacacttgctacagatgagaaccctttcaagctagaattggagggctcaatctacttctaccattttcaaagacatggttggtagcttgggctactctaggctttctcttctgtgttctctggggctctgcttctgacctgcctttttcctctttttccttctggtccacttcacctcaaagaggacacatgggagataggggaggcattccacagccacggccaagaagaaaggaccaccccggggtcgagtctctggcagcgtacccaatctattctggggtgaatccaacctgattgcatgtttctctaaaatagatcaccaagttgaagatacaccaatttttttctacagtttttaaataaacttagactttgtagtccgccaaaataaacattagagaataaagcagtaaatttttcagtaaatatattagaaatagagggtaagaaatcctccagtctggcaaagactggaatgggagcatgaattggaaacaggtcaagactcctggccataaatagtcttctcactttaaccaagatgtttgtctcatgcattctgacccaagaaggttactagtttccaggaggagaattggtgggacttttcagccctaaatgtgcttaaaggacaaaggaaggaaactcagtcacagaaacgagtggatggaaaaaaccattatgctattttttttttaatgtcatttcaaagcagtaatttggatagatgtcatgttgtttcctatgaatgccatggggttatatctggatgactaccttcctatgaccaaaaactaagagtgacatagtgataaattcacccaggtcagaagtagagtctgggacttttgtgtgtcagtctgctatttaacaccaaggcctttgtcctctaaaggtagaaaagtccaagaggagaaagcatgtgtcaatattattttaaatgacattaatttgatattccctaaatgaaaagaagatctttataaagaccctttgtctcttctcctgtttacttctcccatctatctaccttttattctttctctctaaaaagagcctaagatgatgcagtaagattgaaatagctaaacctaccacacagggatgctttaaagcaagcttgtccaacctgaagcctgcaagcctcatgaggcccaggacagctttgaaagcagcccaacacaattcataaactttcttaaaacattaggagatttgttttgcaattttttttcagctcatcagctatcgttagtgttagtgtattttatgtgtggcccaagacaattcttcttcttccaatatggcctagggaagacaaaagattacacacccctgctttaaagagtaaaagaataacttacgggaaagcacctatcagacacatagtaggtgctcagtaaaggaatagctccattttctttccttgttggcagaggaaaaacattgcaagatcgtgggtagagaaatgaaacgatgagcgctatattatgttcttctccctgttggaatcatattggtgagaaaggaatgccaggttcacacatcaaatccctgagttttacttttcccaatcgtcactgcaggtatttttatcaaggcgatggaaaaaacagtgctccccactcctggtcaatcaaagaggtctctgctaaacaacaaattatgcctgttgctcaaggttctatcagatgcctggcatcagattaggagttcctttgaagaaaagactatagactccaatagaactccttattagtctgctttctgagaaggtgtaataatatgctctctatgggaactacgtagtcatttgttcaaccaacaattaaggaggcaccactcatagttggttacataattggcagatatcttccagtcaggattattttagaggccataaagaacaaaatggttttgctataagtacattctccgtttaaaaaaagaagaaagatttaactgctctgacatatatacatgggaagccatgtactatagtgaatgagagtgcagattttggattcaaatggttctcagttcaaatttctttattaattttgtggactttggaaagttatttgacttttctgaaatgccattttctcacctgtaaaatagcaatggtaatagcttactttgcagagttgttcagaattacatgagataataatatatattatgtgcttagttcatatggtgtctaaccctataaacagcgaccaacaaatagcagttaccgccgtgccaaaattggacaagctatcatcaccggggctatgtgccctgagtatttttgtttggcccttgtctttagccaactgagcaatacaaaactgagttcctgagaaatcttggaaacaatgattctttggttctcaccacccccatattgtgaaatccatgatcttcacatggcagattctatccaaccaaagccccttcagaattttggaatggaattctcataccacagccagtgctatcatgactccatgggcgtgaggagcctgactgggggcagggcgttcaaattgcccttggatcttatcagcacctcagaaatgttacagctagtcagctactaggaagtggaggcctagcctcttaattttgttcctgcttagaaataggcatactctgggttttcataaccctgaaaatctcatagcatagccctgaatattcagcttcccttattagaaataaagaccactctccatttagagactggccaagaaagagactcctgctgttgtagtaatatggttgccctttgaccccaggaagttcattgtgtctcctttctgaccacaaaagtttactccaactcctcaggtaaatgtctcttctctgataaggtaccaagctccaaagatcttgaaaggtttaatatataccttccagaacttttcatccacacaactagtagtctcttcatactctcttcacagcacttgaggcattaggagttgctcagtaggttgctgaattattgcaactcaggagccagactatgacagtgaactgacatgtgtttgtggccacctaagcactgtgttttgacaaaggaaaagaacctttcgcagatgcaagagagacttctgtttgatgaggtgagcgcagtgcaagggaagctgcctctttaggatactctggacgtaaaatgacataaaatgaagacaatcataacagaacagcctccaacctaaacagtgttctggtgcaatagaatttacttttcacttttaaaacttttttaaaaatacatgattattgtagacaaatatagtaatatagagaagtaaattaaaaaattaaacattttcaagaaaaccaccaatatctagtattaatgatataaaatgtatcctcctagtctctttttaatgtatgtattcattttataaaaatggtgccatggtaagcattctgatatgtaatctgcttttcccctagtacactgtgaaccttttccataaatatttctctgtaatattatcttccctaacttttggtaatgttttattattgtgtcacaatgatttaaccagctatgaattatcaatatttagatagcttccagattttcagaattataaaaatagtttgatgagttacactgtaggtgaatgtttgttcttaaccaatattcttttgttataataaatttctatatatggtatctgctgggtgaaaggctatgtgcaagactgtgttcacacgccctgctatgaactttcctatacaggacccctgtgagcagatgcaatggtttgcttcctgtgagtggactttctgggtcttaggtaaatgacaagatgattctgttttcccatttcagtcccagtttacactttcttatccaaggactcacaggactaactcattgttagtgcccccattttattctcaaaagtatctttgttgaggcagcattgtataggcaatttgtcacggggtagataaatgcttacctttaagagataatgcaaaactgttttccagagttgttgtaccaactcaatctccctggtagtgtataagcaatgctgtggatctgttgtcagacttttttgcttttaatgaaatggttataaaatgctattttatagccacatgttaaatatactttatcttttttttacattctaaatttcgtcagtgatacattataattgtacatatttatggggtacatgtgatattttgatacatgcatactatgtgtaatgatcaaatcagggtaattaggatatccattgcttcaaagatttgtcatttctttgtgttgggaacatttgaaatcttcttttctagctactttgaaatatccaataagttattgttaactatagtcaccctactgtgttctcaaacactagaacttattctttctatctaactatatttttgtacccattaaccataacctcttcatcccttccatcccctaaccagccttcccagcctctggtaaccatcattctcctctctacttccatgagatcaacttttttagctttcacatatgagtaaaaacatacaatgtttgtctatatgctctactaatgacttttatacttttacatgttttcatgatgttgattactgtctttttgcttccagatgcaggactcccttcagtatttcttgtaagaccagtctagtggtgacaaatatcttcagtttttgcttgctttggaaatactttatttctccctcatttctgaaagaatcattttataattctgatatgtatatatatcctttcttatataaaagagaaagcatgagataatgaatatgagattcacattagctcagataggagggaggcatagggatgaaatgtggagaacttacaattagctatcagttatcatcaagatctgagcaccaggcatggtggctcatgtctttaatcccagcactttgggaggccaaggtggaagaatcgcttgagcccagaagttcaagaccagcctgggcaacataaggagacctccatccctacaaaaaattttaaaattcgccaagtgtagtggcacacatctgtgttcctaactactcaggaggctgaggtggaaggatcatttgagcccaggaatttgaagctttagtgagccctgatcacgccactacactccatccggggtgaccaaacaagaccctgtctcaaattaaaaaaacaaaaacaaaaagaaaaactaaataaacaaaaagatatgaacattcactttggttggtattttctaaggatttatcagaaacaaataagcaaacaaatgcatgccatgggtatgtactgaaccaagattatgattaatttatttctgtgtacaagaaatccaatgaaaagaaggaaggatgtgaatatttgaaggttatttatagctgagggtagggagacacaagcacccctgtggccaccaacactgggactacactgattcagacccaaagctagcacagcactgggtcttacccaaggcccatggcgaccactgcctaggatgttccctcaaagcccaagggctctacagtcagcaggtgccaaatccagccaggcttgtggtcttgccttcagggggcaagcttcccccacccaacccagggcaggtccagaattgctgtctttgagcaagggcccaggatcaggaactttaggaatctacctggcgctctattctactgtggctaagctggctccaaagccacaagacagtcattcctactcttccctcccctttcctcaagcaggggagactcttcccatggccaccactgccccaggcttgcagaaaatactgcttggctactactgatgttcacttaaggcccaagagctcctcagtcagcttatggtgaacactgttagatctgggtctctcccttcagggcagtggactcccctctggtccagggagccaaggcctggaattaggaaccctaagagcccacttggtgctctaccccactgtggccgagctgataaccaagtgcaagacaaagctccctttacactctgctctcctttttccaagcagaaagagtccctccccatagccgccacagctgggaatgtgctgggtctcacctgaagtcagcatgggactaggtctcatccaatgcctgcagcaaatactgcctggctaccactgatgtttattctaggtccaaggactctttggtcagcaggtgatgaatccttccggaactggattcttccctctaggcagtgggctcccttctgtcccagggtttgtctagaaatgtcatctgggagctagaacctggaatgggggcctcaggactctgcctggtgctctaacctactgtggctcagctggtatccaagtttcaagataaagtcctctttagtctcccctatccttcctcaagcagaagaaaggaatcagagctgagagccgtgctgcctggagttgggggaggggtaactcaagcactaccttgtcatcccagctggtgtctcactaggttgtgtgtaccccaagtctactggcaagtacagcactgggacttgccaaggaattgcagtccttgtggcctagactgcctttcaagtttatttaggaccccagaccactttagtccagagtggcgatgctttccagaacccagtcgctgggatgcatgattcccctctgactagggctggtctaaatgctccctccatggacacttgccgatttctgccctgctttactttccaccgtgaaaggcagcactgagttccaatgcaaagtcccgcagtcactgcaccctctctcccccaacatgcagattctttctctgggccatgtggctgccgctgcggaatagaggaggggtggtgttggcaattcaagacagtctttcctatcttcttcagtgcctctttcagtgatatgaagttaaaaccatgtactgtgatcactcacctgattttggggtcttatagatgctttcttttgtggatagttgttcaaatttggtgttcctacagtggggacaattgctggagggtgctatttggccatcttgcttcctgaagattatttgtagataccactagatctgccctcaagaaaggttaaacaattcatattgtcacaaaaatgtataagagtatggatttcactgtgtcctaaattgctttataaggctaaagtgattggattggatccacctgggccatgatacacacctgagctgtggaacttcagtccctgatacatgaatggtaaggcatttgatcaacccttgccattctcatctttgcttgaggcctgctcactttggtgtggtattggagctagcatgcaaagcagggcctacagcatgtagctgaggggtggaaccatctggaatgcctctgccactgttgtctttaatggctttcagatgtgaagaggatcacatgctctccagctgtttttatgttcactccaggagcattgtctcaaaatttccaaaatattctaaaatcgggggtatagctcagtggttgagcatttgactgcaaaatattctcaaatctaccagttctgcaccactatcatcatgagtggtaacaactaatgtctagtttttgtttaaggtgccataattaaaaggtatgtaaatgaaagaagttcctcaaccctcagagttgcacttctttattttaagaaatcagataggtattcttaggtctccacccttcagtcatgggaaactgcatttcagtaatgtttaagagctccttttcctcccaaaaatgatacaagagtggagatggccaaggagaggatgtaccctaactggaaatttcagtcgtcaccaaagtgcacattgtccaagacctatggtccatttgaatgcagttgcttctgttctctctgtggtaagcctgagctgaggatctttcattaagagtctccacacagtccttcacaatgctgcctccatcaacaatcttgccatctccagtgagtcacatgggagcagaactaggtccctacaatatttatttgaaagtaagtaggcttttgataaataatctcacttccatacatcttgaagtcttgggaaatcccactctctttcccacccacactgcctcctttaatccttggagctcctcctccttttggataatcattcaacatgcctcagtttacctagttttcataagtaaagacctgggtaggttttttttggtttttgtttttgagacggagtcttgctccgtcacccaggctggagtgcaatgatgtgatctaggctcactgcaacctccgcttcccgggatcaagcgattttcctgcctcagcctccccagcagttgggattataggtgtgtgcaccaccccacccatctaatttttgttttgtttgtttatttgttttgagtctcactctgttgcccaggctggagtgcagtggcgcgatctcggctgactgcaacctccgccctctgagttcaagcgactctcctgcctcagcctcctgagtagctgggattacaggcgcccgccaccacgcccgggctaattttgtgtatttttagtagaaacgaggtttcaccatgtcagccagcctggtctcgaactcctgacctcaggtgtctgcctgactcggcttcccaaagtgctgggattacaggcatgagccaccacatccagccaagacctgttttctttagagggagagaggaatagaaaaacgccttttcatttttactagatgtagtgaagacaaagtaaatgaaacctaaaaagaaacaaacaaaataccagaagtgttaagacactgtcttgttgattctgccctcaaaatatggccaaaatctctccacttttctccagctcctttgctgttacctagttcaagctgctatcatcctgatgttatccctttcctaattctggtaattctctatatctccttaaaccaatctctgaatccccatttgttcgcttctaacagattctccacagaatagccagtaggagattttattttattttttattgtttttgagacagactctcactctgttgtccatgctgaagtgcagtggcatgatcttggctcactgcaacttctgcctcctggattcaagcgatttttgtgcctcagtcacctgagtagctgggattacaggcatgcatctggctaatttttggtatttttagctgagacagggtcttgccatgttagccaggcagttctaaaactcctgacccgccttgaccccgcaaagggctgggattacaagcatgagccactgtgcctggcccaagagggagattttaaaaacacaaatcagattgtgtaacatcctcaaatagtaagatatacaataataaaatgtaaaattcttatcaagatttacaaggcctataagccttctagtgttattccctattgctcttctctaggttattgacatgactggttttgtttgtttttaaacttcctctaacccttttctagctcaggattagtctacccttttacctaaaatcttcttttcctgcctaccttctggtcatgcctcatgtcttagctaaatgtgatctcctcaaagaaggctttcattgattacataatctaaatgagtgaccctgctttagtttctcattatatttactgtcattcttagcattgccacaatatgtcattatctatgtgttgacgtgattattgactcaatatctgtttcccccactgaccacatatcaccagtgcctaatgaatagcagatgctaaagaaattaacaaatgaaaaagaaagatgtggaactttgaatggtttaagttctatttaggcagacacacacacacacatacacacacagagagtagttattgtgggttatagaccatctcactttcctaattcttatctcagacactgaataactagaggcccagccattgccacagaatttttccttcatattcttgttgactgccttacttgaaagcaattcaatccatgtgtaaggattccgtaagacagtctgtcatgagacaaaggcaaaaatcccttggttctatttttgctaccatctgtgtctttttaaactcctcctatatgtggaactttttcattgctttgtttgacttctgtaaatctgctaaatatgtttacaagcaactttcacaacccttctccaccatcactcccactttgatgtcctaccattttagaactggatagatatttaagatgctcttaactttgcagaaaacagaacaaccaagcctcagagaaatgaagtgatttgccgaaagctacgcaattgtgattactcaattgtagagaaatagggtagggtgcagtggtttgcgactgtaatcacagccctgtgggaagccactgtggaaggatcgcttgagcccatgagtttgaggccagccttggcgatatagtgagacacccatctctataaaaacataagaacattagctaagtgtaatggtgcatgctagtagtcccagctacctgggaggctgaggtgggaagatcctttaagctcaggaggttgaggctgcagtgagccaaaatcatgccactgcactccatcctgggtgacacagtgagaccctatctcaaaaaattaaaatttgaaaaatttgaaaaacaattgtagaggaatagaaaacaaggtgaacttctaagaccttggcctttataatttactcccaaattttctatcttaaaaaaagaagaagaaaaagaatcagggaacattctaaatctgagagtgctctaatttttcaaaagatgtttaaaaagtcaatttttaccatcattctaaagaaagcaaggaaataagacctaaaaatatttaaaactcaaatcatctgtataggagaattttggtatgttctaggcttccttgtgtttacttttcatactgctttctgtaatcaagtaagattaagtgaaaattacctgggccacaaaactgcaatgaaattattaaagcatttatttaaaatattttcagtcaggtgcagtgtatcatacctgtaatcccaacactttgggaggctgaggcaggaggatcacttgagcccaggaggccaaggctgcagtgagctatgatcatgccactgtcctcaaggctgggtgacagggccggagcctgtctctaataaaaataaaataaaataaaataaaataaaatgttattttatctttaatctgaacaattctaggatctggcatctttgatgtttccaatacaatcaatttcaaaatatatgctgaatttctactatgcaaaggagtgttgtttagacctcatatgagggccaggaaggtgagctaacatggagacaggctgtatgagtccactctcatgctgctaataaagacatacccaagactgggtgatttatgaaagaaagaggtttgattgactcacagttcagcatggctagggaggccctaggaaacttacaatcatggcagaaggggaagcaaacacatccttcttcacatggtggcagcaaggagaaaaataagagccaagtgaagcaggaagccccttataaaaccattggaccttgtgagaactcactatcacaagaatagcatgggggaaaccacccccgtgattccattacttcccactgggtccctcccatgacacctagggattatgggaactaaaattcaagatgagatttgggtggggacacagccaaatcatatcacaagcattaagaagctggtactcttattataatgggagaggcccacatagccaaaaaaatcactctgaaatctatcatggtgtcagcacaatttgaacacagactgctgtaaataaaagaggaatagtagtctttgaatttaatactagaaaaaagtattagaaaagaaaattaaattctacttcagttcttcacattggtgaggtagacagcttcaattggtctttaaaaatatagactgattttctataaattatttttttgaaagctagaaatactttagaaatatgtcatcccaatcagaaaaaagaaattctaaaggaaggtgagggagaagaacaaacaagtaaatgtgaaattgtctcaaagacatcaggttgggtactgaattaagtttttcttaaaatcaaattataaagacttccagcaatttcactgctggaaatttatactgtgaatatcttcctatgtgaagatatctattgtggttttccataatttacagaaactgaaaacaatgttatgtattcatcagaaaggactgctttatttaactgtgttcaacacatgtcatagagtactatgcactcctgaaaatgaattagggagatctatagataccaatatgggaggaggtctaaaaaatattactaagtaaaaggcaaggaaaataactatatagaaatataaatagaatcctatttgtgcaataacaagagtgtataaatgtactcctcataaagcatttctaggaggatactcgagaaactttttttttgagacagagtcttactctgttacccaggcttgagtgtggtggcacaatcacggctcactgcagactcaacctccctgggctcaggtaatcctcccacttcaaccttctgagtagctaggactacaggcatgcaccaccatgcccacctagtttttgcaattttctgtagagatggggttttgccatgtttccccggctagtgttaaattcgtgggctcaagtttctgcctgcctcggcttcccaaagtgctgggattacagacgtgagccaacatgcctggccaagaaactcttattgagcatatctttggaaaatgagactgggaaattacatgaaaagaaatttttattttataccctctgtgccttttgattattttaaaattatggagaggtattacttttgtattactttttgtttattaaattcctatactattatgcatatatcattttaaaactatagttcttttaagttaagtttacttgggcaaatgtcctaatttcttttctcactgtatatctttagtttctatattccagtgactttgttgtggactatgtgtttgcctcagattttcccatctctaataatgtcatgaactggcatttctgaactttcatttttactattggactctttaatcctgcttgttttaagaagcattttgcaagttacacgttaactaagatgcagtacctgatttaaaggggacatacaatgcaatgagagagacagaaactatttttacttcataaaatccagttttataaaaagctctgttaataacactgagggagtgtgagaacacaaaagaaagcttactaaatttggctggggaaagaatcaaggaagatttctaagaagttatgccaattaagataaatcttgaaaagatgaatcagctggtacaagtataatacattgccttcatagatcattttgcaagacttagaattagtgaaatttagacatagaagagaccttaaataatattaaatgtaacattctcatttttaaaatagagaaatgtgacttgttaaacaacatgagctgtggggtcaaattcaatggccaatacagagtagacacttaataaatatttgctcccttcagaactggccacataaattacagggcccagtggaaaatgaaatacaaggccccttgttcaaaagttattaagaatttcaagacagtcacaacagagtgttaaaacaagcataggcccctctgagcacagggccacattgaaataacccacagtcctggggttcatgaagcaggcctccctccctcctctaatctaagtttcaaggggtaagtagacacagaaactaaacaagaactcaggtctcctttggatacaaagacctcaaaattttaaaagctcataaacaatctgttcacccaatatttttaactgaggtgatatgaagatctcatatttatctttatataatagttaataaatttgtgcctttattcattcatgtcacaaatatgaataaatgtgtcccaagagcctaggacaaggctggttcataataagtattcagtgaagagtaggtgaaggatggatgaccagatgaatgagtgactaaacaataagctacaattgagtattattgcccataaaaagaaataaaattttgatacatgtaacaccatgaatgaaccttgaaaatattatgctaagtgaaaggagacagacacaagagatcacataacatataattacatttatatgaaatgtgtggaatagtcaagtctatagagacagaacatacattagtggttgctggggactgggaggagggaagagtaaggagtgactgctcatggatatgggtgttttgttttgttttgttttgttttggaatgatgacaatgttctggaataagatagcagtgatggttgcacaactttgtgaatgtaatcacaaatatcatcaaattctagactttataaagggtggatattatagtatatgaattctatctcaatttttagaatgtaaaacaataaattaaccaggatagaaagatttaagtaacttgctaaaaattgatttgtgttacttgtgatgattatgcatctaacatcaaaactttggctcctagttcaggctttctccagtctatcaagctactgcacagaaaactgcagagtgccaccagctatctctatggctccatggagcactgtgcttacatacaagaaacctctcttgtaccaaagtgtaaacacagtggtggctgcattctgcctccagaggatctggcctacagagtgaagaataaaggggagacagagcaaggggagagcactttccaagagcttcctcattttctctgtgttgtcctagacaccacccactagccttgtatctcaggtcttggttgagaaaccaaaataactaatgacactcctatgatgccttggcagcattccctgataacttagaatatttatttcctgttttcccaactctcatttatttccatgctagcatagagcaagatgacgtgtaacctcttgtgaaatgcttgatatttgtcccttagaagagacattagtactatacatttagcaaatagtaaaataacaacactcatagcttgttcttgtgagtaatatgtgaaagttttctaaactgtattttagttttaacttacattcgttacagcagagtgaggcaagcatcatgcattctctctcttttaaagaaaaagcactaaaacttccattttttcacttctagtttatgatcctctcttcttccttaccatgagaatcaataagggtgggtggtgtgaacacatgttttttgtcctgtcaggaaaagttaaaggttatggtcctgctcccaaatgatagataattaatcatctttaaaatggcaacctgtcactggaaaaggaaaagcagaaatataaaataaagcagatatatgatatcaggtagcaacaaggatgtcacagatttaatgagtataggggatgttgtacaaaaagttttatactaatctctagaaacaaaagaaaaagcagaaatgatctatatgttcatagtctatatggccatctctctaattttgaaatcagcagtcattccttggttggcatctgctacttgggagcagaggatggaagaacacagcaaacaaaagtttcatcgttaagctgtgaagcagagggaacaggcagctagccaaaacttatgtggttcttcaaatttctgatggggatcagagtgcctctccctcactgacaaatatggaatggaatgtaaggttgctactaacagggttctctgcaatcctgagattggttctgttctagccaaagctcttggattcctgtaaactccagtccagttgaaacttcccgggagaatgtgcccccaccaccccgtgcagaactcctggacatcttagtgacagccccacccccaccactagtcttcccagaattcgagctgtgagaacacatcaattcctgactcaggcatttgagtcaattttcagtgaactcaggatagtagaatggaacaccatctcacccaccagcaatccctggctagcacatgagtgggaggaaatcatgggctttgaaatcaaacaaactcaggttcttacattcactaattacactcagaaactgtgtattctttgtagaatttgaaagtgttaacctcattgagcgttacttccctcagctataaaaaatggatataacaatttttttctctgatgttgctttaaaacaaagtgagataaagaatgaaaatttccaatttacaaatatttcttaacaaagcgtagatttgttcctttctattccaaagctaatgacttcaggtgaaatggtatcttgagagtggggggcattctgaggaatcagtctcagaccaaattcatgtaatcagttgaaaacgtcctgtttgattagtccctttaaactctttatgtgcctttcctgtcctctaattcagtttctaaacttttgttcagtatcacatccctaaagaagcctttttagacattttttctgatcgtcctctcctccatgagatttaatgccacagagacaccattatgttgtttgtgaactgtatataggtatatctgtgctttatacattaaaatagtaagaaaatgttaaaccccccaagaaccaattttcaccctttggtggacaatattgttcctattgagaacacatggtctataaacaaacaaaaagttagaagaatctttgaagagataatcttttaaagcctgtgaaagaagacattattgaattcttctgaagaacagagtcttcccttcatcatctcttaactattagaggtagaaaactttggcgaagttttaacaatttcttgatttcctatgtttagccaatgatgttcaggtcaacctgttagaaataaagaaagaagcctcagatgcaaaaaagtaaatgatgatgctaggccccaacctactgatgtattgttttctacgcagagtataagatatactatctgcagcataagtacagtaataatggagctaaacctcaaaaaattagtcccacatcacttgactaataggtttctactttactccatgtggatgtccagattttgcccaattaaactttcatttcttatttaaaattacagctaatacttaccattgaaattttggggggaaaactttgctaaactgcagtgtttatttgactttttaaataactgtgatgctgaacagtaagaattaatttgcacacagggcttctaaaaagtgggccacttcttattttgagaaaaacttcaaaattatgtaataaatttcactgagaaataaaatattgacataaataacaatagaacaatatcaagtttttggtaaaataaaaagttattcatgtgaaaaataaaataatagaacaatactaggtgctggggaggatgtggagcaaccagaagtcttatacactgctagcaagaatgtagaatttgaaagtgtcaacctcagtcactttggagaacagtttgacaatttcttaacacgttaaacatacgtgtgccttgttacccaacaagtctactcctagatataggaatttacccaagagagatgaaacataagtccacaaaagacttgtacataaatgtttatagcagctttgttcattatagccaagaacaaattatgatatatccatacaagctaatactactcaacaataaaaaaaattactggggccgggcgctgtggctcaagcctgtaatcccagcactttgggaggctgaggcgggcagatcacgaggtcaggagctcgagaccatcctggctaacatggtgaaaccccgtctttactaaaaatacaaaaaaattagctgggcatggtggcgcatgcctgtagtcccagctactcgggaggctgaggcaggagaatggcacgaacctgggaggcggagcttgcagtgagccgagattgcgccgctgcactccagcctgggcgacagagcaacactccgtctcaaaaaaaaagaaaaaaaattactggataaatgcaacaacatggatgggtctcataaacagcaagcttagtgaaagaagccagacacaaaagtatacatactgtctgattccatttttatggaatgctagtaaagacaaatctaatctatagtgacagaaagcaggtcagtggtgcctggggccaggggtggtgagtgggagtgttgactgggaaggacacagggaaattttgggatgatggaaatgtttatatcttgattgtgatggtggttgcatagatgtatgcaaaaaaaaaaaaaagaagaagaaaaaagaaaagatacaagaagtcaagaaagaagccagtcacagaagactacattttgtattatataaaattccatttatatgaaatttctagaaaaggcaaaacaatagagacagagaattggtcaagagttatcaattggatacttaaatgggtacataaaaaaacaggtcaaaatgttgttaaagattcaacaattcaagttatctgctgtgaaaatgccataaagagttagtatctctagaatcattatagcagtcatcttctagtgcaagtcccagtaccatttttaacagccttattgaggaataatttgcatatcataaaattctcccattgtaagtgtacaattatagaatttttgatgactatatatgattatgcaaccagcaccacagtccagtttaaaacatacccatcacaccagaaagttccctcacacctgtggcagtcaatcccctctcccaccccagccaaccaccgaaccaattctctgtctctatagttttgccttttctagaaatttcatataaatggaattttatataatacaaaatgtagtcttctgtgactggcttctttcttgccttcttgaatcttttctttttttttcttcttttttttttcttttttttgagacggagtctcactctgtcacccaggctggagtgcagtggctcaatcttggctcactgcaacctctgcttcccgggttcaagcaattctcgtgccttcagcctctcaagtaactgggactataggcacgagccagcacacctggctaatttttgtatttttagtagagacagggtttcaccacactggccaggctggtcttgaactcctgacctcaggtgatccgcctgcctcggcctcccagagtgctgggattacaggcatgagccactgcacctagcccttctttttttttttaataactttttttttgaaatggggtttcactgtgttgtccaggctggtcttgaacttcttcctaggctcaagcacccttcctgccttggcctcctaaagtgctgggattacaagcataagccaccatgcccagcccctttttgttttcttaagatgaagaagttctagttatgggacttgtaagagacattagttgcaggtccagagcacacatttgccgattctcagtccaggacttagctgtgacaccatgctattgtcaggatacagtatactagatacaggatactagaataggaaaaaaataaacctggtttaggggatcagaatggctatttctagccatccaactcaacttatctgagattcaattttcccttatatacaatgaggataataatgtctaatgcatagctctgttgtgaggaataaattaagtgtacagagtaccaaacatagagacaggcaaacattaggaatttaataaatgataattgctgactagaaaatcacttaaagtacaaatgttcatcttgagacaaagaacataaagagggaaagtcataaatgttggaaactgaagattagggtttaaacattgacttatttaaatctcaaaagaagcatgaatccctgccaggcatagtggcacacacctgtaatcccagcaactctgggaagccaagttgggaggattgcttggggccaggagtttgcccaggaggcctgggccacataggaagaccccatctctacaaaaaaataaaaatttaaaaaaaatagccaggcgcgtgatttttttaatttacacgcctgtagtcctgtagtcccacttgtagtcctgactactcaggaagctgaggctgaaggattgctcaagcctaggaattcaaggctgcagtgagctatgatggacccactgcactacagcctgggcgacagagtgagaccctgtctcaaaaaaggagaagaagaaggagaaggagaagagaataaggagaaggaagaggaataggaagaggaggagaatgaatctcacagatttaagacagtgccagctaaattgggaattatttgctaaatgtagttaactgaacattgctttatttctttgataagaggaccattttataaataagctgggtgttttttttttttttttttgcctaattttatgagtgactcaatagttctcaggcctggctgcacattagagtcacctggggagtgttaaaaattaccaatgcctgggacccagcccagaaattctgatttcatcggtctggaaaggggctggggcattggtgattttaaagtttctcctggcaatattaatgtaaaaccattgtaaagaactcacagcagcattaacagtttgattctctgggtcttagggaatgtgttcaaaattgtggggtgaactgtctttagagtatgccactctgacatcttagaaagagacaaaccacagagactagctgtacccacccagatgttctatccacagatgatcttttcttatttttctacatggtgttgtatgtttgtgcaatcaaacataagggctttgcatgaatgacattagctatgtctgctcggaaaaaggaggttgcccttcacctccacatcctgtgctgccacttttcttttgagtcctcggtcagagctgggtgtttaaacatatattctgggtttttttttttttcatcttttattttggattcagagggtacacatgcaggtttgttacatgggtatactgcgtggtgctggggtctgggacatggatgatcctgtcactcaggtagtgcagaaagagtaaacatgtattcttaagcaatacatgtatatctcatgagtcacagcttcaagaagacaaatacaatctgcatggactggtgctctaattaaaaactctaaagactcaggaggcctggataagtctcctgccctctttggtcttcaaatatttaatttgtacaattaatggatttccttttataaccctaaggtattttccagttactatgattcactggttgtaattctcataactaatataataaagagcaaattctttatatagcatccatttagaactctactactagtactaaacaattcctaaaataagggtttatatctctgttaaagtcattagtacatacacataaataatatcttggtctttgactagtatatttatttaccaagaaatgcaatggcttaatctatactttccagaaggaactgactgctgtcatcgaggaggaatagtcacataaataaattattgttcttcacacatagtactcacaaaaccttagttaattgattattcaattatgatattgtgaaactgtaacatgacattaatcattacctggtgaaatgatcatgggcctttgtgtgatgctgcggcttcctgggaaactcactaatgtattcacataaaccagatgtgccagaagaaagctcttgctgtggaattgatggagagtttgtttaaagaaaggaaaacaactctaaatagtaaaataaatattttcttctgcctttgggtgaccttatgctcaacctcttcccttatgagaatgctgtctccaagcctgtggttctatggcatgtcagtaatctgaaaagtctatctgaagtccagcagtgggccactgcccagcctcacaagcctgatttcctcttcttttctccacaaacacccacatacttattagctccctcagttcttaaaatggattctttttatctaatgccaacttatcactgtatatcaggtctttgaccctgaaatatctttagtaagtttgcttttctttgttgctaaggcaaagcctggcagatttacctatcatcaagaagctctgatttgtggtggtgctaagtttggaagaaatatgaatcaatgaaataacttacctgaagtaagagtcactttaaattaagtttatcagcccagtcacttgtaaaggtttgaagacaatagtcatgatgtaataaaagagtatgcaaactcaagagtttagatacacctcaagcatataatagagtaacaaatttcagttatgcaagatgaagacgttctagagttctgttgtacaacctatagttaggaattctccctcctcagcctcccaagtagctgggactacaggcatgcatcactgcacccaggtaattttttaaaacttttttgtggagatgagctctcattatgttgtccaggctggtttaagagcgttagtgcatcatgttatggttaacaatcctaaggaaacaccagtagggcatcactctaacactgccatggagctatctgaaagaagctagaggctattaagccaaatgcaaggtgacacacacagaggccatacacactaaccacaacctgagagcacctgagataggaaatatgtgttccaggaaggggcctatctgggaccatattaccgtgtgttttcatgtccatttctgaaactaggcctactctgcatgactatcttaatctcctcaggctgccataacaaatactatagactgggcggcttaaacaacagaagtttatttctcacaattctggaagctggaaagttcaagctcagggtgccagcatgctcaatttccggtgggagccctcttcctggcttgcagacagcccccactttgttgtgtgctcacatgatctttccttggtgcatgtatgtgaagagagggctctgtctgtcgtctccttttaagaccactaatcctatcagattaggaccccattcttatgacctcatttaaccttaattacctcctaaaagttctctttaaatacagtcatattgagggttagggcttcaacatataaattttccaaggacgctattccgtccatagcaatgatatagcaacccacacagactatccctaaatgtagaaatcagtgttactcttcaaagcaacacatttttaaaaatatgtcttccaaatgccttatttttgacaacggaatcctttgtccaaaataaattttacaaagatcctcagtatataatataataaataaatacactggacagtaagtttgggaaatgtgtttgatctgtgtagggatgtacagttgtatctgcactaaactagctctgcaagaggatacagaagagatttcaaagagctgtcatcctaggtaaatggcccagatacatgctccatgaaccccctcagggaaacatctttgctattaaacaggataatctgtaagcagagccaaaaaggactttggatgcaagaagagaccaggggatgtctcatcctgagtcatcaggatatttctcaggaggatttaagtaactggtcttacagttaaagcctcctataaaaatgtactccatttagcatttaactaataaaaccaagtacctacaaaactagaagctttatcccattaaggaacctttcaggacttggtgtttgcatgaaacagaaagtaatcattgctataggagagtccaagtctcttcatgaaatcattttaaaaaatgtattctactgtggtcaggagaactcttgcattatgcatattttgctaccaattagtcttggtgaagaaatggcccagttttctcactggcaaattaaagggtagattaggccagtgagtgtcaagctttaatgtacaaaagaaatcgttaggcagtttatttattattaataatatgcaggtttttaacctgtaggccccacaaaaattttgattcacttgctctgtgacaagattcaggaatcttaattatttactggcaccctattgattgtgatacaggtaatcaatagattcctcactacacacacacatacacacacacgaaaaaatgaaatgatgatctttaaactctttctgtctttcagatactataattctgtttttaaggttcatataagcaaagcaggatattaggcctacattcctgacctatctgccaaagaattattaaaaacaaacatcttttgctcactctaagcacactggatgatgccattatgataaagtccaggagagagaaagagatgaaatcatgatgtctaaactatattcatttttgtgaccttcatcctatataagctgctttccaccttaactgtgcatgttcaaaacattgccccaaggtgagagaaaattgcttggaatgttccttcatcaacatctgctctctttcttctggccctgctatcaaccccgtctctgtgaaatctcagaacctgaattccagtatttagattaaagaaaaggggcttctctgctgtctcttatctctgattccatttccaaggccattaatatatttcaggcagacagatttttgttttacagactatttctttttctaggatgttcccagtcatttagaacatcatccatatatccaggccatctttctgtgatcaccatttgttttcagttgatacaaatggagtttaagacagtttccttgaaggcaggaatgctgtgtgtgaattgtgactctatgaaaagttacagtgaacacaaaagctaacactttgtaagaacagtactctgcaaggggaaatggagaggacagtataaacatatgatgtctgaattagcaaatgaaacataagtttatgtgatgatccaatggaaggaccaggtaactgaatgttttcatggagtttctcaactttggaaggaatcagtgaatgaggaggaattaatgacctcattgggagattttcagctggcttcttctacactatgagaccatctccaggcttaggatgagtttgcttagtatgatcatcctaggacagtccctttgctgcctggttttatcccaactgttcaaagcagcttcattaagattttttccctgagagaactcagattggagcttcatcaaataccactagcctttgactttctgcagagaaagttaatgaatatagcttggagccagacaaattaattttttacattttctgtttatttttaactcttgtttcaaaagggtagagagagtggagacataacaatcaagcttttacagccaaaatccaggggtgaggtcatgtggtcctagaaaggaagtgtggggaaaacattacaaacattggcaggatgcttcccccatagcattatcacattgctttgtgactggtatttaatagctatcctttctcagactagaagctccgctaaagaagagaccaaggcttcaataatcaaaatctagcagagtgctttagcacataatggtagtttgtagcatgtttaacttaaaagactccagctgaatggacacttcccattcaagtataaaaaaactgtaggaggagttgggcagatgttagtaaaaggatacaaagtttcagcttggggaaacaagttcaagagagctgttgtataatgtgattactatagttaataacaatgtattgtacttttgtatactacatatgacatttttatttgtccattaaaataaataaataaataaatccatgtacaatatattttggaggcttagatattttttttaaaagggaaaggatatttttagtatatttagtttccccctcttttggtctttagttaatccttaacatgtaaaataattgacaggtgaaatttttgtggcttaaggctaaagcaaacctaccagcctttgggcttttatgacaaattttccctcctatcagaataaatgtaatagtaaatgttataactgaaagtctaaaacagcgtgttacacaacattcaaaattatacaaatctttggaattcttagtggaaaaatgactaaaaggaaaggaaaatggaagagtgccaaaaattgctaataattataaaccaattggaaaaactacaaagtatatttaaggctgcaatctggttcagactttctcttctttgccaccagttcttgagctgagtgaagaagtaatgtatttggatgcatacaattcattgtgtgatatttaggccacttaattagagcaaacacatagttttatcaaaaaactggggatgcttttgtgagtgaaaaggggcactaaagaaggcctgtttcaaacaacccaagatatgtggttgctgtgctcttcatccacttaaggggcttctttttattctatgtcatttgttcaaaatgctcaatatttgctaagagggagatcttaattcaactcccacagtgtgccaggtagaggtgaacataagtctccttcaaatacccaattgcagctgagctgtaaggacatggtccaaaacagtgtattccaaaacgtgggatacaccactgtgatagttaatactgagtggattgaaggatacaaagtactgatcttgggtgtgtctgtgagggtgttgccaaaagagattaacatttgagtcaggctagggaaggcagacccacccttgatctgggtgggcacaatctaatcagctgccagtgcagctagaatataagcaggaaaaaaaaatgtgaaaaagaaagactaacagcctcccagcctacatctttctcccatgctggttgcttgctgctcttgaacatcagactccaggttcttcagttttgggactcggactggctctccttgctcctgaacttgaagacagcctattgtgagactttgtgatcatgtaagttaatacttaataaactctcctttatatatgagcagttcttaaaataagattggaaaacagattttcttattgtaccccatgatgttaagttttctacatagatgtctgcatggttcatgtagtgttattaacagaatacctgaaatgaagtatttatttaaaaaaaaaaaaaaagcagagaggtgggggttggcttatgattctagtggctggaaaatttgagactgggcatttgcatctggtgagggcttcaggctgtcctcatggcagaaagcaaaatggggagcttacaagcacaaagagagggaaacccgaggaacatcctggctttataacaacccactctctcagaaacaaatccatttttgagagaactagtccagtcttacaaaagtgataatatggtttggctgtgtccccacccaaatctcatcttgaattataacttccacagttcccacgtagtgtgggaggaacctggtgggaggtgattgaattatgggtgcgggtgtttcctgcgctgttcttgtgatagtgaatgagtctcacgagagctggtggttttaaaaatgggagtttctatgcacaagctctctctttgcctgctgccatccatgtaagatatgacgtgctcctccttgcctttcaccttccaccatgattgtgaggcctccccatccatgtggaactgtaagtccaataaaccactttctttggtaaattgcccagtctcaggtatgtctttgtcagcagcatgaaaatggactaatacagtatattggtaccagtagagtggggcactgctgagaagatacccagaaatatggaagtgagtttggaattgggtaacaggcagaagtggaacagtttggagggctcagaataagacaggaaaatgtgggaaagtttggaactccctagagacttactgaatgactttgacaaagtgctgataatgatatggataataaagtccaggctgaggtggtctcagatgaagatgaggaatttgttggaaactagagcaaagatgattcttgctttgttttagcaaagaggctggtgacattttgcaccttccctagagatttgtggaactttcaacttgagagagattatttagggtatctggccgaagaaatttctaagcagcaaagcattcaaggggtgacttgggtgctgttagaggcattcagttttataagggaagcagagcataaaagttcagaaaatttgcagcctgacaacactatagaaaagaaaatcccatttgctgaggagaaattcaagctggctgcagaaatgtacataattaatgaggagtcaaataatccccaagacaatggggacaatgtctccagggcatgtcgaggtctttacaacagcttcctggaggcctaggaggaaaaagcagttttgtgggttgggcccagggtcccatgctgtatgcagcctagggacttggtgcccagctgctccatatgtgcctgaaaggagccaacatagagcttgggccatggcttcagagggtgtaagccccaagccttagcagcttccacatggtgttgagcctgcgagtgaacagaaatcaagaattgaggctttagaacttccccctagatttcagaagatgtatgaaaacacttggatgcccatgcagaagtttgctgccagggtggggccctcatggagaacctccactagggcagtgcagaagggaaatttggggtcagagcccctacacagagtccctactgaggcactgcctagtggagctgtgagaagagggctaccatcctgcagaccccagaatggtagatccactgacagcttgaactgttcacctggaaaagccacagacactcaatgacagcccgtaaagggagctgggagggaggctgtaccctgcaaagccataggggcagagcttcccaagactatgggaacctacctcttgcatcagcgtgacctggatgtaagacatagagtgaaaggagattattttggagctttaagatttgactgccccactggattttggtcttgcatggggcctggagccctttgttttggcaaatttctcccatttggaatggctgtatttacctgatgcctgtactccccattatatctaggaagtaattaacttgcttttgaatttacaggctcataggcagaagggacttgccttgtctcagattagatgtcggactgtgaacttttgagttaatgctgaaatgagttaagactttgggggactgttgggaatgcatgattggttttgaaatgtgaggacatgagatttgagaggggccaacagtggaatgatatgacttggctgtgtccccaccaaaatctcatcttgaattgtaactcccacaatttccacatgttgtgggaacaacccagtgggaggtgattgaattatgggggtgagtctttcctgcagtgttctcatgataatgaatgagtctcacaagatctaatagtttcaaaagtgggagtttccctgcacaagctctctttttgcctgacaccatccatgcaagacatgacatgctcctccttgtctttcaccttccaccatgattgtgaggcctccccagccatgtggaactgtaagtccaataaacctatttcttttgtaaattacccagtctcaggcatgtctttatcagcaatgtgaaaacggactaatacaagcgattaccagaagaacagcaccgagctattcatgagggatccacccactagccaaacacctctcactatgccccacctcccaatactgcaactctggggatcaaatttcaacatgagctttggtgggaataaacaaacagtatccaaaccacagcaacatcttatgttgctttatgcacaagaagagaagtttatttaatgtttcttgcatataagacgtgaatgaggatccataccagctgacttaaaggtataaaggagaaagaataggattggcacagtgctggtctttatcatttcttagtaatagaagaaaatcattagaaaggtcactttctgaggatgtcacctttaaatcctttacactaccatctttttattctttacttttcaaattaaggcacaagaacaacttgtatcccttaaccaaaattattttcccatattttctagcattttgttagacctttccaaactcttatctcatagccaattgtacttaggaccgtggttccccaggtagacatagcccagcgtatgaaaataggctcagaatatctagagtgctggagaccatgacttctcagattctgtaaacacactaataataccacagtttagctgactgagttataagcatcaaatcagactgagcagaaatgaaagtgagttttgtttactttactggcaatatgtctcttgtgggagaagataggctggtaatattaatatattattgaaattaataagtacaagacaagctaacatttgtagctcatttggcctttatttgttctttgatgagctatggtgccttattttattcgtttatgcttttctcatttttgttcactaatgttcatctctgagattgatctcttgtgaaaaaaggcctttgatataaggttatagtttctattaaatgtaagctgactcatagggataggttttgagaagccagtcttgcttaaaaagaaattttttaaaaaactggtgtgtgtgtgtgtgtgtgtgtgtgtgtgtgtctgcatgtgttactatttagtaaagtatcaaagagaaatgtagtggccttggaaatggagagatgatagaccttgtttgagatgaaggaagtggaatcctcttagaagccatgtatttaataaatggtacaacctatctaaactcagcacaaatatgttcacaaaattggtcacatttttgttacttacttgaccctcttccctaacatgggctattagtactaagcccagtttctgcctttggtacaaagtctcaaatcttctacttaactgtattgttcaagaactctaggaactgacttttttcccagtaggctagtcctgcttccactctctaagttaagagtctgattggatgactagtgccatatttccacaatgccatacactgtcacagctgaagatgggtcttacaaattctaaaagctctttgcagtcatggccttgctagctagagccttactagcaccagagtgaaagacaaaaatagggctttaaaatttcagctctcttatgccattttccacaaggctgacaccagtccagatctgctgaattctaaaaaaattctgccattggctccatgctgggccataataatcactgaaccccttgaaccttggtcactatactagatgcctcctctcctcaaggttggtttcattccatgagttttgttacttttcccttccaatgcaccttccaaatttcatgtccacctgtcctagtcaatttaggctgccaaaacaaaatgtcatcaattgggtggcttaaacaacagaaatgcattttctcacagttttggagcctagaaatccgagattagaatgccagcatggtcaggatctggtaaggacactcttcctggcttgtagatggctgccttctcactgtgttctcatattcagagagaatgtgtgtgcaagttctcaggtgtctattcttatgagggcactcttttcatcatgaggtctaccattgtggcttcatttaaacctacttatctcccaaatgcccatctctgactgggggttagggcttccacgtataaatggggtggggggtggctgtggggcaaaattcagtccatagcaccatcctagtttacaacgacaaatcttcgagacttcaaacatgtagaattgtaaccaatattttgtcaagggaatccataaaaagccaaggtagataacccatctgaattcaatgccacttagtctttttcaagtctaatcatctgaaatagaagacctttctgcatctttaattcatggcaaagccagagatatctgactacactgattacttcccacctgggggacaatgagtacaggagagcttcatttcaagttctaggcattcttcttttctttttgagagaatttgtacaacagagaattttgagaagctggataaaatgcccaaaaaaccaaagtgggtgtcctagaaatatcatgagtacattctctatggatatactatgcttcctctcagaaaacaaacccactattatctcaaccccagtgtcgtttgtccttcagaagataccttgcttatttgtcctttagaatatacaatgacttattctaattttcttttatctgtttaccccaaagacaaacaaataccaatggaatctgagagtttaattgtcaagatgcatccacatttatcaaataaattactgagtttgaaaccaaacaaggttgacaagtcctcatttagtaaccgcatctggcatggtatgaaatgtcttgcaggctttcgtggtaatgaagctttgaagaaaagtagtgttcacataggaagtctaaccaaaaggaaacttggattaaggtcaaaccatccttgccctagtggcttgaggttgttcctctttgtttttcttgagctctctagagagggtctgaccatattcttccgcccctaactaccacatgtagaatcacagcattggcaggggacttggtggtcagctaatctaaacctttatttgagtcacaaattcctccactgttgtaatgattgacagagatggtctagagtacaaatgaatgtctgcatactctgagtcgaaatagttcaaagttaaaaacgaagttaaaatggttaaagaaatgtttttttcttccaaaattgattttaaaaaataccttgataacctcttggaaaacaaaattgaagtttagaattctcagaccccttggcattctactctagtggaactatatactatagtggaaacactatagtgatgcaaggaaagctagtcctggctcagactgaaagtcctctcttttcaatctcttttgtgatccattctacactatatttactgtgtctcatatgtgttgtgtctcacactagcccacaactataagttcaatccacataacttacaaccagtggccccatggccacctctcagatctaaatgtatgtacctttgagagagcagatcttcacaggccctgaacaaggaagttgggcatggaatttccagacctggattctccagtttgtggtcaagaaggaggaggaagaagaggagtaaagcaaagaagatagggccagaggggcatggccggaatgaggctctataaatgtgagaactatggcacatatcccgttgcccaagtataaggacagtactatagtttatcaacaccaggagttgtcaggatattaacacacttcagaattaaaatagcagcatatcactagaacaaattccagagtcaagcaagattttgccttcagacttcagcagccaaaatgtgctagttgggagagtgcaattccagaaccgaggtttagttccaagagcccctgaagttctcctctcctggagacttcaggaaaagtctccttttaggtcttatgtgggttccatgtcagggtccccagtgattctgagtatccagtgtaagtcttagctgaatcgggcctgctttcagcaactgtcccaagatgaaacccaaagaaatatatgtcccactgccatgatagattttgaatgtcttttctggtcagaccaggctcattgttcttctaagacccaagacactgcgccagagagcctaaatccatgctgtggagaatatgtgatgcgtctgtattagtcaaggttccccagagaaacacaaccaatggatgagagacagaagtgggagagacagacagagagagatttattttaaggaattgactcacatgattatggagactagcaaattcaaaatctggagggtaggtcagcagtctggagaccagggaaggtttgatgctgtagctcgaggccaaaggtagtatgctgatagaattttttctttttgaagggaaattagtcttttttctcttaaggcctccaactgatgggatgaggcccatccacaatatggaggtaaactgctttatttaaaggttgctcatttaaatattaatcttaaaaaaataccttcacagccacattagactagcatttgaccaaatatctgggtaccatgatgtagtcaaggtgacacacaaaattaaccatcaccagctccatgacagctaatttgttcttgaacacaacagcaggtgatgctactaaaaataagacgttgtttgccacgtgctattacattttgtaaagttctatttgaacatgttcctcttactacctacccaggaaaataccagtaacctaggggaggcccagcaggctctaatggtctaatggtctgaaacttcaggctttattttcattccaggctgctggcaggcaaaaatgtttagtattgaaaagatatataacctctgtggggtagcagctttactaggcatgaccacatttctacaggaagagtttgaatttcagttttcaggaaaccctatatttggcaaatttgggtgatatgtcaagccccataaataaaagcaggccaggttatatataattatactgattacctttccagtccactttttgatgccagaacctgaggtagtatatttaggtattagtttctcacatgttgctctcctctatttccttcatactttgcatcagaaaaaaaaaatgtttctttctctctgtctctctatctttatgtatgtgtgtgtgtgtgtgtgtgtgtatatatatatatataatggtacactgaaaacaacttgttctgccaatattcgaacaactgttttccttgtgaaaatgaaaggcaggtgtagaagagatacctcttagactcctctcaattccaaaaatgtcaaggaaagtcaggaactttcagtgaacatataaagtagcctcaactgtcagaattgaaaatctccttgagcagtctttagaccaccacacatttctagtatttgcttgccccatcttaaaggatgggaattttctgtattacagtgaaaattcaatgtctaaaatcaaaatcagatacagcacctttcctatgagctctggtaaacattggcaagttgcagaagataaagcctgacgtcaaaggaaattaagctaacaacgtgagctcttctcttattccaatcttacctccttggtccaaattccctgcttgggaccaataccaaaagccaccagaacttttctttcctttatttactgatcacatactatataattaatacagctctataaatcatgaaagtccttgtcttggaagaactctctgtttagccctcggaaaaaaaaatatgcacataattataacatgtctggttaagtaacagatttatgcagcaatagcatggggacaaaggaagggcattggaggcactaggcaacatgctttcctggaaggagcttcagtgatgatgtctgtatcacatggtcaaaggagcagcagcagtgccattagcagcacatagtaccaccaaggtgatgctggagtactcaaccaggacagcttccaagtggttgcaagccaggaggcctaagggaccaggaggaagtgggagttgggaaataccttgatcatctcctccattttgagccaaagttcttgacttaatggagctgcaatttcaacagttccccctaatgagagctgggatgtggaataggtgttcaataatttgcatataccccaagctagcatgcctgagaaaatacttattctgttattttcagagacttccagataataccccatttcaatgaattcaacttagaagtttcaaaaaagttgcaccatatcgtagtgcttgaaggaaggtatttatcactgaattgtagattcatatttgtagatgacaagtttttaaggaaaacaatgcccctaatcactgatctcaagagtcctcttagaatagtcagtgggtcaacggagtggaatctgcatgacattcctctcactagcccttaggtttctacactgaccaaatagtttaccagactttcacaaacctagcaaagtcttatctattcacatctacatatagataaattcacagcaaacttaaatgacagacaattgtacaatcacgatcagtatgtgttaactttttttgatctttcaaataacttggtcattatataatgaagaaatgtatgctgggttcacataccactgagagctataaagaaaatatgtcttgttttccctgtgactggcctgacgttcctcaccagcccccttgcctgcatagcactgcagtatgtgtgtatgtgtgaggagatggtggagggggtacagacctagtttaatccactagtcgtatctgtctctttaggtaacttagtttcatctgggattactcataaaaagtttcagagcctcctttcctctattaagagtgagcaagaagttctgacacaaaatgtgcttaagagcagggcagtcagtcacaggattattgctctattacttctctgtctgcagataacttgaaaccatcctctctccttgctttgaaaagcaataaaattcttagccataccctctgatcttccaacccacttgctggtcggttcttttctctctgtcttctccctataaacaggttttttatctgcctcatttggtagcttcgactgccaaatcttactccgtatgaatttcacagtggttttcttccttactgcataggcctactcctcccaggaactctggagtggctgttaatggtggcctaaagcatccattttcctttcttcctttccaacagaatggaagatatccacccctttctggccaggtatctacttctttctgactcagcccacaacctcaatagcctgactagccaaagagttatctaataacttttcccactgttggttctggagtgaacgtgtgacccaaatcaactaaaggtctccagaggaaacgtttccttatgcttgagggacctttcaggaagcaagtctttcctacaccagaagtggaagtaaaagcatgtagccctgattgcagctggcagctgtgggaaactgtcctcagaatgaagcctgtgttcagcagaacctagagctgaaaagcatctgagtccatgaacctgaagcccagtgaatctatgatgtatagttacacgagtcgatggttttcaacatggcttaagctaatttgacaaacttgtggctgaaagtattctaacagacgcaaacttcgttggacattttaaagtatgtactctgtggaaaagcaactgataattgccttttttagttataggtgcatgaataattcactctgcctgagtgttcttgaaaaatgtggaaaaattgttccttatatatccacttgtagaccctttacctttctatattatctcttaatggcctcatctgctcacgtaaataacttaaaatttaatctctacatttaaaggaagactatttcatggtaaacccctgagaagaaatttttgtgcttttagcatgctcaccatttacaggtaagaagacaaaaatactgagaagaaaaagatttgctcaaacctacaaatttccataatctaggtaattgtcacaagtacaaatcactgtaggacaattgagcaaacatacaaaaggttgtgactttgacaagctggatccagattcttaactttgccagtacaattctactttggtgatatatgaagattattacactatcaaaaagagaggtccttggggagactgtaagctattagtttcaaaagattctcatcttcttgaagacagatgtaggaaaatcatattgaccatgcttacagtagagtaaaaaaaatagccattctacattgaaggaacatacaaatcacatttcctcttttgtgtgacgtaatctccctctgttacccaggctggggtgcagtagcaccatctcggctcatgggagcctctgcctgatgggttcaagctgttctcgtgcctcagcctcctgagtagctgggattacaggcgtgcaccaccatgtctggctaaattttgtatttttagtagagacaagattctgccatgttggccagactggtttcaaactcctggactcaagtgatctgcccaccttggcctcccaaagtgctgggattgccggggtgagccacctcaccatgcctgcccacacttcctcttttaaataaccctttaagtgctgcatctttatgaaggtttttttaatttgaatcttcttaatttttggctcacaaacctttataagagagctagaaaagaaaaataaggttgaaataaaatcaattggttgttctgtggttattttaagaagtgtaatttaagtttcatttaagaaagttttctgtaataaaatttggattattttatttttgtcatttttccttattacatttattattattaatattattattaggccgagcatggtggctcatgcttgtaatgccagcactttgagaggctgaagtgggaggatcacctgaggtcaggagttcgagacccacctggccaacatggtgaaaccccatctctactaaaaataaaaataaaaagaattagctaggcatggtggcacgtgtttgtattctcagctactagggaggctgaggcaggagaattgcttgaatctgagagatggaggttgcagtgagccaagagcatgccactgcactccagcctgggcaacagagcaaggctttgtctcaagaaaaaaaaaatttaattcaaatataattttaaataagaccttgaaaatataccaatcaagtaaaattgcttcaatagggtatttgctgggggatttccaattattcaaggggataaagctggcacattggtgagaagaccacccacatactctttacatctagaaagtgtagttttcttaggtacgtgggcaatcctaaacacttgtgccagatttcctttccttgccaaagcactgaagaatcttggcagctaaacaaagaattgaaccctacattttctatcaggtaagtagagttctggctagatgaaagcatgataacagtaaaacaaagaggaaatccttaatacccaacagtaatgccgcagttttgctccacggccagggtaggaatgcaggatctttggcaattctgccaggggaggtgtagtcatgtggtggtggcgtgggagtgggtgcagggagtggtttgatcagctgaaccagagccgtctgagagaaggttctatggctctcttcttctgggagcagcctgcctctaggaggctgctcattatttaggatgagtagtaagggagaaattactgcctctgctgatgatgatgatggaaatgacgtgatgatttagaaaaagaaaatgatgatggccgacatttattgagttcttgctatgaactgcagttaaacgcaaatgctttttgtgcattagctcatgtcacaatgtccaagagaaaaaaggaaaggaaaaacaaacaaaaaacagaggtgctactaagtcacttccttataatttctcacctagaacaacctgcaaactagtctctttaggcttgtcctgttcaaattgatcctccaacctatcaaactgacttatttaagacagaaatgtgaccacatccttcctctaaccttttaaccagctgtctgttgcctaccaggcaaaatccagggcccttagtatggcttttaaggagagcctttcagaactgagctcctactgcctctgcagcctaagctcttaccacacccgactaccttctggccaaatcccactctgttatgactcggttaaggaaagaccaggccgggcgcggtagctcacgcctgtaatcccagcactttgggaggcccaggtgggcggatcacgaggtcaggagatagataccatcctagctaacacggtgaaaccccatctctactaaaaatacaaaaaattagccgggtgttgtggcaggcgcctgtagtcccagctactcgggaggctgaggcggagaatggcgtcaacccgggaggcggagcttgcagtgagccgagattggagattgtgccattgcacgccggcctgagcgacagagcgagacgagaatccgtctcaaaaaaaaaaaaaaaaaaaaaaaaaggaaagaccaaaaactgagcaactcggttcagactgtttcttcctgggaagcttcatgctcacccacttgttcaactgcattataaatatgctacactgtgagcttctgtaggtagagtctcagggcttactagagtgcttggcacagtctaagggctcagtacatatttccaaatgaaaacaatgaaaagatagacatggaagtctggcagaaggagataaaaatgtcaccttcattactataaagctgacaaaggagggtatagcttacgtgcagtgcaacagaggacttcctaaaactgcattccaaaattaggtagactaacagctattcacagtgcacctccccataggggcctgcctctgtaaaccagaccacaaaggagctcagccactgtagctcctgaggtcagctagctctcaactacacagaaccagtgtatttcccaaatgctcccatggaagagtttccccttctcttctggggcagagtgaaccaactgggagagaaaggccaagagagttatagcaactgaagtccaactgctttgtaaacacagaggcagctgaagttgccctgccccagccccaatatcctcctgtgcactgattgatttagatgctggtaatgcttcctaccagtgacagggaacttccagtctatctgtcaatggatcatcttttgatttcccctatctaatttcccctgctcaggtaatctatgaacacatattgaatgacatacttaataaacattttatgaatatttttaaatagttttggcttttaaaagactgtggccaggcacagtggttcacgcctgtaatcccagcactttgggaggttgaggctggcggatcgtttgagcccaggagttcgagaccagactgacaacacagggagaccctgtctctacaaaaattagccgggtgtggtggtgtgcactggtagttccagttgctcaggaggtgaatgtggaagaatcatttgagcctggaggcagaggatgcagtgactagccaagattgcgccacagcactccagcctgggcgacagagtgagatctgtctcaaaaacaaaatgaacaaacaaacaaacaaacaaaaaagattataccttccacttgactcagtcaatttaatgaaacctagaaaacatctattgagtccctgccaaatgccacacactgtgtagtataaatatgaagacatcacagtggtcctctggtattagccaaccagccaaacctactggatcttttctcttagaggaaagggaatatagacgcttgttagatcaaaaggaacacatataaatgttgacaatgttttttctaatttccaaatgtttttctgagtagctaagtgactgttcacccagagttttagacatttcccttctcctattgacagcattaattagagccaacacactaaaattctaaaaagtcatggaaacctctgaagggccatttatcttcccacatctctcccacattgccccatctcgcaaaggcatgcaattactaaagagaagaactgggtgaaagagttggatggattgttcaaatccatcactatgactgaaaaacaactcaaactagccaatggattgtttctcctccctaaaggaaggtatcatgctcactcaactctcccatcctggattcctggttcttccattattcttttgtttaaaaaaaaaaaaaaagtcctaacatctgatatttctttttctttttctttttctttttttttggtttttttttttttttgagattgagtcttgctattaccaggctggagtacagtggtatgatctcagctcactgcaacctctgcctcctgggttcaagcgattctccttcctcagccttctgagtagctgggattacaggcacatgccaccacgcccagctaatttttgtagttttagtagagacggggtttcaccatgttggtcagggtggtctcgaactcctgacctggtgatccgcccgccttggcctcccaaagtgctgggattataggcatgagccaccgcgcccgaccaacatctgatatttctaagaattctattttgtatattatttaactaggttctagaagaccacccacagtttttcactagatcctaaactcacaatacttttttttgttttttttatttcatatcaccttacattttcttatcaccaaactgacagaactattcaaaacacacacacacacacacacacacacacacacacacacacacacagcaaaaccaagaattcctaaaagatttagattcagagtctactctcaatttcaacttcttagccaagccactaaagagaaatttgtaattttgtttctcctatccactcaccaactatagtaaatgatgcatataaagctactaaaatttggagcaggcctccactttctctgcattgttcctgactgccagcaaaacagcttttactctttcctcctacttcgaggcctctatcagattagtggtggcagcataaagtaatttctaaaggtacttccattttcactttgcaattgcttggaagcatatattgcttaataagcagggaaactgaggctggtatttctgcttagaaagaaacgagactgacaaaattaaagcaatctaaaattctttatcttacatgcgacatttttctgttaatttatgagatatcatatggcttgataacagtgatttaaaaaaaagaatatatgtggcttcatgggtatgtataaatcttttgttctgaaataccatgaataaggaacatggcaaaaaaaaaaaaaaaaaaagggccgggcgcggtggctcacgcctgtaatcccagcactttgggaggccgaggcgggcggatcacgaggtcaggagatcgagaccatcccggctaaaacggtgaaaccccgtctctactaaaaatacaaaaaattagccgggcgtagtggcgggcgcctgtagtcccagctacttgggaggctgaggcaggagaatggcgtgaacccgggaggcggagcttgcagtgagccgagatcccgccactgcactccagcctgggcgacagagcgagactccgtctcaaaaaaaaaaaaaaaaaaaaaaaaggcagcacatcccagagtctaagcatatcattgtcagcatgaggggcggtgggatcttaggggactcattatatttccacattttattttctagaaagaaagaaaagaaggaaagaaagaaagagaaagaaagaaagaaagaaagaaagaaagaaagaaagaaagaaagaaagaaagaaagaaagaaagaaagaaagaaaggaaggaaggaagaaagagaaaagagagagatagagagaaaagaaggaagaaagaaaggcatgagccatgacactttttaaaaatccctacctatacttaatcagaatctacaggagatacgataaataaaagaaaattgtagatagtagaatcataaatattttagggacttctgcaaatcactttgcatatgcattttttaaaatctcaaatgtattatttatacttatacaatatgcattaaatattgaaaaggatttcgaaagagactttcacgtattaaaaaaattcatcattgggctttgaagataatgtttatttaataaaaacatccaagtgtttctttgcccaaagcattttaaagtaatgaagagaaagtgggtcttcccatgagcacatttgtagggacagtaggggggagtttgcaaaaattttcttacagtcatcaatttaaacccatctggagaagcaatcagtaattctataataaaacactggctctacaacataccactataataccccatgtgggatccatttttataatgtgcttaccctatatttaatatgtctcaatacatagtattgttcaagaccaagtttgaatacctgctaatttcacatgagaagaggcagacagggatatctatctgtatctatctaaacagatagataatatagattatagttataggtatgggtgatatagatacgaatgcagtgcagatatagatacataccaacttaaaaatgtaaataagtttaaggtgggaataggcaaattaataaagattagtttcacaagtaggatgttgtagtaccttctgcctctcctattatgttgaatccagggtaaattattggtcagtcagacagatgtcctaagctggcctttagggtgaacaaggctgtgtcagagagagttactccctccaatcctaggacccagcagcagtaaaaatgatctgtggtgctgcttcccatgacactggctcatgagttttgcctttgaccctccagtcttagctgcaagctctattcatatcaaccacatcttctctgagccctacaagaaccacaacctggaaagcctgcccagatacacccttgactgctgccagcaactaccacaactctaaccacaatccaaccctttggtacagcaccacttcataccaaatacaagttaatctacatctctttttctttttacaagttaatctatatctaatcagtttctttcccctgaatccaacaatcttttcaactttactgcttctgttaatggcattgtttgctttaatggtatgaaatttgcaaatataatatgttcttattttttaaaaaaacaaaaaacaaaaaaacaaaaagataaattgtaccaattaatcaaagtaaatcttgtaagaccactccattcccacatccttccatccccattccccagaggaaaacagcattaatcttagtgttgttattttccgacacttaggctttttcccgctgttaacaaaaatcatatggcattatatatatataatgccattatatatgtaatattatatattatctctatatatatagatacatatcaacttaaaaatgtaaataatgccattatacatataatatatataatagaattatacatataatatatataatagaattatacatataatatatataatagaattatacatataatatatataatagaattatacatataatatatataatagaattatacatataatatatataatagaattatacatataatatatataatagaattatacatataatatatataatagaattatacatataatatataatagaattatacatataatatatataatagaattatacatataatatatataatagaattatacatataatatatataatagaattatacatataatatatataatagaattatacatataatatatataatagaattatacatataatatatataatagaattatacatataatatatataatagaattatacatataatatatataatagaattatacatataatatatataatagaattatacatataatatatataatagaattatacatataatatatataatagaattatacatataatatatataatagaattatacatataatatatataatagaattatacatataatatatataatagaattatacatataatatatataatagaattatacatataatatatataatagaattatacatataatatatataatagaattatacatataatatatataatagaattatacatataatatatataatagaattatacatataatatatataatagaattatacatataatatatataatagaattatacatataatatatataatagaattatacatataatatatataatagaattatacatataatatatataatagaattatacatataatatatataatagaattatacatataatatatataatagaattatacatataatatatataatagaattatacatataatatatataatagaattatatatataatatatataatagaattatatatataatatatataatagaattatatatataatatatataatagaattatatatataatatatataatagaattatatatataatatatataatagaattatatatataatatataatagaattatatatataatatatataatagaattatatatataatatatataatagaattatatatataatatatataatagaattatatatataatatatgtaatagaattatatataatatatgtaatagaattatatatataatatatgtaatagaattatatatataatatatgtaatggaattatatatataatatatgtaatggaattatatatataatatatgtaatagaattatatataatatatgtaatagaattatatatataatatatgtaatagaattatatataatatatgtaatagaattatatatactatatatgtaatagaattatatatattatatatgtaatagaattatatatatattatatgtaatagaattatatatattatatatgtaatagaattatatatattatatatgtaatagaattatatatgtaatagaattatatatatattatgtatataatagaattatatatataattctattatatacataatatatataattctattatatacataatatatataattctattatatatataatggcattatatataatatatatatcagatgactatatatatagtcatctgatttttatatatatgtgtgtatatatatacacacatatagctttacaacttgctcttttcacttacaacttatcattcaggtcagtttatctagatttacctcattttcatatcatttgattgtatgaacatatagtagtctacttaaccatgaccttactgatggtattatagtttctcaacactgtgttatcacaaacaaggatgcagtaaatatctctgacatataactttaagtactcttgccctcatttctttataagacaaatttttagaagtgaaattgttgaatcataggggatcctttaataaatgctgccaaattattgagaccaattttggacttgcttttcttattttaactttttccttggtagactcaaacccagccaatcaaagactatggaaatttcctttgtaatatcatcctgcaatttattcctgacctgatatccccttggctatatttttaagtcttttttagaccctaacattcttggacactgactttagcttcggaactggtttttatatatcctttctacacattattgccatagtaatcttctcaaaccttgccttatgcatatcacacctttgtaattttccatgagtccctaatgcctaaaaaaggaaccttaactatgcttcaagatccctcacaatcaggctacaatccttctcattttgtcccaaaatttaagagagaatgagagagagatttaccatgagcctctcattcttaggcacttgcacatgccttaaatatttaatccttatatcagtttcagagtttaatgatatttttattaccataaaaatatagaaactgatggattggggaagaaacttgcttcccatcacacagctgtagcatctagagctgtggtttgtgtagtatatctgactgctaaggtcatgtacttaactatcaagccatatttcaactcaatttagcaaatatttattcaacatatactacatgcaaagtactttattaagtgttacagagatttaaaaatgtgaaacggatggcacacaattgacacttaataatggtgcctgcttccccagcagcagctccttccaggtagctatactttatgccatgtgactctgcctctgtcaatagctggtgaaaataatggtaggcacctgttcccactgtcgattgcagtgtaacagacaccccaaaactcagcggcttaaaacaatgacagtatttatgctgctccaactctgcaatttagctaaggttcagagagaacatcttgtctctgcttcactcagcatcagctggggacacgaaaaggataggactaggaatcatctgaaatcttactcacttgtctggaggttggtgcttgctgtcagctgggtcctcagcaggagctgtcaccaggaacaccttacatagtgaccccatgtagtctttcctcttcctcacgactcagggcctaggttccaagggctagcttctccgaagggccaggaagaagttgtctgccttttagagcttagccttgaaaagcacatagcatagcatcacttccactagtatttacaggcccatccagatccaaggggagaaatgtagaccccacctcatgatggagggctgccaatgtcacatggtggcatgagcatgtaagccagtggggccatttttgtaatacaatctgccacagcacctacagacatgccaatgtcctttcagagaaagataatccaacaaccaaattctttttcaatgatatgacttaagaacaacttacagaataaaacagctgctggagactaatctgaaaggacaaaatgcagaaagagaagaaagtggccatgatgaagcatgtgttcactgaagttatgagccaaacggaagtcaggaataagaagccctgttcacctttaagtccccaacagagcacagtgccaaatgcatggtaagtgctcacagttgtcatatgaagaaattcatgaatgctggaaagagggaaaacaaaaggaagggtaagtttggaaagggaagatgagattctacagagatatgttaagtttgagaatccagttctagctcctcactgacgtgtctaacaagcagttagggatgtagatctgtagctcagaagagagagcaagcattagggacagggcttaggaagccatgaacaagggaagctttggctttgaataagattaccaaagaatctcgtattagtccattttcacatgctataaagaaccaccggagtctgggcaatttataaaggaaaaagatttaattgacttacagttccacatggctgaggaggcctcagggaccttacaattgtggcaaaaagtgaaggggaagcaaggcacatcttacatggtgacaggaggtgagggggactgccaaaaacttttaaaccatcagacctcatgaaaacttactatcaggagaacagcaagagtggaccaccccgatgatccaatcatctcccaccaggtccctcccttgacacatggggatgacaattcgagatgagatttgggtgggacacagagccaaaccatatcaaatctacattattcaggtggaataatgaagtggttaacattatagactttgaatctgagaacctggatttagtgtctgtaatacctgcttcaccacttactgtgagttttcttaggtttagttgtttaatatctctgtacctcagtatcctgttataacattgttatagtaatgaaactacctcagagggctgtgtattaaggggtataatgcctgcaaagtgcttagaacacagtctgcatagagtaagaaatcagtgcacatttgttaccataactgttatcggtttttaaaaaatatctaaagtttaggaatgaacagaggaagagccagagaatactaggcaggaagttcttacgcaaccttgtacaatattccttataaaagtttgaagttacattcattcctgagttgcctaacatcaaacagttgatctattaataaagagggggtggcatggagaagagtgtgttctatatcaatctctctcaaagtcgtgctctttggggtgcatagtaatttctgttgtgtcaaaaaaagtgtgtgctgtactcaaataaatctgagaaatgctggattacacaaaattaagtagatgtttcctcagaccctatactaaatgcatatactaatatgtcccatggcttgctaaggaggggctatagaatgcatcatttccaaaactccttagtttttttatgggatcattctgttaaactgacattctgtgggacacaatttctcaaagctaatcaaggttagtattaagcttactacagaagactttctttggaaacttcttacaaatacatattactgaacctggccgggcacggtggttcacacctgtaatttcaggactgtggaaggccaaggcaggaggataacttgaagccaggagtttgagaccagcctggtcaacatggcaaaatctcttctctactacaaatacaaaaattagccaggcatagtgatgcacgcctgtaatctcagctactcgggaactgcagcatgagaatcacttgaacccgggaggtggaggttgcagtaagctgagatcgtcccaccgcactccagcctgggtgacagagggagactctgtctcaaaaataacaacaacaacaacaacaacaacaaacacacattactgaacctaccaacacagattctgattcagaaagtctagagtgcgggtaaggtacctgtaattttatttttatttatgtatttgtttgcatgtttgttttagagacaggttctcgctatgttgcccaggcttgtcgcaaactcctgggctcaagcagtcttcccgcctttatctcctgatcggctgggactataggcacctgccaccactcctacccaggaacctgtatgtttaaaaagttcctcagtacgctcttgcctctggcaacctagaagaggaatttgaccctgcccacaatccctctttccctttccaaactgttctcagaaaagcagctctacaagaatgatagcaaatccaataatgtatctgggttgatttcccagaaattcatcaaaccagcacagcatggaagttacttatatacctattatactttcagaacccttcagacagtcaacatggatgaaggctaataatttgattaccataaaaatataactaggaaaaaatagttgtaggctttacatataaagaaatttgaactacagccccacagaattagtgacaatctgaatttccaacagaactttgaggcagagtcagattagaatattttttaaaacttgcttagaattaatatctaacaaaatgaggatagttgtgttctcggtattatctgtttaaaatttaatctaagaatagactctgagattttcttgaagagcagttagtgctgagcatatactgacctaagaacagatacacttctaaatctaatttaggagaatcattttggaaataagacaatttttttcttgtgaacattctatctaggaagaattcagcagaatgaatattcatcatttaacatatttctatttttatagtctgcttcaaaacttttatagtaaaaataagataaaagtatagaatcacttccagatttctctacacactcaagcaattattcattttatatgtctggcaggatgggtttgattgtggtcaccctctttgtctcttccattacccctggtactgagagggtgcaagtgaggataaattagccaagaggccacccacactgagctcttccagactgaaacaaacaaacaaacaaacaaaaacattagagtcagaaaaactaaatataacacatgttcctagattgcattctataaagaatattattgggataattaactaacttgaacagagtttgtgaatttaatgttagtgtcaatgacaatgtcctgattttgattcttgtgtattggttatctgaaaaatgcccttcttggaagagttacacattattcaacagtgatgcgctctctgttcacaatgtactctcaagtagctccagaaaaaaaatgttctttgtgctattcttgcagcttttaacatttgaagttattttaaaattaacattatctttagcattttaaaaagataaagttgattttatggcctgtgagtttatcattgattttctcagattctctgggtaaactatatcaactgtaaatagttttatttcttcttttccatttcctgtgaatcgatttttttcttttttaattgtgttggttataatctctaggaaaaaaatgttcaatagatggagagagagtaagcatccttacctttttgtaatctcagtggaaatacctctagtattttctgactaaacataacaccggctttaggaccgaggtatagaaaaatatgcattatcatttctcagccttatggctaagatcaagtgtagaaaatatgcctcaatttctattttcttgagtgtttttatcaggaataggaattgagttttgtttaaaagccccccacccccgcttttttttttttttttttttttttgcgccaagtgtggtggctcatgcctgtaatcccagcacttcgggaggctgaggcagcagaattgcttgagacaaggagtttaagaccaacctaggcaaaatagtgaggccccatttctaacaaatcaaaataaaaatattagccaggtagagtggtacatgcctgtagtcctacctgcttggaagactgaggcagaagaattgcttgagcccaggaggttgaggctgcaatgagctatgattgcaccactgcactccagcctgggtgacagtgagaccctgtctccaaaaaaaatttgtttaataaaataaaattaaaagaattttaaaaagccttttccccaactgaggataatatacaattaatcttcttatatctactaatatagtatttaaattaatagatttcctcatattgaatcatccttgcattccagaaataaatcctacctggtcatggtatattttcttaatgtggtgtttggattctgttttctaatatttactctagcatttttgcattgatattggataatggcttgtagtcttgtttacacattagagtcattttcctccataccacttttaggagaacagtttccatgaaagggagcttgatgataacagaaaagataaagagacaatctaacacagaaatagacctgtcttagggccacataaattaaggggaggttgctgactcctctcttactgactaggtgaccttagagaagttattcctcctcttctgccctcaattttcttgcctatcaattagacgaacctactcaaaagattgtgtgagaataaaatgacaagatgtctatacagacttcagtacaatgcctgacacaatgtaagctcacgtaaacactggtataccctattttattaaaaagaactacttttcttctactgcctctcacattataataatgcataaagacatatgtggacagatgtcatagtttcatcagcaggcagatagtccccaataccattttgtcatgattaccaggccacagaggagtttaggcagctaatctagggagctaggtttgtattttttctcttcttttatagttactccattccagactagaagtttgaatttataattttatttaattaattaattttgtgtatttatttttgagacggagtctcactctgtcgcccaggctggagtgcaatggcgtgatcttggctcactgcaacctctgcctcccaggttaaagcgattctcatccctcagcctcctgagtagctgggactacaggcacccgccatcacacccagctaatttttagctgtatttttagtagagaaggggtttgaatttaaacagtgagcttttcatggttattgagtaggagtaggaggaggggggaactgtaaaggaatgaaaaaggaagaggaaacttcttgaacccctcctacataccaggaactaatttaggtatatctgcagttattatgtgaggaaaggtggaaggttgcatcaagattgtagaactccagaaccaccttgacaggtgaatgagtatgggcattgtctctctatctaacagttgagatcaacttttgttcttttcttctcactcataacctcttcaaatagaataaagagatgcgttttctctgggttgggctctcagttactctggctgtaagtgctctgaacatcaggaaatcactctgtacagggtgtcagctgggcttctaagactcctgcgtgtggaggagttaaggagagtgaacatttatcaatacatttattccacaacatttttattatgaatgtgttgattctgcaactcttcattagactgtagaggtagaaatgctgtctaccactctaagactgatagacctagagcactgtaggaatgccctggaaaaagaaattggcctgaagatgttggcatttgtgcggaacctagaaagtcagagttagaaagcaaagcaaagcttgtgggagacagcacagtacatgtattaaggaacagactcacacagatctaggtctgcattttgtcttcctatctttcttactattgactttggacaagttctttatttttctcagctttaattgcatttctgtaaatttagggaaaagtaccttatagggttatagtgaagttataaaggagataatgtaggtaaaacacttagcacagtacctggcttataactgctcaaatataatggccattattattatctggtctttagcagtgttcacttcttgcctccatcaacaatcttttccttagactttaagcttctgcttttttttctttaaagactattttttggttcacagcaaaattgagatgaaggtacagagatttctcatatatccccatcctcacacaaacatggcctttccccttattaacatccccgccagggtggtatgtgtgttacaactggtgaactggtgaacctatatattgatgcattgccatcacacaaaatccatagtttacattagggttcactcttggtattgtacattctatgggtttagacaaatatataataacctgtatccactattacagtatcttacggagtattttcactgccctaaaaatcttctgtgaagcttctttttttaaaaaacagcttttattgagatataactcacagaccatataattcacctacttaaagtttacaattcaatggtttttaatatattcaaagagtcatccagaagctaactttagaatattttcctctcaaaagaaaatccacacccattagcagcactctctattcctctttcatctcttccctacatccacttccaggcaaccacaaatctattttctgtctctatagatttaactattctgaacagttcatataaatgtaatcatgtaatatgtgatcttttgtgactaccttctttcatttagcatgttttcaaagttcatccatgttgaagcattgtcagtactttattcctttgtattgctgaataatattccattgtatagataaatcacgctttatccattcaccttttgaaatacatctgagttgtttccattttttgctattacaaataacgacaccatgaacatttacatatgagtttttgtgagaacatatgttttcatttctttggggtatatacgtaggagtggaatttctggattttatggcagccctgttaacctttagagaaactggcagattgtgatccaaagaggcattttgtatttccacaaacaccctatgagtgctccaatttctccattctctccaatacttgttacaatctgtcttttttattatagccatcccagtgggtatgaaatggtatcatattgtggtattgatgtgcctttcccaaatggctaaagatgttcagtatatctccttcggagcaatgtctactcaaatcctttgagtattttgatttttttattagacagcgtcttgctctgttgcccaggctggagcacagtagcatgatcagagctcactgcagctcttaactccagggctcaagccatcctcctgcctcaacctccaagtagctgggaacacaggcacatggcagcatgcctggctaattttttaaaatctttggtacagacaggatctctctatgttgcctgggctggtcttgaaatcctgggctcaagtgatcctcctgcctcagcctcccaaagtgttgggattacagcagtgagccaccatgctttgccaagtattttgaattttaagagttttacaaatactctagctacaaatcccttatcagatatataatttacaaacattttctcctgctctgtgggctctcatttcacttttttgatggtattgcttatagcacaaaagtttttaaagcttcttttaagtataacttatggaagtttatatttcaacagttatctcctaaatagtacactttcaatggaagacttggccttgttcttcatagacaaaaacaatgtatgtaaactcagtacgtaaaaaactcagtaatgtaaaaatcctctaattgtaaccttcccatcacatagctgttgacctacattggcatctacccttacctgctttcactacccatgctcttgagataaaaagagcttattctagtcaagaccaacactccagctggattcttgacctcatcctctctctattctcccaggacattcctctgtcacttaatctctctgtttcctagatctttaacatctctctcagcctatgagacagtttgccttgctccctcccattttgaaaaaaaacaaaaacaaacttgtcttgatctgcatcctccaaatatacatctctaatcttgttctctaccctgcacttcacttggatgccctacagatatatttcaattcaacatgtccagaattaaattcccctcctcaccccacatctgttctactttcaatatttctgttcgtagataatggcaccatcatccgtcacttacccaaatcaaactctctctcccctgtacacaccttctagaatcaataaatcatgttggcttgatgcgttgtacctctcaggtatatcatacagtctgcatctcactattgtacacaaatgcctttagtttagtttcttagcatctctcccctgaattattgtatagacctctaacttatttttctacctccaattctgccaccattaaggttcattctccttaatataccaagagcaatataaacaaaacctggtatgttttagcatttgaataggagatggtgattgtccccttattaggtaatgtacatcactggttatgtgacttttgataactctctaattattcctcttcagtctctggctcctcatttgttaaagaaaaaaatgacagcacttagtcttagagacattgtgagaatcaagtgggacaatatttggcatactaggtgtacaacaaatgggaggccttacttacatgatagtgggaccaggttatctcctggggctcccctgtgtctacagagaatatcagatatgtcagctgcaggaatccggacttaaagtcaggaactctttgggaagctcttgagaacaaggacactggtttctttccctataatatagaatttgtgccgggagcagtggctcatgcctgtaatcccagcactttggaaggtcgaggtgggtggattacaaggtcaggagttcgagaccagcctggccaatatggtgaaaccccgtctctactaaaaatacaaaaaaattagccaggcctggtggcacatgcctgtaatcccacctactcaggaggctgacgcaggagaattgcttgaatccgggaggtggaggttgcagtgagccaagatcacgccactgcactccagcctgggtgacagagcaagactctgtctcaaaaaaaaaaaaaaaaaaaaaaaaaaaaaaactatgggatttgtaaaaagtagaagaaatagtaaagacaaagtacctaacagggtggctggtaaataaaaagcaggggatgaaaaatagaaaataagcagcaacatgcccaagaagaaataactatgctaagaaactggttcctcttttggtttaagcattgtccattacttgtttgccagatttgtctattctagataaaagtgtgcttttgttgtcagtggtgctggtggtggcgaagttctgttgttttacagggaagatagcagtggaataacagagtgatccaggacgtctgtttttcaacttcagcagtagttagtttccccggatgttaaacatctgagttcaacagatgaagttctgttgaccttgagttttcagaggtcaattcagctttccaatcatggtacctctcttttcttgctgtgtgcaggctggcactgatcccagtttatcctttgagattcagcagaagatcctgatggaggaggaggataccaagagagaggtgcccaaggaagatggagttggtgatgtgcaacatttcggtgagaactttattgtcagaggttttcagtacatatttacaagttcttactccatcatacatattgggaatgagctggcattttcaagcatatacccaggagtccagcaatcattggggaagagagcctgaggctggcaatccttgcccagaactttggtcacctgcttgttcacaggccaccatatcttacttcactgaagtcatatgctgaggttttatttagtccagatgctgaaggatgggaagacccaagcagctggtgtggaggtctttcccagtgactcatcagtcattcagaaatcaaagcctgcacaagaaagggtgggatgggatgtatagagaaagacaccaagcctttagactccagcagagtagctgatattgacatatctgaggagggaggaggctccaatacgactactcccaattcacagggtttgtggttctggatgaaatctttgcaaagggtttccctggcactcaaacagaataaataggcttataaagtgtatatattcctcattattttttattatgcctcagatgatcaagtaaccagaaggctgagggataagcttggttacctagtttcagccaatctcattagtatttccttctgaccagctgaccagctctgtactgcaaagtcttcttgtattaagggagggcaattccaaactagatttaatttttcatttactcattgtgctaagttctagacacaagaagttaaaatagaaaaacctgtgttagggctctccagagaaacagaaccaatagaacacacatacacacacacacagagaaggagagacaaagagagattttaagcaattgtcttactcagttgctctattgtgggggctggctgggaattctgcaatctgtagggagtgtttatctcgagcagacatggaaaataaaacagaaacattgcaatatgacgatgtgaaatactttgacatctaaccaaaaccagtcatggttttggactttctggagagggtgatttctgaagcaactattgctaggtgaattgtgattatgaggaaagagatacatgaatgtgactcatgtgaataactgcaggcagtttactgtgactggaatgctccctccttgcaggaagaggaggaaggaaatgacaagctattaggtgggaaaataacctggagaaaccaaatgacatttttttttgtttatttgttttcatgctaatctgaggattccagatttattttatcctaaaggctttgagaagttattgaagaattctaagcattggagtgatgagattagagtttcggtaaagaccaatttatgtaattattcaacaaatatttaatagtgtctgtcatgtatgaagttctgagagacgcactggagatatgacaatgaacaagatagaaagatcccggtcctcatacagcttagaattgtgtgcaggagattaggggaaaaaaagactaataaaagaacttaaaattttaagtactgttattgaggcttgatttaggagcctattacaattccaatatcctcccatcccatcacacctggccatcacatcctgccataagtggaagctttaagtactgaatattactcagcaactgccctataccccatcccctctcacggccaaatgcacagtcttggatttgatacttccagaccctctttccaaaatgtggatcttagctttttctttaggctctgcatcttccatttccttgggagagccttacttactgcacacccaatgtccctttagccctgggcctaatgaggttccatctccccttgacttattcctggctctctctaaaagtggggaaataccaggtagtaaatgaaggcaaggggatgaaaagtactattgacagatatttaagaggtaaaaattatatgatttggcaatgtattggtaataggggttgaggaggacttgagggactgaagaagtttcccagataagggagttggatgactggatctaagagggtgtcctttacttaattgtagactacaattaagaaggagggctgaggggtgcacgtgagggaaggtgataatgatgtaatgattaggacatgttacgtctgctgtgcccaaaggatacctctgtgtaggtaggcagtatgcgaccctcaccttcccccgtgtacattcctaaaccttccttctttcttgtactgaggattgtggaagttggaatgaaaaacaaaggactgatatttccagtaggatcaaagcattcaacaaagtaattgagaatctatcataaaatgctaatagcccatgagagataaaactttcctttgagaactaattaccagtgaattattcatcaagggtaaggttaccccccgccacctgccactagggatccttcaaaactgcctgtgtaaggagttttccacctggatagtcactttgataacttctgcaggacaaaactagcttttgcaacaggaaaacaataaaccacatcagagcttgtcttgattacattgctcatcaatgctcagcaggctagaggagtaaaaagcataagtgctttggtgctttgacccccccaaacagcactccaagtgttgagggatctcagaccttatctgggatttttgttgaagaaacagaggaagagccacagaaagctctgccaacagacttggggtgtggggagaaaaatactgcctttagacatatacagtcatgcactgcataatgtttcaatcaatgagggaccacatgtacaacagtggccctgcaagattataatggagtgggaaaatgtcttatcatctggtgacagtggtacagtagcacaacaccttaccttttctgtgttgagatgtttagatacacaaatatttaccattatattacagttgcctacagtattcagtacagtagcgtgctatataggcttgtagcctaggaataggctatgccattcttatggttatgccatatagactgggtgtgtaacagactatgccacctaggtttgtgtaagtggactctatgatgtttgcataatgacaaaattacctaacaatgcatttctcagaacatagccctagcctcaagcaatgcccgactgtatatgaaactttcctcttgtgaattgatgggttgccaagccttttataaagctaactttaatattaacattgaagatacagtgaatccatatacccatgttaaagttctggagtttgtttcttttttgtttgtttgtttttttgatatggtctcactctattgcctaggctggaatgcattgatggaatcatagctcactgcagccttgaattcttaggctcaagtgatcctcctgcctcagtctccagagtaggtaagactataggcccaagacaccatgcctggataattgaaaaaaattttttagagaaggggttttgctatgttgtctaggctggtctcaaactcctgggctcaaatgatccttccaccttggcctcccaaagcgctgggattccaggcatgagccactgtgccaggccaaagttctgaaaattcttatgtcagtcttgtaaatataatactaataccgtaggaatcaagctctggaaattaccattaagagaatgaccttttaaatagagcttcttttgttttccatttgaacagcacagcaagtgaattttgataatcttctttaggaatatttgtaactcagaaattcttagttcttgtcattatacaaaatagacacttgcacatatattttatagcagtgcagttcacaattgcaaagatgtggaaccaacctaagtgcctatcaactaatgagtgaataaagaaaatgtggtatagatacaccatggaatactattcagccattaaaaagcatgaaataatgtcttttccagcaacttatatggagctggaggccattattcttttttttttgggacggagtctcgctctgtcgcccaggctagagtgcagtggcgcgatctcggctcactgcaagctccgcctcccgggttcacgccattctcctgcctcagcctcccgagtagctgggactacaggcgcccaccaccacacccagctaattttttgtatttttagtagagacagggtttcaccatgttagccaggatggtctcgatctcctgaccttgtgatccacccacctcggcctccccaagtgctaggattacaggcataagccaccgcgcccagccgctggaggccattattctaagtgaaataacaggggtggaaaactgaaaaccgtatgttctcacttataagtgggagttaagctatgggtacacaaaggtatacagagtgacataatggactttagaaactcaaagggagaaggtgaggggggcagggctagggataaaaaactgcacattaggtaaatgtacactacttgcatgatgggtgcactaaaatatcaaaattcatcactatataattcattcgtgtaataaaaaatctacttgtacctaaaaagctgttgaaattttaaaaaatttaaaaagaaattcttggtttttgaggatagtcataaattcaaatgagactaaaataaccatactaagatgaagcaggaggatcacttgaccccaggagctcaagaccagcctgggcaatgtagcaagatcccatctctacaaaaaaattttaaaatctgggtgtggtggcatgcacttgtagtcctagttacttggaaggctgaggcacgaggatggcttgagtccaggtttcaagttacaatgatctatgattacaccactatactccagcctgggcaagagaacaagacattgtctttaaagtcaatacataaataaataaaagaactatactagtcataacatcactatctgtatctcagaaataaatgcttcaaacaaccatttagaatttattgagcactaacataaatctccagtcagagttgagtgctataaaataatgtttttggccaggcgtggtggctcacgcctgtaatcccagcactttgggaggccgagtcaggcagatcacgaggtcaggagatggagaccaacctggctaacacagtgaaaccccgtctctactaaaaatacaaaaaattagctgggtgtggtggtggtgacctgtagtcccagctactcgggaggctgaggcaggagaatggcatgaacccatgaggcagagcttgcagtgagccgagatcacgccactgcactccagcctgggtgacagagcgagattctgtcttaaaaaaaaaaaaaaaaaaaaaaggtttttactagtgttctttgcgattctcctgagagaagcaatgacattgcccccatcaagtggaaaattaaaaatggtctggcaagtagctctgagcccctgcagacacagccagttaattggaatgttgtcactgaatttctagtccatcagtgacccaacagccaaaatgggcctgctcatgtgtatttctgtgagcattttaggatctgtgactacagagtaatcataactctgaaaaaggaaaagggcagtcaggagtggatggagagatttaatatcttaattgtggccctaatgaatacgcagttctcagttgagcagcctcgacttgagactgacaccttgtttaatacaggaagtagagtgcggctttattaaagtctttaaatgttgtggctggagctcatatttctttttcaccctatgcctatataatcatgttgttccacttcctacatagccgctggctcttcctgttgtcccgcagcaagaagccagtgcaagtttagagtaaggaaatgacataattaaaatggtattcgatgcgaagcctaaaattcaaagccccatctttcccctttcctcaaatctggccccagcaccctagatcttatctcctactcctccctccccagctcaggcggctgtattactcactctttcccaaatctgccttggctttactgtcctcctacattgctcatggtctttcctctgcctagaaggcccctcaaccttttttttttcaatatgaaactcacatatgttgtcttccctgttggactcataggacacaaataccccttcacctgaactcttctgtatcattgttttttagtatatattacattatcatattacagttatatgctaggcagtataaaacagagtaggtgcttcgtaaatttgcctttaacattcctcatgttctgaatcctggcccctgctctcagttgtcagaattctcccgtgtgctgaagtctgtgtatatctgacacatcaatttggacatctatccaaattgggtagatgcccaaggtggcattctccctctctctctcgctctctctctctccatatatatgtaaaatatatattatatatacaattatgttatatgtaaagatcatatataatacacatatattatatatacataaattaatattatacataggattatatattataataatccttatgtataattatctttatacataatataattatctttatgtataacattaaggacaaattgaaatcaaggtatggtataactggagggatgatgaaagtcagatgaaaggaaaaacaaagaaaaccaacagagagaagagaagctgagttctcttcagtatcgaggaatactgctgttaaggtgttggtttcttttttccatgataagcagataagatacagagaaactccttgttttaagcccactacgcaggcaaagtagaccaattcagggtcctcaagtgataagaaaagtgagccagataacacagctgggataggttaatctaaaagacacacacacacacacacacacacacacatacacacacaccatccttttcctgcctgattacaatacagactcacagaaaagattgggggtagggcagaaggagaacgtttaatgcagaaattaatcagatgttccaaatagatttacatttttctcataattagagaacctaccttgtaattgtttaaagataaaccagcacatggggataatcattaaacttgaggagacaaaaattaggtgtttccctttttatgcccctaggaggttaaaaagttattttcactttagttttggttaacattctggtattaatttgattaatatgttatttatactttatctatttaaatatatattagagaatgtatagtaaaaaccaaatattcaataaggttattggaataaaaatacatcaacattttaaaaaggagaggaaagcaaagtctttattaccgttacacaaaaatttaatggtaagcttgactctgggcttcctggcaacaaggatacaaagagaaacagtgggttacatagtttcccttaacaacagttgcagatccaatgtgaaaatagatgaagatgacttttctaagaaatgaaagtacattcattttttagagagacaatttatctaagtactaaaaagagtgtgtaaattggaactgaacttatataggacagtcagtgtataactcaatggtcaacatcattatcaatagttccagaaaggcaaacgtggttggaaactactctgctgggtgttctttttgtgctgtctgtcctctgtgcaaggaatggtacctacattaacacactggctcataaaatgtgagttcagccaggtgcggtggctcacacctgtaatcccagcactttggaaggccgaggtgggtggatcaactgaggtcaagagttcaagaccagcctgaccaacatggtgaaatcccatctcttctaaaaatacaaaattagctaggcatggtggtgcatgcctgtaatcccagctactccagaggctgaagcaggagaatcgcttaaacccagtaggcagaggttgtgagccaagatcgtgccattgcactccagcctgagcaacaagagcaagactccatctccaaaaaaaaaaaaatagttcttacttttcagaatagaagtttgcttctcagtgaagataaataatgcactcaaattacttggctattgtattagtccgttctcacactcctataaagaaatacctgagactgggtaacttataaaggaaagaggtttaattgactcacagtttcacattgctggggaggcctcaggaagcttacaatcatggcaaaaggcaaaggagaagcagacactttcttcacagggcagcaggacagaatgaatgcaagaaggggaaatgccagacacttacaaaaccatcagatctcatgagaactcactatcatgagaacagcatgggggaaactgcccccaagatccaattacctccacctggtcccacccttgacacttggggattatgagaattacaattccaggtgagatttggtttgggacacagagccaaaccatattagctagcaaaggggctgaatcagggcttaaaacccagttctgccttacttcacagtcaatgatttttccactgcactttgcaagtagaaacttcttgattcattaaatcatcataatattaaagcgaacttcagcacaaacaattgttccatgagttaaactgcagtaagattgaaatgagttaatagctacaaagatttgttaggctatcattgcagagaaaggagcaaatatacagattcaggacataaaaagttaatcaaatccaaccgatcttttctaataaaagagaacaatagcaaaaataattacaaatggaataacataaataattcataatatcactgtatgtgtttcaaagtgagcaggtatgtacaaacctactcccaaagaccacagaagctgaaaagccaaagaaagaggctgacaagtccagtttctcagaaagaaacatttaatagagacttatgaacagaagccatgtccccagtggctgtgaaaaaagatggtgcatctccacgctgtcactcccagagtcaagacacataaactaaaggaaaagaatgtgtaggagaattgaagtcgaccccttggggagaggcaagaatgctctgtgaatctgcccatgggcaggatttatggtcaaggttgttttgacccaggggcaggatttaaggtatcagtagataaagtacaaatcttagagtaattcccagaactcgggttaatcagaagtcaacaggtaatcttccatggaattagggtaaaaagaaaaaaaaaagtcagcatggcagattagcatccaagatagagttgctttagcctcaacactgtgcaacactttaaggttccccacctgagagggtgaaggacacaggaaagtaagatcagggactgtaaccactacagatcctggagaggcaaacaagaaaggtctgctgtttagtttacaacacaatatctctagtgataaggaatggcagagcgcaggcaggactctggtctgtgattaaacagaaaactttattataaagaacccaggaaatagaaaaggtagaaagactctctctttcttccttccttccttcctttctttctttctctctctccccctcccgcgcttccctctttttccttccttccttcctcccttctttgcttccttccttcttttctttcctttctttcttctttctttccatcaccattactaaaagaaagtctggtaatataataataacaataacagttgcactttattgagtgctttctatagatgttgaggtctgcatttgtcttttttttttttttttttttttttggcgacaaggtctcactctgccacccaggctggagtgcaatggtgcgatcatggatcacccagcctcgaattctcaggtgattctcccacctcagcctcctgagtagctgggactacagatggtgcaccaccatgcccggctaatatttttgtatttttagtagagacgggttttgccatgttggccaggctgctctggaacttctaatctcaagcaatcctgctacctcggctcccaaggtgttgggattacaggcatgagccattgagcctggactgaatttatctaatttaagacttgcaccttcagggtggtctcgtctatcttcaggctgctatggccttatgaaagctattgaaaaccactctaactcatcaggaatgggaaactttgctgggtttagtcacttgaaaaagtcacattcaatgactactttttgagtcccttccatatataagtcttggagtatgattcatacaaatatgaataaaatgactccctttgccttctaggagcttggctatcctaagagatagagatgctagcagataaaacaaggcagtgaagggaggccagtgaggattactttttgtctagtaatttggaattattcattatacagaaatatcccctagtaacattcatacttagaaaagaggtagaaggtagcattaaagacaatgaactcaagaacaagtgctcaaattctgcctctaccaacttattacctgagtgacaactgacttctctgtgattccttttttacttataaaatgggagtagtaacaaacagtaactctcaccgcatcaactaatattgtcctatatttggaagaataccggatacgtatacaatagtaattattgctctcaataaatttagctatttttttcttagacataaatattggcaatctaattatggccattctaaatgtgctgtgttggtgcacattctccttagacctgaagggagaaaggttgtctctaagatgtctgtgtagtcaagtgtatttctggcattgctcgaggcaaggaaatgtttgcaacacagtgctttgggtcaaagccatcatttattcttgagcaccatttacatgtccggtatccttgtaggcacactagggatatagcactggagagaacaggcaaaactctctgcctgcctgccttacattctagtgaggagagacagacaataaacataatttaaaaagtacattttacaatatagtagaatgtggtgactttgtcaaaaagtaaatttaagtagtatggaaaacacattttaaacttttaagtagagtggtcagagcaggcctgagcaacacggtgacattgaacagggtcttgaaggaagtgagggagtgaaccatgcagatacttgggaggagggaattataggcagagagggcaattagaacaaaggccctgagatagaacggatttacctaggaatctagtctacgaggccactgtggcaggggctaagtgagtgataaaggggaagtaggaggctgggcacagtggctcacacctgtcatcccaacacttagggtggcggaggcagacagatcgcttgagcccaggagttcaagaacagtctgggcaatgtggtgaaaccccatctctgcaaaaaattcaatattagctgggcatggtggtctgcacctgtggtcccagctattcaggaggctgaagtgggaggatcacttgagcccaggaggttaaggctgcagtgagctatgactgtgccattgcactccaacctgggtgacaaagtgaggccctgtctcaaaaaaaaaaaaaagaaaagaaaagaaaaaaaaattccaaggtaatggaaataaaatgattgtatgtttatggggatgatccaaaaaagaggaggaaagagatgacgtgggtgagaaaagaacattgctggagcacttaactgtttaactgttggattgatcagtgtatgtatgcttctgcagggcaaaaactcaggacagggaaaagaattcctctaaaaaacccggcattcctaacaaacatatgaaaaaaagctcatcatcactagtcattacagaaatgcaaatcaaaaccacaacgagataccatctcacgccagttagaatggcaatcattaaaaagtcaggaaataacagacgctgcagagaatgtggagaaatgggaacgcttttacactgttggtgggagtataagttagttcaaccattgtggaagacagtgtggcgattcctcagggatctagaactagaaataccatttgacccagcaatcccattactgggtatatacccaaagaattataaatcattctactataaagacacatacaaacgtatgtttattgcagcactgttcacaataacaaagacttggaaccaacccaagtgcccatcaatgatagactggatgaagaaaatgtggcacatatacaccatggaataccatgcagccataaaaaagaatgaattcatgtcctttgcagggacgtggatgatgctggaaaccatcattctcagcaaactaacacaggaacagaaaaccaaacactgcatgttctcatcataagtgggagttgaacaatgagaacatatggacccagggaggggaacatcacaccctgaggcctgttggggggtgggggacaaggggagggagagcattaggacaaataactaatgcatgcggagcttaaaacctagatgaagggttgatgggtgctgcaaaccaccatggcacatgtatacctgtgtaacaaacctgcacgttctgcacatgtatcccagaacttaaagtataattaaaaaagaaatttaaaaaagacattccgtaggtgaggctctccctaaaagtcaaacttttacttgcacatatgaaaagtgtaatcattaaataagctatttcttcagtgacggtatactgagttctgctcatggtgccaagtactttgcatatattattcagaagcttattagctgccctgcagcaccagtatcatttattgctgcactccaggtgaagaaattgttgctgggagctacaacaacttgcccaaagccacaatgatcataagtagtttgcgcttcgttgtgctcttctttgctggtgtgagattctcgagggccaatgtccttcatctgcgtaactctagggactcgcccagaccttggaagaggttcacattcccgcgtgccgagattgattatgggccaccctcggtctcattcgttgacttccaataaagcattggctggtggacctctacatcagcattgttttcattggatatagcaactcagaaaaatattggggaaaatataaaaactttcaagagatatgattgcaagaaaatcagaatgagtttaaaaccctcctgaccccagtccttagctcaggccgttctccaaggattttgcaaacctgctttctgacgcagctggtaaacttgccccggggcgaactgtcggaaggaggtgcggtcacctggagtttcccaatagatacttcgctgtctggtgaggaaatcatcaccctaggacgtaaaccctcccgcccttctttcagctcttaaaaaaagcctgccacgaaagtccctactgcgttgctgcgaacgtagctttgagaagctggcgcccagtgatggggcaaacagccatgcccttccagcagccgtgaaagccccaacagcaaactgcctgggagcggggcaggtcaccaacttcgttgctcgaactccctgggtgcccgccgcggtggttacaaagggggtcaagagtgccggacccagccgcgcggagcccaccattgcggcccgagggggacccgacgggggcccgacggtgtggcgtggcgcaaggagcgcgcctgccttctctcgccgccgggaacgggctgcaccaatggccaggtgaggaggcggcggtggtcgcccgggaggagggggtggtgccgactccgtgtgccaggagtgcgtcccggggacgctgcctcccccgcggccgagttggttgccgccggttgcgctgcggagggttgggggcggagaggaggcagtggctgcccgggccgaggaggggcgcgctgactgctcaccgcgagtcaggaggggccggcgggctcacggagggagacagggtgggcgggggcaaaggctaggcgctagggcggcggcgccagcgtagagcggcggtttggaggaaagatgagacggtgagtgggctccggggacacagagtttctttgcttctttacaggctgtagggacaaaagcccgggctggggtcggcagtgcccaggctgcgcagctgggtgggtgggggtggcgaaccccgttgtgcatgactctcggggggctgggtagatctccggttgaggggatcccggggagggagtgtctggtagggaagatgcttccagagtgattgtagaaaacaggcagaatgtgggggaactgggggcaactttttccagcaactctggaatgcacatggagagagggatggggatccttgggatagctccctgagaaagagaaggtccgctgctggatggtgtagggcgcgggattcagagaagactccctccccgcaaatatttggctagctgcgcttctagttccactttctttcaagagtgaacctacgagctttaaccgccaaaagcggctgatttcgatttggcctttgaccccccactgaaagtttacagtgtggccgtctcggcacccctagagatagcagctggaaggcttggggagtattttaaccctctgtttctccagctccctgcgcggcggaggcgcagctgaatcgtttgctggttcgcttaataacttagccctagcagtcatcacttattaaagcgccgaggacctggctaactcccgccaccaccaggaaattaaaaggctgacaggctgtccctcccagggttggggtttcctgtttgaaagagcttgagaagtcaaactgcttcgcggttcctcacttacctttcttatgtaaaagagggagcgacgcccgcagctttttctctcggtaaactacccgtggctggaaatcctccgggcgcctggccctgccctcttccctagaaatctttatcctgcaactctgaagtagctctaaagagctctagaatgcacaactagtcatagccaggcacagctgggagtgtaactagacgaggcataaaaatgtggagtctttttagtgtaaatatttgtcagccacatttcccttcgtaatatgaacgtgtaagttacagatgtaggttttcaagtattggacgtgtaattttaagcttcctagtttggtttaatttgggcgttcgagatatgtctctgggattctaacgtttgaattcggctgggagagatctaaatgaggtccacagtttcagaaggttaaacttttgccctgtgaacacttgaattcttggttcctggtaggttagcaacagaactgtcggatttgggataaataaaccgttagagttgcccactattttaacagaatggctatatctctcttgccgttgccttcaattgtgtaaatatttgtttgaataaagagcgaaggttctttgaaaagtaacagttctgtctattcttggctcccctttcatatcctctgcttagttatttaaaaggattttctttgcctcttacatttaatggggaaatttaaacattacatgtacttaaattctgtaaagttaccaaaccatttataactggcaaattatttaatgacaaggaagagttgagtttgtcgtcttagttggctaatgtagccttcatctcttgagacccagaggtttgcagatctcagcctgtcagaagtggaaaaatgagatgtctggttaagagtagtcatcatttcagtcaatttgcaggcctcaatctgttttatgcagctggcagctgctgttcttttggtgttgagatcgtctgccacgagtgtcgcctggatccctgtttgaaaaggggaggaaaagatacttgggaaattggactgagagcttgcttactcctccgttcaataactgtgaccaagctgaaactcgttagcaacctttccagaaacgttttatttaccatgtgtgtttgttgtgtatgcaagagaggaaaaaataagccaaagtgattaaccaatctctggttttccctattttcttcaaagctccattttgagatctataagcaagggttgactctcgagttcattggagaagttacctcggctcactacaacttctgcctccttggttcaagccattttcctgcctcagcctcccgagtagctgggattacaggcgcctgccaccacacctggctaatttttctatttttagtagtgacaggattttgccatgttggtcaggctggtctcaaactcttaacctcaggtgatccacctgccttggcctcccaaagtactgggattacaggcatgagccaccacacccggtctccttttaaatatttttaaaggagtagttaacgttatggctttatatcctgattttcaacccttagcagggaggcagtgctatggtgctgtggatggcttagagtgacagtggctttgtacattttctaggtggagtacctgtgccttatgaatctatctgtaaagtcttggtgtaccaattgttgattgtgtaaatgtcactcttttgaaacaaaaacacctaagtgatgtgctttatcttaaagtcctgacatacattagagctgtggttttcactgggagaggggttttggcccccagaggatactggcaacgtatttttggttgtagcaactgacaggaggagagtgctactgccatatagtgggtagaggcctgggatgcggttaagcaccctgccatgcacgggacacaaaaacaattatgcagccccaaaccctgcactacagtattgcctgggggagtaggttaacaagattaggcatcttaatctgatttggatcctcaagaaacttgtttaactgtgttaaacaagagacccttatcatagaagccgttttgtatgcagcagattcttttgtccttgccatttagagtcttaatataccatagaggtcgaggaacttgtgttcattgacaactttgagatggattaaagtcatgggatttgggagcattagagcacaagggagcctcagagatcacttaatttctaccccttctttttatagatgtaaaaaactgagacactcagagctttaggactcataaggtctcaagcgagctaagggcgggcagacaaagttctaggtacaacccaggagttaaaaattttaaaatagagattcaggcaaatgggaacaaaaaacaaaacacactggacctgaccttgtgtaaaagtttcaaagcaccattccctgtgagaaaataaataaatgcttcgatgggggaggggtggcattagccatagagactgtggggcacgtgcctgggtgccccagtcccagaaaggggtaattccattatatgacctgtgacactccacttctgatgcctgtactgtcctttccatggcaaagtaggcaacagatggttccacagacatagcagatgttgcttttgaatccaggtacaaaacagaacatttgagattttctgttcctccctgccttatcggttaagagtagagtacatgaatggatagggctggcttggacagaagggagaattacagaggcctcctgagtatggaagaaaaaaagacacctggcatatatggaaatgagcaagtgttggggaaattgtgggagaaattcataagctgatgaggggatatctaatataaattcaattgcatagaactaggattaagaatcagaagacaattcaagcttagctattctttcagcatgtagaacaaaataactatgggggtaaaaggaaccttagaaatcctcttatctgaatcttttccctccaaccaactaactgggttagatagcggcagaatctgcaagcctcctgttctattgtactttctcctgcacccacagtctctaccattccatgtgtttacctaatgggaaagaaaatgatagtaaagaaagttattgttaattacttgggagagtttaaaaagcatggtatttgtgaatggctgtttatagaaaggagttaccttaatgagtttatgattatcagaaaagttgtacaccatagcctgattaattacaaacatgtatactctcctgtttacattgctatggttagccattaggctcatgattatagattctagttctgggtgccaagctgtcctcctgtggtagttattttatctaatactcaaatctgacaggttctggccatataggaaagtttttagtatgcctttggtgggagacataaaacctctgaaaagtgttaagatagtttcttatcattttgacaactagccaaagggtgcacctcaaagccaagtacatagtgatatatttagaaatgactcaagagtgatagcccttttaagggatctgcccccccgcaggtactatgcaaaaggggtgtagcagtcttttcattatcatctttcatctggccattcttgttactgtttttcagatgatgggagaggagacaggagtagtttttaaaaaaataactgttggctagaaatatttattgggatttgattaaagtaacttgtcttttaaaaataaatgaaaccaaaattgttagctcagattttcaaatcccttcaaagtaaacatttagcaaggcagaacttctctctatgttcatccaggaatttgaaccttctgggagttaatttgcttacagttgttttcatgacgcttaaggatgtttcttagacattgcagaaaaggagctttgtgctgtatctgctttaaaggcaagatagttgtctatagcagctagtggtcaataagagaaacccaagtgtaaaaatcattttactgttgtgtgggaaactagaggttgtaggtaattgctatacaaagaaacagattaataagatatagagtaacagggttagtcaaaaagtttttgagaggatttttacaggagatacttgtttagtgtgttaggttgattttattagatgaagtgcttttccttactttacaaagtaaaaggaaagaaaatattgtgtatgccactgtttatcgatggccttaagccaggtcagctttttctgagacttgctgctaattcagtgggaattggtgttgatcatcttagaatgttttgtttgcacattgcatgtgactgccctagatggcagtatgttcatggaactagcctatgaaatagcaaaaaagttaaagattacaagagttttccaagatttctttcttgaccaccctactgctaaaacaaggaaagataaaggcaaaagaaacccagctcctacattcttttgaccagtgcagacccagtgtgaatagtgccgcacagccaagagatattcagaggggattgagaagtgatgtctggctgcctcactgcttacgtcattgcagaagtagcttttcaaaaacagcttaagatttattaaggaaactgcaagccatgggaatgcagacaaaacctttcttatacatcatgctcaatcaaatacccatattatattacattaccataactctgaccaggcctttttcccactatgttatgctaaaacaatttaccatgcctttggaatgtcatgggcaacagtccggtgaaatcttttcccaattaggtagctgccaccttatcactaaaactatttctgttctgtggtcatttccatttcctgcattatgtaatgagcactcctgtgttatttaaccagtatctgtgggagtccagaaagttggagcagaaagaacatgtagttcactctcaccatgttgagtatggagaaactcctgttgaaacaaaatgaagacaggcgaattgacgtgctccagatcttagttctgttagcagaaccagaactaagatggatcttctgacttgcttccctggcagcctatccagtgttctttctactagattggccactgtaataaaaataacatcctaacgtaaccatttcctttattagatcttttggccagagttattaaaaaaaaagcattgattaaaattaaattaaacttagtcaattgtttatcttgacttgttcaagttatttcccttctttcaagcagtaagtggtcaaaaggtagatagcatggaagggaaaaattaagtgttttataatactcattctgcacaatcagctgctaagtaatgaagatatgatattatcataattattatttttactttacaatattttagaaacctaccccacccactcattttttttttttttttttttttttggagacagagttgctctgtcacccaggctggagtacagtggtgcgatccagctcactgcaacctcggcctcccaggttcaagtgattatcctgcctcagcctcccgagtagctgggattacaggcatgcaccaccacacccagctaatttctgtactttaatagtgatggggtttcgccatattggccagggtggtctcagactcctgacctttggtgatctgcccacctcagcatcacagagtgctggaattacaggcatgagccaccgagcccggcctcatgtactcaatttgtgatgtaaagcgaaatgcattacaaacatggaagatgtggttgacctgtgtttgttccacctcttgtgagcctgtttgtaccctgactattcccagttcataaatcttgggttagggaatgggaattccagcaagtatttaggtctggggaatgttactttggaaaaattaaatattactcttaagggagtgtcttttgatcagtagtgtgggatggggcaggatggcggcaagatcggagagtttccctcccatacactctcctcagcttccagttaaagtccacggaggtggtttcagggtcaagagagagcatctttatctacatatgatccccaggttgataattctcttgcttgaaattagctttgagatcaaaagatcagagggtgcttttccctgtagcactcctgtgattaaagaagagtatctgaagttagttatcccatgattctgcacttcactgggtgattacgtagtaaaggaagacccttctagctttacgggggacttgatcaggatccttggttaggattctgtgaagaacttgacctaaagagctcctccactctcttccttaacataagtttctaaggggtgtgtgtgtgtgtgtgtgtgtgtgtgtgtgtgtgtgtgtgtattttaaccttttaattgaggctggaattcttgatatggagggtttgacagttttatgaagaaatcattatttgggcacgcagtggtgacacttagctaccccacataacgttatcttgcaaatatcttaaatgtgatggcctgcttacttgttatcttgaaaatgtatttgctttcaaacttctcccagttacttaaaaatacatgtatcagcttttaggaacttaattcagtatgataaagagttagtattttatacttaaaaaaaaaatcagctaggagccagtgatatgaccccaaccttctttgtaaagtcagctactataatttttaaggcagtatacacattttattgatgttgacttgcagaatgcacgtagcttttttaaaagatactttatcatgaaaaatattaaactacacaaaaatttaaatgtatactaaaataataataaaataataaacaaagatcaatgtacttatcacccagcttcaacaattatttatatatgctaatcttgtttcatttgtaaacctcactttaccctaaaacatggattgttataaagcagattccaaacatcatcatatttcattcgtaaataatttacaatgtaactctaagagtatttttaagatatatcatcatcacacttttaaaaaaccacagcattatcatctagtttccagtctgaaattctctgattgtctcatatgtctttttttaattttaatttttatttttttgagatagggtcttgctctgtcacccaggctggagtacagtggcactatcttggcttactgcagccttggtttcctgggttcaactgatcctctcacctcaaccttcccagtagctgggactgcaggcttgtgccgccatgcctggctaatttttgtatattttgtagagatggggtctcaccatgttgcccaagctggtctcgaatcctgggctccagtgatctgcctgcctcggcctcctagagtgctggaattacaggcctgagctactgctcccagctcatacttttaaaaaaaaatgacaggatcttgctgcgtcacccagactggagagcagtggcatgatcatggctcactgcagccttgccctcctgggctcaagtgatccccctgcctccacctctgcctctccgcctctgcctcctgagtagctggaaatacaggcatgcaccaccatgcctggctaattttttaaatttctgtagagatggggtcttgctgtgctggtcaggctggtctcaaactcctaggctcaagcaatcctcatgcctcggcctcctgaagtgctgggattatgagcctcagccaccttgcctagcttcatacattgtaaaaaatagatggattgttcaaaacaggatccaaaaccatgtccacacattgcatttaattggtatgcgccctcagtctctttaatcgagaatacttctctcttcctcttgtttttttttcccccttgccatttgcttattcatgagtcttcctcccacccctggggactttcccatattttagaattaggtaattgcatttctgtcttttttttaaaaaaaatattattctcttccttgtattttctgtaatcacagacagcacacttttaatttgtgttgagctgaatttatatatatatatatgtgtgtgtatatatatttcaatacttattgatattgtctcctttaaatattggtaaagctcctttaacacaaatgtgagcctaattgaagaaatcacaccttgatgatttatgtaaaagtaaggaattttgcaagtgtgaggaaactaatgacacaaaagtttattgaggttgcttctgctttctgtcctcccccaacctgtcctcttcactggctgaagagagttatcacagggaacatgcagctaaattacttgcagagtctaaagaatattttaaagttcctacagactagtcttactcaagggactagcacaaaactttttaaaaaatccctatgattgatggcttaccctctttactaagagacctataagatttctaacaattcctaacgtaaaacaatgtagactgatttaaaagtagcctctgctcacaggagatgaagatcctcatttgaaatatggttattgctgttgattgtgattacttttaggaaccttcgaataccatctggaattttttttttcttcttcttctttgacagagctcagacttcaatacagctagggataacagaagggaatcgtagcctggggttacactcttttattgtgacaggaagaagctggaacttctttcatattgtgctccactccttccatctgcacttaatgttctcattatcccccatcactctccacttccttctgggccccttttccctcctgtagcatcctttgagtcttttgttctttccctaatggtcttccttacttcttcttttaggtatctttagaatatgataaagtaaaaattcaaaaaaaagaaaaaaaaaaggaaaagaaagaaaaagaaaagcaagaaagcaactgtgtaatcggtgtcctgagatatcaaagccacattctggtccccagcggccctcacctttctctccagccctgtcacctggtgaattccgaggatgtgtcttgtctgaattctgaagagtccccattagcagtcacaaaaagcctttgtgtgttttagaccactgtaggcatgtggacagcatgtgtgtctgtctctgtgtgtgtgtgtgtgtgtgtgtgtgtctacacacattaggatttacagctgcctgttgtaataggttcagtctgaaagaataaacaagcctccttattttgccattaaaatacatttcttcccatggaactgctttgttggatctttttgataattgtaaacatcctccttggagaatatccacctacctacatgtttgtagtgggtaataattattttgttcaaacaggcaggtctttgagtgacaaagaacatggtgcaaaggaagaggagttggaatccatttgctgctgtgtttatttgcaaaacagaacaataaggagactatgtctactaacaggcttttttctctctctgctgtgagatataaaatcttgtgtgtggaggaagagtttaaaggaacagaggttagaaagccaggatgagagagtgagagaagaggaagttctaaggagacaggtattgagacagtgggaaggtccagggttatggatggctgcagaagctgtagggaatagcattggaaggagagaggatctggggctgtttgcttagaggggggtgtttgcagatgagtttggggatatgtggacaggtgagggttgtttgcagagatagaggaggttgaggaggatataagaatgcaaggaaatatttgtgaagtagctaggtctatttgcagagggggagttgaggggactaagggtttaactgaggatggtgtttggagaacagaggatgaggaaaataagctgctttttgacttttgaaatgagaatattgctaggaagtggttgtttctggagcttctaataattagctccctcttccatgtgttttgatgttgggattagtggaaaaagagagaagtttttgtgtccattgttgtccactataaagcttggagtttcaggttgaactagattttttttttccttcaatcctctgaaagcttcccctcaggccccatctgctgccattggtcaccacagaaatacccccacagaattcctgtaaagaatggcactgcttctgaaggactgctctaagctgatgtctgaattcaattacatgtcatcagtgcatgctttattcataacatcatcttattgtaaacatcagtgctgaaagagaccagcctgtggaccaccagtgtgcggggagtgctttgaacaccaagcatcaaccactgtctgccacaaaatgcggactccaagtcagcgtctctgctccatggctcttgcagggcatgagtatagactcaaactttgttataaagtggaaattttgacccaaaccctaattttttttttgaaatgaattttcctgaatttgcttctgtaatctaaatccctctgcattttctcaacaatatgaaacgatttacagttttctatcacttgctcttgcagtcagtccctcttcgattaattcctactatattgattggatgatcctaaggcagtgtctgtatatgacagtgtgaaatgacaagtaatacgttgcataatttgggaattctccatactcacttcgtataaattacctggataattgcatttatgtaggccagactttaagtccctcttctctaacacaacacagcacaatacaacagacatttaaatttgtttctttgcttttaaaactttgttcttggcccggcatggtggcttatgcctgtaatcctagcacttttgggaggccaaggcaggtggattacttgagcccaggagtttaagaccaacctgagaaacatggcaaaaacctgtttctacaaaaagtacaaaaaaaaaaaatagccaggtgtggtggcccatgcctgtagtcccagctactggagatgctgaagtgggagaatggcttgagcccgggaggcggaggttgcagtgaggcaagattgtgccactgcactccagcctgggtgacagaccctgttaaaaaaacaaacaaacaaaaaaaactccaaaaaaacctttgtttcttcggtgtgttttcattatcttgaaactctgatccctacagttcacagtatcataaattcactgttgtcgatttatagtttgaaggggattagcttcattctggtgctatctgatacaaatggagctggagaattttatttcaaaacagttaccagaattgtaccaaagagaaaggaatctcccaaagaacttttaaaaatgatccctaagttggtttttcaggtaattttattttccagggaaaaagtactgtgactttctgtggatatcttccagcgatctcatcatgacttcttggcgttttctaatgaggtgatgtagtaggtttcaggtgataaaataacaagagcactgggtggatttaatttatggattggaaagtaaatgcaaacatttcaacgtacattaacttctttcctgtttagacttccctgtgttgccttttctctcagatgggcaccagatgcattcgcttctcccagcccattctgtggatacatatgtaataaggcatgtagccattaaggcctttgggactgttttctttccacagtaacataatgcagggatcatatagtttcactgggacctcttttttgtttacgtaaaatatacaggaaacccaaaacaaacacatcagcatagatcaagaagacaggctgtaaactttggcatcttctttgcctcctctcttacacatgttaacacagacctcccttccccacttccctccctcctgttgtcaccttgtcaatgcctcttgtgtgctctccctcacctctcaccttcctaactctgctttcttcctctatactcagctgcagtctctgatgtgtgcaatcacgtccctcctgctctcattgcctagggaattaaaaccaaactcttactgtgttcttcatcctcctgcctcttctctccttgcccacaccctaatcctcattcaaaatacacgactgatgactggtccacatttcctaggagttcctaatgggattaggcctgctcacacctaaaatgaaaagggcactctggaaatagggaaggcaagagctatcagtagccgttgttgtcactcatggggtcagaaaagtcacccatctgaattattctgtaccttttgagttgaattgatttgtaaggttaagagaaatcaagttgaaacaaatatacatatacattcagctgtggcacgtaaactaagcttcaggaaaatgaatggattccatatttgtacctgatggtaaatctctaaatgcagaaccttttatacattctaaacaggaccaataagcttgaactaaaaagaaaaaatggggtatcaaacacgaatatccctttaaattttctctggaatatcctgccatcccagtcttctgtaactttcctctacagatatgcatggccaagaagaaatggtgcatggctgtttctaagatgtggtttattatttgcaaatatcctgcttgttgcttccctagagtttgtaaagccgatctttcagccaacactactttggaaaattctgctgttatattttgtttggccaaccaatctgctttggtaatcatagtttctggtttttagaaaaagtgtatatttgagaggaggaaaagtggtggcacttcctggggtagtagggaatctgtattgtagtttaatactctatagtttctttagcccaaataaagacgggacagagcttcgtaatattttagtcaggtggttaagtagcatttccaactacaaacaggttcgagtatattaatgtattttatcatctaaaaaataacatcagtgtcttatactgctgagtcaaaagccaaacctttgagtattcattttgacatgaggtattaaacccttcaattctttactgtaggagtaaatatttaaaatgcagtttgggtgtaagtgcttagctttttattctgcttagtgacatctgccctggcttgctttctgggttgctgtgtctgcatattatgggaataccctcaacttagttctgtttcccattttgtatatatttctttcaaagcaaagtccttctttctaactggcattaattcttgtctattctaacatctcagattttttttgtagccacacctaaacacttgaaggattactgtccaagttaaatcacttttaggggaggcatgctgcttggacccaggagggcatatcttacatggtggtggagacagaaaaagatttagagaactataagcgagaaatacacgattattaaatatagttcataccaggagacttacagtcctagattttaaaaaacggtgttatagaaaataatgatttttcctatatggatttgctttttaattctatcagagataggatgtttgttggatgtaccagtggtctgacctaatatgggcttggaagtttgtttacatcctttaactcacagaattttaggtgtgcaagtggctttatgctacttttgaataataccaatcagattcccttcccttcagtgggctccttcatcatttctttatactgcaacctcctcaaaactaccactctcactggattcgccccactctgtgttccttttcctgtcaaccaaatatatttaggcatgcatagcaattatttgttcataaatgtgtttttccctttgtactctaagctatgtaaaggcaggaaatgatatctcttaccgtatgtctcccaatgcctagctcagagcctgatttatattagttacttaatgaagattagcatcctcatagtaacaaagaaaccccaaatctcaggggctgcagacaatcttgtgttgacaaggaccttgttccatgtcctcattcaggagtgggggttaacaaagcctctgcaagcctggatgaggctagttgtcctagcaggggggtgggaaatggtgactgctgcactgactcatgatgcttcagcttggaactggcaagttactttctctcatatttcattgatcaaagcaagggacatagccacacctaacctcacagagatgaggaagagcaacctcactatgttcctgaaaggagaagaactggaatattagtgagtaacactaatgcctgctaaataaatgtctgataaacagtaggcatggatttaatgagtgaagtgcctaaaactacccattgagatttttaatttttttccctgtacaataaacagaactactcaaatatggaagtaaggtagctacattctaaaaaacaagaatattaatattatctaagctattattcagcaaacatctagagactttttataacaattctgttagctttattcatatcagagaaatatttgattttgtagtttttcagatgcataaagagtgaaacagataaattcatatgattaatgtttttgccagagtcatttagaagacttggaaaaaatgttgcagtcttcaatatttatatattaaattagtctgatcaagactgtttttttttgcaatggagttttgcttgttgcccaggctggagtgcaatggcacaatctcagctcaccacaacctccgcctcccgggttcaggtgattctcctgcctcagcctcccaagtagctgggattacaggcatgcaccaccatgcctggctaattttttgtatttttagtagagatggagtttctccatgttggtcaggctggtctcgaactcccactgttaggtgatctgcctgcctgggcctcccaaagtgctgggattataggtgtgaggcaccacgcctggcaaaggagttctttaaccttttttggaaaagttaatatctggcttgaaaattgggcaagagctaaggaaaaaatcaacttaaaatgtttaattggcaagacacagtggctcacacctgtaatcccagcactttgggaggccgaggcaggcagatcacctgaagtcaggagttagagaccagcttggcaaacatggtgaaaccccgtttctactaaaaatacaaaaattagccaggcatggtggtacacacctgtaatcctagctactggggaggctgaggcaggagaatcgcttgaaccttggaggcggaggatgcagtgagtcgagaatgtaccgttgcattccagcctgggcaacagagcaagactgtctcaaaaaaaaaaaaaaaagaaagaaaatgtttaatcaactttaaaatgaagtgttgctacatattctagtattttatggtaagtgagtttttttttcctggttgtcaaaatggtccaaatgtattatataaaatgtagaaaatatgaactagtatgagagaggtaagttaagtcactggtaaaactgccatccaaataaaatcactactgatttttttggtgtgatttcttccagtccattgttattgttattattgctgtggaagaataggcatattgaggaggcaagagcagatactggcttgtactagagaggctaccatggaaatgctaagaaattatcagattcagaatgtgttttaaggacagtgttgataggatttattgatggataaaatgaggaagggggtgctagtgacagaggagaccaatgttgattcccaggattttggcttgacccctacctgtgtgtgtggttgggtgtatgtacagttgactctagagcaacttggcggttaagaacactgacaccctgctaagttgaaaatctgcatataactttttactcccccaaaacttaactactgttagtttaccattgactagaagccttactaataacaaagccaattaacacatattttaatacaaaataacacatattttatatgtatgatatactatattcttataataaagtaatttagagaaaagaggttattaagatgttcataacggagagaaaatgtatttacttttttttaagttatactttaagttctggggtacatgtgcagaacgtgcaggtttgttacataggtatacacgtgccatggtggtttgctgcacccatcaacctgtcatctacattaagtatttctcctaatgctatcccgcccctagccccccacaccctgacaagccatggtgtgtgatattcccctccctgtgtccatgtgttctcgttgatcaactcccacttatgagtgagaacatgccgtgtttggttttctgttcttgtgttagtttgctgagaattatggtttccagcatcatccatgtccctgcaaaagacatgaacttatcctttttaaggctgcatagtattccatggtgtatatgtgctacattttctttatccagtctatcattgatgggcatttgggttcgttccaagtctttgttattgtgaacagtgctgcaataaacatacgcttgcatgtgtctttatagtagaatgatttataatcctttgggtatatatccagtaatgggattgctgggtcaaatggtatttctagttctagatccctgaggaatcaccacactgacttccacaatggttgaactagtttacactcccaccaacagtgtaaaagtgttcctatttctccacatcctctccaacatctgttgtttcctgactttttaatgattgcctttctaactggtgtgagatggtttctcattgttgttttgatttgcatttctctaatgaccagtgatgatgagcttttttttcatatgtttgttggctgcatgaatgtcttcttttgagaagtgtctgttcatatcctttgcccactttttgatagggttgtttttttcttgtaaatttgtttaagttctttgtagattctggatattagccctttgtcagatgagtagattgcaaaaatttctcccattctgtaggttgcccgctcactctgataatagtatcttttgctgtgcagaagctctttagtttaatcatatcccatttgtcaattttgacttttgttgccattgcttttggtgttttagtcatgaagtctttgcccatgcctatttcctgaatggtattgcctaggttttcttctagggtttttatggttttaggtcttacgtttaagtctttaatccatcttgagttaatttttgtataaggtgtaaagaagggatccagtttcagttttctgtatatggctagccagttttcccaacaccatttattaaatagggaatcctttccccattgcttgtttttgtcaagtttgtcaaagatcagatggttgtagatgggtggtgttatttctgaggtctctgttctgttccattggtctatctagtaccatgctgttttggttactgtagccttgtagtatacattgaagtcaggtagcatgatgcctccagctttgttctttttgcttaggattgctttggctatgcaggctcttttttggttccatatgaaatttaaagtagttttttccagttctgtgaagaaagtcaatggtagcttgatgggaatagcattgaatctataaattactttgggaagtatggccattttcacaatattgattattcctatccgttagcatgggatgtttttccacttctttgcgtcctctcttatttctttgagcagtggtttgtagttctccttgaagaggttcttcacatcccttgtaagttggattcctaggtattttattctctttgtagcaattgtgaatgggagttcactcatgatttggctctttgtttgtctgttattggtgaataggaatgcttgtgatttttgcacattgattctgtatcctgagacttcgctgaagttgcttatcagcttaaggagattttgggctgagacgatggggttttctaaatatacaatcatgtcatctgcaaacagagacaattgacttcctcttttcctaattgaataccctgtatttctttctgttgcctgattgccctggccagaacttccaatactatgttgaataggagtggtgagagaaggcatcgttgtcttgtgctggttttcaaagggaatgcttccggtttttgtccattcagtatgatattggctgtgggtttgttataaatagctcttattattttgagatacgttccatcaatgcctagtttattgagagtttttagcatgaagggctgttgaattttgtcaaaggccttttctgcacctattgagacaatcatgtggtttttattattggttctgattatgtgatggattacatttattgatttgcatatgttgaaccagccttgcatcccagggatgaagcccacttgatcatggtggataagctttttgatgtgctgctggattcggttttccagtattttattgaagatttttgcattgatgttcattagggatattggcctgaaattttccttttttgatgtgtctctgccaggttttggtatcaggatgatgctggcctcatcaaatgagttagggagcatttcctctttttctattgtctggaatagtttcagaaggaatggtaccagctcctctttgtacctctggtaacattcagctgtgaatccgtctggtcctggactttttttggttggtaggctactaattgctgcctcaatttcagaacttgttattgttctattcagggtttgacctcttcttggtttagtcttaggagagggtatgtgtccaggaatttgtccatttcttctagattttctagtttatttgcgtagaagttggtactctacacattcagagaaacttctctagtaatgaagtatagaaatgatccctgaaagtatagtcttatatttactatttattaagtggaagtggatcattatgaaggtcttcatcctcttcgtcttcatgttgagtaggctgaggaggaggaagaggaggagctggtcttgatgtctccagggtggcagaggcagaagtggaggaggtagaaggggaggcaggagaggcaggcacactcgtgtaactttacgcctttttgtaaagtgtaacttttttgaagtgtaaagttacactttacagaaagtaagctttttactttttttatttctctaaaaatgtttttttatgggaccaatccttcttcagccatttgctatagttcagtgcctgtatcatagaagggtccacgttgtaaaagaaggcaaaagcagtctcgaataatcagaacccttctgccagattgtgtaatgtcagtttgttttctggtactgcttcttctgtatcttcttcatcatctgacagtggtttagaagcacttttctctattaagttgtcctctgttaattcctcttgtgtggtgtattagctgttgaatttcctcaagacccatatcttgaaaccctttacccactgcctttttttttttttttttttttggccatatccacagtctctttggtgattttcttggctggctgtgttgtaaattttttgaagtcatttacaacatctggacacagttttctccagcggatatgtattattttaggctccatggctttcatggccttttctataacaatgatggtgttgtcaatagggtaatacttccaggcttttatgcttttctccctatcagcgttctctaccatagcattgacagtgctttccatagggtaccataatgagcctgaaaggtcgttaggaccccctgatctaaaggcagaattagagatatgtttgggggcaagtagaccactctgatgcctttggtgttggactcatggagttctgagtggccagaggcattgtctaatgtcaaaagaactttaaaaggcagtttcttactggcaaagtacttcctgactccagggacaaagcatcagtggaaccaatccaggaaaagagctctcattgtccaagccttcttgtggtacaactaaaaaactagtatttatgttttcctttgaaggctcagggttagcggctttatagaggacagtcccggtcataaccatgactgcatatgcacaaagtggtagagtaagtctgtcctttgctgccttaaatccttgcttctcttccttactagtgaatgtcctttgtggcattttttttttttcaagatcgggcaaattttttctgcgttaaaaacctgttcatccaagtgcttgggagttgattaaaaaatatataaataaataaaaacaatgaaactaccctgttcaggcagacatcctttctcctcagggaatttatatggtgtctgggaacttatctgctgcctcttggttagcagaagctgcttttcctgttatcttgctattttttcggccaaatctgtttctaaaatatcaaaccatcctttgctggcattaaattatccagctttagattccttacctccttttgctttaagttgtcatgtaatgattttgccttttcttgaatcttattagagtctataggtatgccttttttatagcaatcctgtgcccacttaaaatgtgcattttcactatgagactcaaagttatctcacaaaaagtataaaattttcatacctgctggcatagctgcagtgacaacttcacaattttccttttcttttcttatagtggtccttgtgctggattcatttattttgaaatggcaggcaactgtagctgcaggcctcaatctctggtacatatcagacaattcaattttttcttgcaatgttgtgacttgtctctgcttcctggcagcacttccagcatcactagtcgcacttcgtatgggtcccatggtgttattcagggtttatagtattacatcaaatgttttaaaaatacttaagaaccatgagatataacttattactgcaatattaaatttatgggagagatgaactgctcatgcagaggtgattagcatcacatggcattttcagtgaatacctgcaacacttgagttcactgcagtagcaacagggggtgtccacaaaattattacagtagtatagtatgtactacagttaattttatgcaaccatgatataatatcatatttttatgtttgtttatatttctctgtactgagaatggcatcatgtgtagtctgtgttacttttcataagacatctgtatatattttatggttgtaaatgatgaaatagactagtagccacaaatattttatgctcatcacatacctcacttttcttttttttttttttcagtatttctaggctacacagttagtgttttcaaattattgcaaatctccaaaaaattttccagtatatttattgaaaaaaatgttgcatgggtaagggtacccatgtagttcaatcctgtgttgttcaagagtcaactgaataagaaaatgacactccttgtattatatacagaaatatacctgtgtgtgtataatccatgtgtatgggtgggtgttgtaaaaaagctgccctgattatatatatgttttttaaaactaacaacattttatgaatgtactttttatgctataaaatgtacttcaaaatatgattttaaatgattgtacaatattctctcatgatgtattatagcttatttaattttttccctattatttggcatttatggtattttcccattctaataaataacactgaaatgtcctcaggatccatctatttccttgttttttcacttccaaaatatttaacttgagagaattgtccaaggcttgctggaatttcagtatggcaagccaacgagaggtgatgttagttcagaatagaggagtctcagtttcagtcctctaagcgggcatggtaagatatttctcaatccaggctggtgttgcttttaaaaccagaattgatagcagtagacacatgctgagaagagtatttgtcttggaggcagaaagggcactgtcctggaggaaatgaaagccttaccaagagctagatggcaggactagatcccagctgggagccaaatataatgaagaaacttcatttttttcttgaggtacatttaaaaagataaattatgtttgtatctatctgggcagggctttgggttagaggagaaggagcccaaggcacctttatggacagttgggtacctggcccatcaccaggatttatgcagccagactgtttcttggccttctggataaagaagcagctctttactaggctgcctgaatttgctcacaaagtgtgtgaagctaagcaacagggtgaaggtccttaatccatggctgagagggagtgaggaaggctttgattaaaatggaaagcttatgttcatcaagtttttcacctataggacaacaagagctagaggggtggaagataaaaatactagacataacctcttccttaaacttgtggcctagttacagagacaaccacattatgaaaccattactaaccatatgtgatactgtttatatatagaccagagatgtcataattagtgtctgatgtgcctaagggttggaggacagttatagtggttcatgagttcagtgacaatgtttaaactgtattttccctttgctgataatctaagaaaatttttttttatcaggtagaattataagccttcccatttgcagtaatagtttgtaattcaaagacattttcattggctaaaactttagtgttttaagttaacattgtgcaaaccagggttcaaaacatattttcttaaaaattttaatggtggaagatagaatcctgatctgtccctggaagagtgactaggtcctgatagttgtttctgctagaggagagaatttgcaaggatgagcatagtgcatttggggtactagaaaatttaaaggatataacagtttcaggtttttaaatataccatcccgaccatgtgtcaataattggtggaatacccttttctttgttattacctacctctgatgactaaaggagctttaagtctttttgttgagaaggtaactcccagagtccttgtttaaagaaccatcttctaaccctcatgttattgatcagtgtctaacgtaaacttttttttctctgcccaaatgtgaattttgtttcctcaggactttatttctgaacagttaatgattctagcagagacagctataggaaagtccattgcattatgcctttgggcattagctagtcactagggaagcaggtgttcctcgaagggccagaacattaaggacaaattgtcttttttaatgtaccagcctaatcctgcacctttacttggttagggatttgtttcgctcaaatgtcattgctgtccttttatttctcttttgtacataagttatctcaggtcaatgatctttattctcctttaatttgctgtatggttttaacaggttttttagtaaaactgagtttgtgtttgttagttgcattaggtcagactgcaagattgtttgttcagatgtaggcctaacaagggattgttcttttaaaatcttctttaaggcaaaattttctgttttatttctttacagattccagcaagattatggaagagcatagctacatacaaaaggagctagatttacaaaatggtagcttagaggaagactctgtggtgcattctgttgagaacgattcccaaaacatgatggagagcctcagcccaaagaaatactcttccagtctgagatttaaagccaatggagactattctggctcctatttaaccctctcacaacctgtgcctgcaaagagaagcccttctcctttgggaaccagtgtcagaagcagcccctccttagccaaaatccagggaagcaagcagttctcttatgatggaactgacaaaaatattcctatgaaacctccaactcctttactcaacactacatcctccctcagtggatatccacttggaagagcagactttgatcattatactggccgggacagtgaaagggccttgaggctctcagagaagcctccctattccaaatatagctcaaggcataaatcgcatgacaatgtctactctcttggagggctggaaggtcggaaggcatctggctcgctcctggccatgtggaatggaagttccctgagtgatgctggcccgcctcctatcagcagatcgggagccgcaagcatgccttcaagcccaaagcaagccaggaaaatgagcattcaggacagcctggcgcttcaacccaagttaactagacacaaggagcttgcatctgaaaacatcaatttgagaactaggaagtactccagcagcagcctgagtcacatgggagcctacagccgatcacttcccaggttgtacagagccacagagaaccagctgacacctctcagcttgcctccaagaaactctctgggcaattccaaacgaacaaaacttggggaaaaggatctacctcatagcgtaatagacaatgacaattaccttaatttttcttctttgagctcaggggctttaccctataaaacctctgcttctgaaggcaatccttatgtaagttctaccctcagtgtccctgccagtccacgagtggctcggaagatgcttctggcctccacctcctcctgtgcctctgatgactttgatcaggcttcatatgtggggacaaacccgagtcattcacttcttgctggagagtcagacagagtttttgcgaccaggaggaacttctcttgtggatctgtggaatttgatgaggcagatttggaaagcctcagacaggcctcaggaaccccccagcctgcccttcgggaacggaaaagcagtattagctccatttcaggacgtgatgacctgatggattatcaccggcggcagagggaggaaagactcagggagcaggaaatggagcgattggtaatcttcatctcaacagtgattgacctcactgtttcattaaccagcatctacagggcagccttggagatggactccaggatatgtgggaatataggatattcatgttcactagccacagctgctatctttctcttctctcctgctatccttcttcttcccatatcactattaataggcttgtttggctatcttgaaggcctccaggaattaatgttaatttagttgctctgcggacttctcacaagtataaattctttaaaaacataacagaggagttgggaattttatgaaatttctgagtcttacaaacttctctttaagactatgaggaaatgctgacttgtattatttatatcattaaatttgcttgtgtatggttatgagaagtagtcagtgaaatcatgactcaccaagaattaggtagtaaatttgtctttatagcaagttgtctagaaagttggagttgcctcagtggtgctcagcttttctccacactgttcatacacaaccttactatctttagctctgattcttatcacgtacagtgattccaaactacacatactcacaagatctattgagttgtctttttccatttaaaatgaatttatacttattgttgaaatattgaaaataagacggggaaacatcccttgagagtctcaccaatgaatgagaacaaacaactgcatttttcctttctcttttaagcacaggtttttctcttagaatgaatatctgtgagagattactttgattcatttttgattcatgatttccttaacaagagaagctgcaggatagtaaagctgatttacagcaacacagtaggattatcagtgttttagtcgctaaaatattctagaatatgatttttgaatcacaaaactggttgataccctataggacaataaaattgtaacccaggcttgtccaacctgtggcctgtgggccgcacaaggcccacaatggctttgaatgccacccaatacaaactcaaagtttcttaaaacattatgagattttttttgccttttttttttttaagctcatcagctatcgttagtgtattttatgtgtggcccaagacaattcttctccagtgtggcccaagattggacacccctgttgtaacctttggattataatggacagaaaccatttgcatccatccagaaggaaatacgtttgacattttagagcagtaatcatttgcatcactcatagtttttgataagttgatgtctgttcttacagagttttcaaataccctaactgacaatagtgaatgaaaacaaatgtgcatacccttagagaatttagacagtctttgagtgggtcagttatacagtactcagtatgactttcctctttattaccataaataatctctgcagactgttcatggtcacaaaatggcattgtgtttgggcttgcttcattgacagaaattcagaagatgttttaattagcatacaaaagtcttgtatatggacagcaaatagaatgctataccatgcagagcaactattatttataaagccagaatattaacttctatccgataacttatcaagaaatctgggagagcatttttaatggcttccattactccggacatcttccttaaatgcttctatttgctcttctgttccaaggatagggaaccaaattcaagaaattcatctctgctaggtttcatgttcagcatctctaagtgttggtgaatttctctttcctccagattttccaaatctggtatggttcttggcaatccaggaagtgaccttctgtactgcctgtaaggttgggcctgttaagtcataaacagttttgacttcttgggagagctttgtggatattgctctaaatatgaagttatatattttttctttaatagtgggcgtatcgtatttgttgaaatgaggcttatttttaaatttgacactctagacttgatcttggttgcatggtctatttgtttgactacattgtggtaaaagggatgacggattcttatcaagcctatgcaaaagatgatattgccattaaaaagtaaagtgactcaaattacttcctgaattctgagagatcagtgagaacaatttaccattaaaataatatttcatttagtttgcaaaatcagagttagctgaatagaggattagagatagagcagtatgaatgccaaagggttttccccctgaaaaaataaaacattaaaaataatactagtaatattccaaaacatatatccacatttagaaattcattttttattatcaattcaatcacttctatgtaattaattcttattcctctgtatcttaggctcttaatttggtttcatgaagtcatctatttctagactaaaaagtcctgaaaatctgatgtggctgcctagtactatctcatttttgtctatgcaattctttgaaatatttagggttaagaatacctggtaaagttctgtccacaaggttctaaaactgtcttttcttcattaatgagatattgtattttgtagacaagctcacagagaaagtagagaacacttggtgaatgtaagagttaagtggctatggttatttatggttaatttaacaaacaatatcagcatgaaggagagttaaaatcctttaaatcagttttttaagaacatattacagagagtgagggcactgacatatattcagggtctttgtgtaaagtacccaatctttgaacattacctataatattaaaaatattattttacccgtacaaaattatcttaaggaagggcaactttctcatttgatttgagaaatttttaggggcacagtgaacaaacctaattatttctagcctctttctttttgtaaaattaaagacaaatctttgtgattgcccagaggttctctgggaaaacctaaaagtagttcaggaatagatatcttggaaattatattttttttctgtatttagggtctgcctgatcttgaaggcaaaatcagagattttgtcacttgagtaataaagaattgtgtatacctgagagtagtgaatgtttgtggtttggctatttaagaaaatggcaatagattattttatgatgagcaagaaagctcaaatcattcaaaaatgaagaaaactctttgcaagaatatattccaatcatcgcaaagctcaggaagttacacttgtaaggtactaatctctgttctgtgggcagattagtactgccttttacaagcataggctgatttctccaagatcagtctgtcatttcaatagagataactgcattttagttttacattaacagggtgcttgtcatatattacatttttaatgcattacattaaacatactttatgaataattgcatcaaaatcatgcaaactttgccaaatttttaaaattttattacttctttatagcctttttatttgcaagcattataaaccaagttaaatctaactccctttttgcaaatctgcaattttctgtttccatcaacttctgcccttcattgttctcttccacattctggaacaaccagacactaagacaaaaatacttaaaggtatcagaaattatgttcaagctaacacatcacagaacataattactgataatgtgaaaaggtttgtcacagttatagttcagtttagatgagcacaaagtttatatttttcttaattttatagaagtaatcttagcttatgtttttagcaaactaatataagacagtttaaaagttcaggtaaactaatctcttcatcataaaacattcaagtttttttaaaaaatgagattatacttgtattatactgtacactgatgaaacaaggaaaagatgtgtagctgttttgttgttgtttttaaaatgtatttttttcttaaaagttgtatttacccatgacacagccccaggagatcctgacaacatgtgtccctatagctgtttttaaaaccaaattatcaaatcaggtctttttttttttaagagagcacagttaggctgggtgaggtggcttacacttgtaatcccagcactttgggaggccaaggtgggaggatcacttgagtccaggaatttgagaccagcccgggcaacatggcaaaaccctgtctctacaaaaaatacaaaaattagctgggtgtggtggtgcacacctgtagtcccagctacttgggaggctgaggtggcagtattgattgagctcaggagattgaggctgcaatgagccatgatcatgccactgaactccagcccaggtggcagagtgagaccccatcattaaaataagcacatttaaagcattggaatttcacaaaatttatttcaagaaaataaattcttgaaattctgggaatgttaaatttatctaactacttgataatctctataaaccaatcagaacagtaggccttctctgtttaatttattattatcctcgggagttagaaaaatacttcacctacaaacagtgttccccaccctgcccccaggtagaaagacagatgaaaggtttatggcttaagtcctacagctccaattacagatcaaaagtgaacactagaacacaaaatctcacttttccagatctcaaaagactgattgcttttccatcaggcacaaaatatattcctgatctgagtacacaaatagaaaaacaaattataaacaacaacaacaacaaacaaatactctgtcacctctcacctgaccaagactggattccgattctacctgtcaactcaccacgtggtcagatcgtgaaaccagattcctagtcatggctgccaccaatggagataactgtcagttgtatgcaaaccaaaaccccagtgaaacttggccaaggattagaaacaaaaactaagacagactcagtaaaacaaaagctaaagagattagcgagtcagtgaaggtgatgttctactgccatttgtgatttacctcagaagccaagaaaagatgtgtctgggcatccagcccatgagatatacttcatgggcagtgcaatttaattgactggatagagtgagtcacttgcacattttattaggacctccaaattgtcaaagcataattttcaaaaagtaaacgcaactcttatataaatgaagaatgaatagatgccaaagatttctttaactcattaatgaggaaaccaggtggggtaaagctggttcactaagcataatatctgtaatatttttaggtctgctgtgattctactagtgtttcacctggattttttttaatgtgttcaatctttatttgaaaactcaaggtagttttattgagtattaaagatcgaactgtaattatgtatctccaagggcctattaatgaggtaaataatccactttgagtccgtattaaataacctccagctgctgtgctatttgagatgtttagtttgttccttttttaaaaaaataattttacttttttggttttgctctcagctgccaattcatgctttggtcatttttgccagccttttcgttttttatgatcttagaaaccagttatcaagccttgatttgaaatgttctgaactaagagtgactaagtacaagtgaggttctcaaggaggtcctgagcacatgaagtgtgtgctctttagttcatagaccttgtgacatccatttggactggttggtggtcattttaacttcctcactctgagctatgtttcaagtagaggacattaatggataaggtgttgctagagggctgggatgctgattctttgacaaattagatgttctagagcatgggtcaccaacccctgggccatgggccacagaccagtagcgtttgtggcctgttaggaatggggccgcagagcaggaggtgagcggtgagccagcaaaggttcatttgtatttccagccactccccatcactcacgttactgcctgagctccaactcctgtcagatcagtggtggcattggattttcaaaagagcatgaacactattgtgaactgctcatgtgaggaatctgggttgcgcgctccttatgagagtctaatgccctgatgatctgtcactgtctcccatcactcccagatggggccatctagttgcaggaaaacaagctcagggctcccactgattctacattatgatgagttatataattatttcattacacattacagtgtagtaataatagaaataaagtgcccaataaatgtaatgtgcttgaatcaccccgaaaccatccctcccccatgtccatggaaaaattgtcttccatgagaccaatcctgttgccaaaaattttgcggactgctgttctagaggttagaaaagtcattataaagtagggtattcttgtattcatcctatttgacacctgccttcctccaagtagtccagaggtagtgatggccgtctagagctttttatggtccaaggcagtgaaagtcattttcagaagaaaaggggaaaattaaaaaatgaaagcaaaccctgatgcttttaagagtattcatttggttacgttgccaaaagcatcttgttcttttgtggagaaccagtggattcccacaaattgcattgtagccatccaatattttctttctgactggtgatagtcgtctgtagtgccttggtaaatagcattgttgccatttagaactatgcagggccacattgatacttatttctcaaacatgttgtaatgtgataccagctctcatgaagcatcatggagtaagtttttctgattttttacacacatacgaattttttccattacatatggattccttgaaaataaggttggctttcttttaaggcacatattaatgtttctgtggtagttatgcgaataggtgaaatgtctgggtcagcaattcctaccattgaaggtgttttgtccttatagttcccatgaaagcactttataactatataattttaatcagtaagaggctgggaccatacctatcttgctcaccactatagatgcacctcctagccagatgactagagtataggaagcattctttacatgtttttaaaaagagtaattgaatgtttttgatacccattcttgacatttattctgggtttccttaatctgtgactgtagtttgcatccctggttcccagatgataagcatttagttctaggtaatagagaagctctatacaaaaaatgaagatatctcagtataaatgcattcttttttacttccagaaaggggaaattcttttccaactttcaattaaaaataaaaagatgaaagagttatttttctttactttgaagattttctagcattctttgtaagaattggtgctctccaaggtcgtacaaaaaccaaagctacaggtctgagagtcttgcttgtgtaccattgagcagatgatagatctaatgtttctaaaattaagtaaaagactaattgagcatatttgtttaaggatttttggtattttataaaataaacttatatgttctctaatctctgaaacgtggtcagatgcagatgctattttaaagaccagaaaataaacaggttggtattatttaatgttgtaattaggaaaaattgtttaggaacccaagactagtgagcgttgtcaggtcaaagtgactccacatgtagatttttgcttctctatttgcttcttgctgtctctatttcctagtgagtcctgaccacccccccaaaataagttgggcattcagacctttttggctatgttgagccatattataagtttgacaatattttttgtttgaatagcagaatggacaatgttaagagcatgcttattgttgcttagtcatagtattaatcttttttttttttttagaagaatgtctttgaaatgtgaaggcaaacttaagtattgaaaactattttgtcctccagtcttacttgaatctccttcctgatgtggcccttccatttgctacatcctgagtataattttaatttattaaaaaaatggctgcactagctggaagaagccagctaaattgcagatggtgtgagaggtttgtttaccaacccaataaacttagtggctcaagacttttgaaaggatcttgagaaacaatggctctcttcctatactctgagctagaatggccattgtcaggtacataagttgatttaatcttcagattcagcctaagccttaagctgaatttttgctgtggagccttttcttaatttccctaatgtttaaaatagccagtcaattctctaccttttttttttttaactttcctaccttgtttggagggtttatcagatttagctcagaaatatgatgtgagccatgaatgtcattttaaatttttttatgttaaggtaagcaaaaaaaaaaaaatccaggtgaaattaggtataatatatttgacagcacaggagtagattgacgatgctacccactccctaaattagcaatctattctctaagtaaacagcactatttcttttttttttttttggatttatttttatttatttatttattttttattatactttaagttttagggtacatgtgcacattgtgcaggttagttacatacgtatacatgtgccatgctggtgtgctgcacccactaactcgtcatctagcattaggtatatctcccaatgctatccctcccccctccccccaccccacaacagtccccagagtgtgatattccccttcctgtgtccatgtgatctcattgttcaattcccacctatgagtgagaatatgcggtgtttggttttttgttcttgcgatagtttactgagaatgatgatttccaatttcatccatgtccctacaaaggacatgaattcatcattttttgtggctgcatagtattccatggtgtatatgtgccacattttcttaatccagtctatcattgttggacatttgggttggttccaagtctttgctattgtgagtaatgccgcaataaacatacatgtgcatgtgtctttatagcagcatgatttatagtcctttgggtatatacccagtaatgggatggctgggtcaaatggtatttctagttctagatccctgaggaatcaccacactgacttccacaatggttgaactagtttacactcccaccaacagtgtaaaagtgttcctatttctccacatcctctccaacatctgttgtttcctgactttttaatgattgcctttctaactggtgtgagatggtttctcattgttgttttgatttgcatttctctactgaccagtgatgatgagcttttttttcgtatgtttgttggctgcatgaatgtcttcttttgagaagtgtctgttcatatcctttgcccactttttgatagggttgtttttttcttgtaaatttgtttgagttcattgtagattctggatattagcccttaaagtaagtacattttttgtcactgggtaatataaagaaaaatgttatctgtcatcagatcaccttgggtcattagagaataaagcaaggactttctctctacaaattgctggtttgcgtgtgtgtgtgtgtgtgtatgtatgtatgtgtgggtctgtatgtgtgtatatgttgattaaatattaaaggaattaatcattagcaaagttgggctgccaattgtcctccattaactgagagtgaaaaaaaaaaaacggttgtcataccttttttctttcttcttcacttggagagatgggcagaaaagcagtgagaaggaaaaattagcatttggcaataatctaatgacttcacattggggaaacagagctaaagtcttcatgaaattctatattgcagtagtccattcttgagagcaaaccctctgttcttatagtagcagtacaagctattgcctcttgatggtgccatgcattaaagaatttgagagatgtatgttctgactcttcacatggttcagctttctcaggctaaacgctgaaatatagaaagcaacttggactaaaaagaggccctgtatgcccctgtgtcagttatagaagaagtctcattcttttttaaaatcataaataaatatatgaacacttgtttcttaaataagaaataaagatcataaataaaatttgtagaaagaaatataaactaaataaaaactgaaaatatatcaagaccaacaaatatataggagtggaggccaggcgtgttggctcacgcctgtaatcccagcactctgggaggccaaggcaggtagatcacctgcggtcaggagttcgagaccaccctgaccaacatggtgaaacctcgtctctactaaaaaaatacaaaattagccaggcgtggtggcacatgcctgtaatcccagctacttcggaggctgaagcaggaaaatcacttgaacccatgaggtgaaggttgcagtgagccgagatcgagccattgcagtctggcgtgggcaaaagagtgaaactcagtcaaaaaaaaaaaatctatctatctatccatctatctatctatctatctatctatttatatggagatacattaagtgaaggaggactattgattgtttctggtaaaagtggtccccatatttgttgtcaaattacttagtatatctatatttatttattattctttttttgaggagagtcttgctatgttgtccaggctggagtacagtggcatgatctcggctcagcctgctgagtagctgggattacaggtgcatgccacaatgcccaactaatttttgtatttttagtagacacagggttttgccatgttggccaggttgttctcgaactcctggcctcaagtgatttgctccccttagcctctgaaactattgggattacaggcgtgagccaccatgcctggcttagtatatctaaatttaaaagctatttattgagctaccattttaaaaatttatcatcagctaataggtttagtgattgtgctggctaattcttttttcttcccccgccccgagacggagtctccctctgttgcccaggctagagtgcagtggcgtgatctcagctcactgcaacctccgcctcctaagggttcaagcaattctcctgcctcagcctcccaagtagctgggattacaggcagctgccaccatacctggctaatttttgtatttttagtagagacggggtttcgccacgtatgttggccaggctggtctggaactcctgacctcaggcgatctgcctgccttggccacccaaagtgctaggattataggtgtgagccaccgcgtccaggctgcgctggctaattcttataatgtgaatttctcttccccagcttgagaaaagattatgggaatatttgctgtagagaatattcttaaagttggaaattgatttttcaaaaaaaaaaaaaaatccaaaacaagcattacaagggtaacacatccagcactttttcttttgtttcagccatctcaatgtgctagttatgaaggtgcttattagaagtcacttaaacaaaataatctctttatgttgaataatcggagattcacaagcaatcataggacgtaattcaaagggatcctgtgtatcctttacccagtttcctccaatggtaacatcttgccaaactataggacaatgtcagagctaggatattgacattgatacagtgaagatacagaacagttctaacaccacaacggtctctcatgttggccttttatagccataccagcttcccttctccttaacccccataaccactgatttcttctccatttctataattttatcatttcacaatataaccatatagcatgtaacctgtgggtttggctttgttcactcagcagagttctgtggaaattgggcaggttgttgcagtcactggttcatcaggtttaagactaggatacatgaggcaaagggaaatcccagagacacacttctgtgtgtttcgttgggtccccagtctgcctttttccacctttcagagtcttctgtttttttccccatataatgtacagggttctgagttatacttagtgggagaaatagggtaaagtatgtctaattcatcttccctgaagctgaagtcagtgagattagtttcctaaagttgcaaatagccaaaagctttgctctggtgaagtctaatgactgcaggttgaaaatttttggtttggataaattggtatttcttattcaaaattgctaagaccatatcccagctctggggttgtaatttggattttgagaaaagacagaattttaggaaaatgctgagtagaattaagaggaacaaatttctcatatggtgattattctttcattctgattatagaataacaagctgaagctatgaaaggtcatcttttccatcagatcacgaagaccaaggcttaaatcatcttaggcagagatttcaatttacaagttgtcttgggagaaaggaaaatattcaggcatacctctgagatattgtgggtttggttccagaccaccgcaagaaggcgaacatcataataaagcaagtgacgcaaattttttggtttcccagtgcatattaaagttatgtttacactatactgtaatatattaagtatgcaacagcattatgtataaaaatgtacataccttaatttaaaaatactttattgcttaaaaaaatactaacaattatatgagccttcagtgagttgtaatctttttgctagtggagggttttgtcttgatgttgatggctgctgactgaacaagctggtggttcttgaaggttggagtggctgtggcaatttctttgtgtgtgtgtgtgtgtgtttgtgtgtgtgtgtgtgtgtgtgtgtcttgctctgtctcccaggctggagtgcagtggtgtgatcttggctcactgctgcacctctgcctcctgacatcaagtgattctcttgcttcagcctcccaagcagctgggattacaggcaccagccaccacacccagctatttttttacatttttggtagagacacggtttcaccatgttggccaggctcgtctcgaactcctgatctcaagtgacccgcccacctcagccttccaaagtgctgggattacaggtgtgagccaccgcacccagccagcaattttttaaaataagataacaatgaagtttgtcacattgattcaactcttcctttcacaaaagattcctctgcagcatgcaacgctgtttggttgcgctttacccacagtagaacttttttcagaattggaatcagtcctctcagtccctgccactgctttatcaattaagctcatgtaatattctaaatcctttgttgtcatttcaaaaacgttaacagcacctttaccaggagtagtttccatctcgagaaaccattttcttcactcatccatatgaagcaattcctcatcagttcaagttttatcatgagatttcagcaattcattcacatcttcaggttccacatttagttatagttcttttgctgtttctatcacatctgcagttacttcttccactgaagtcttaaacccctcaaagtcatccataaggactggaatcaacttcttccaaactctcgttcatgttgataaaaatgtcaatacctcctcttctgaaccaaaatgtatttaatggcatcgaaactggtgaattctttccaggtggttttttgattggctttgctcagctctatcagcagaatcactacctatggcaactatagccttacagagtatatgtttaaaataaaaagacttgaaagccaaaattaccccatgggatgtaaaatggatattgtgttatcaggcatgaaaacaacctttattttccttgtgaatctttatcagagctcttgagtgactaggtgtgttgtcagggagcagtaattttattcatatatttttaaatttattttaagttctgggatacatgtgtataatgtgcagaattattacataggtaaacatatgccatgatggtttgctgcacctatcaacccatcacctaggtattaagcctggcatgcatttagctatttttcctgatgctctcccccacttcccccaagcagtaatatttttaaaggaattttttttcccctgagcagtagatctgaacagtgggcttaaaatactcagtaaaccatggtagaaacagatgtggtgtcatctaggctttgttggcgccacttacagagcacaggcaaaatagatttagcataattcttaagggccttggtatttttggaatggtcaatgagcattggtttcaacttaaagttagcagctgactttagctcctaaaaacagagtcaacctatcctttgaagatttgaagccaggcattgacttctgtctagctttgtaagtcctagatggcatcttcttccaatataaagctgttttgtctacgttgtttgtttgttgattgattaattgtggcccaggctggtgttgagctcccggcctcaagtgatcctctcgcctaggcctcccaaagtgctgggattacaggagtgagccactggcccagctgaaaacctgctgtttcatgtaaccaccttcatcaattatcttagatctttccaattgacttgctgcaccttctacttcagcatattctgtttcactttgcacttttatgttatggagacaatgtctttccttaaacctcatgacccagcctctgctagttacagatttttcttctgcagcttcttcacctcatttagccttcatagaactgaagagagttagggccttgctctggattaggctgtggcctaaggaagtgtttgatctattttgaccactaaaactttctttacatcagcagtaaggctgtttcactttcttatcatttgtgcgtgaagaatcacctttaatttccttcaagaacttctcttttgcatttacaacttggctaattggtacaagagagctcacttttggcctatctcatttttggcatgcctttctctcaaagcttaatcgtttctagcttttgctttaaagtgtgagatctgtaactctttcagttgaacacttagaggctatcaaaaggttattaattggcctaatttcaatattgtgtcttagggaatgggaggcctgaagagagggagagagacagggaaatggcctgttgatggagcggttagaacaagtacaacatttattaattaagtttgctgtcttatatgggcatggtttgtggtgtccaaaactattacaatagtaatgtcaaagatcactgatcagatcatcataacagatatgatgataatgaaaaagtttgaaatattgtaagaattaccagaatgtgacgcagagacatgaagtgagcacatactattggaaaaatgtgctaatagacttgctcgctgcagggtttccacaaatcactttgtaaaaaatgtactatctgcagagcgcaataaagcaaaatgcagtaaaatgagatatgcctgtagttactttcttaacactattctcagatttagaaagaagacatgccattgtttgttttgctttttttttcttttttatagaaatggggtctctctatgttgatgaggctggcttcaagcgatcctcctgcctcagcctcctgatgtgctgggatcacaggcgtgagccactgtgcccagccctcttttgcatttctctacataaaactttgtgacatgcttttaaaattttaacacaggccaggcttggtggctcatgcctgtcatcctagcaatttgggaggccgaggcgggcgaatcacgaggtcaggagattgagaccatcctggctaacacggtgaaaccccatctctactaaaaatacaaaaaaattagccagacgtggtggcacatgcctgtggtcccagctactcaggaggctgaggcaggaaaatcacttgaacccggatgctggaggttgcagtgagccaagatcgcaccattgcactccagtctgggtgacagagtgagactctgtctcaaaaaaaaaaaaaaaattaacacataatatttttatgtgatatgactcaaaaataattgtattatagtactttcagttgttatgttatagtctactgtcgtttttttacatgcagactttcctagttctttacccactggtttctttatgcattaaaaaaaatcttattttttaaaggataggatatgttttcaaacatcaggatttaaaggtctttatacctctcatatacttattttgattgaactaaagtattttaatggattgtgttttatagactatagtctttcagaagaagcaaacaagatcttctggaacttgatcaagctaaagtgaaaatgtaaagagatgacagtatgattagattttgttgtgttttctttaatggtgaagagcaatagcataatttctttaacagaatgggctcaggcactgtgcagacttccttctggaacactgtctatgtaagaaaaacatctggcatgttttacatagatgctgtatggaaattatgatgatacggatcacatgaatttctttgacttatggccggtttttttcagtcaatagggagaaatacactgttttctcctttgaatattttggagtcattcataatgggcattttctttaaaatgatatatttttgtcttttaagaatagttcacctccaaccttaatattttttaaaagtaaaacatttcataacccacccatctgctggttgattttaagtagaaagtgcaaaaagtcatcaggaaaaggtctaaaatatagaggatcctagataaatggtaattgtggtcagagatttacttgcatctgcctaacaaaatgctgaggtggaaaaaacaagtcaggaaaacgtcattggccaaaaagttaataggattaattaaatcaagttatattacttaagaatgtgtttaatgtaaatgaaaatcaaaataggctgggcatggtagctcatgcctgtaaatgccagcactttgggaggccaaggtgggaggatcacttgagcccaggagattgaggctacagtgagccatgatcacattattgcactgtagcctgggtgacagtgcaagacgctgtctcaaaaaggaagaaaataaaaataaataaacattactttagcatatgttagtaattaaatatgtacttaatttatatctatttttaaagtacaaataaaacaggcacatagccagaaatagtagtagaggcaagtgggtttgagggaaatgttgacacaggcaagtaacagtaaatatttattcagttttttttttctttgaggcgggggtctccctctgtcacccaggctggagtgcagtggtgtggtcacagttcagtgcaacctccgcctccccagctcaagtagtcctcctgccttggcctcctgagtagctgggactacaggcgtgagccaccatgctcagctaatttttgtattttctgtagagatggcatttcaccatgttgcccaggctagtctctaactcctggcctcaagtgatcccctaccttggcctcccaaagtgctgggattatcggtgtgagccaccagtcctggcaatttattcagtttttattttatttattttttaattggaaagctaccaaaccacaataggtttagagagacttctgagtaatcataatttttatttgtatttttttttgtgatagtaatttttaaaaacacaggtgaggaattggttcatgagataagattaaaagaactaaatttcttcttctaagtatgagtaaggcaggatatgagaaagttcctcaggtatttgaatgatgcatgccttcagtaagggggggacacccgtttctctgaagtttagggtggagccagggcaatgtgaagagaagcctgggttttatgtcaagggtgaagtatgtgtccttaataagacaatggattttttggagggtagttctttctagaagcaactccactatacttaatgtgttgctctgtagtggtgagcgtgggaggaccaaatgacaagatgcctttctccccaggttactatggcaactgggcagagctctgttgccaggggcagaggcaggtggaccacagggcagggagttggtggccttgagggaattttgtgtccttctagatagccaaagaaaccccacagatttttcagggagacatttggctgcataacaacgtatttttcctgtatttcctttccctgaaaataattgggtctagtttttaggcgtgcttgttaatcagtattagagatggttcttcagagtctacaagataattatctagttcacttcacgcttttgacagaaaccgtcctaaccatgactgacaaagagtgagcacctactacaagactggcaccacctttagacttgaaagcacatagtctatcacatgttcgcacacacatttctttactgaattcttccaagatcccaaggggaggcactaatctactcatctctgttttatagaccatgtaattgaggcttgaaaggttgaacttgattaaaaaaaataataactgtgttataggtctgataagtgccagaacttcaaatccaactctatgttctttctacttaagctgaaatacagattctgctcttcaagtccagctggacacagtggcccacacctgtaatcccagcacttttgggaggccgaggcgggcagatcacttgaggtgaggagttcgagaccagcctggccaacatggcaaaaccccatttctactaaaaatacaaaaattagtcaggtgtggtggcaggcacctataatcccagctactcgggaggctgaggtgggagaattgcttggacccaagaggtgggggttgcaatgagccaagattgcaacactgcactatagcctgggtgacagagtgagaccctgtctcaaaaaaaaaaaaggccaagggttctgtggaggtaagaagtcaatttattccacaaatcattaaaatataagatgacagagaggtactgagcctcctgtagtcctgatatctttatttttaagcacttcgcctatttctggtcattttactcctaattttcctggggaaagtgtgaaatgccccttctcattcgggatgtccagtctgcataaaggcaggagcatgctgccccagattgcaaagctctgggaatgagtggagatggaagtactgagcattagcagcttcttggagattgggagtttgggtgtggtgggtgtgaaaggggaagtagggaagtagaaaagtagatctactggataatctgatcaagatggctttttgtttattttgaggggagggagggacttgagtacattttcagacagaggagaaggagtcaatagagagggaaaggtgtaggagaagggataatcaatagagcaaaaccacaggacagtgggaacaaggtgcagtggtgcaggcagagggcttcctcttggaaagactgagagactctcctcagataactgagctaatgcttatgctgtttactttgtcccagacacccttctaagtgtcatagatgaacagtcatgcattgcttaatgatgggaatgtgttgctgagaaatgcattgttagatgatttcatcatcttgcaaaagtgtattatgaaagagaacggcaatgatttttcctattcacactggccactagttgcatgagagcgggccctctaattaggttactaagtctctctgtgcctcactttccttatctgttaaatggggattagaataaaaccaccccccacaaagtcatgaaaattaaaaattaaaatacaggtggggattgtgtctggcacccagcaagcactcagtgagttttagctaactgctgttgactactattttgttctggggataggtgggaatcatttaaaagtgtaagaattctaaagtagacagtaaccctttcagttggggtctgatgtaatgtgtcaagagattggctttctgttttttgtttttttaagtcatttatttatttatttatttgagacagtgtctcattgtcacacaggctggagtgcagtggtgtgatctcggctcactgtagtctctgcctcccaggctcaagtgatcctcccacctcagcctcccaagtagctgggactacaggtgcgtgccacctcacccagctaatttttgtatttttagtagagacagggtttcaccatgttggccaggctggtctcgaactcctgtccccaagtgatccaccgccttggtctcccaaagtgctgagattataggcgtgagccaccacaccctaccttaaaagtctgagctacctttgggagggtcaccccatgggtaagctagggattcctcaacatgttttgctgtaggtttgtttatatcagcatcgcagcaaacacatgagtaatatgttgcaacatattatgttacaacagctattatgtcattaaaaaataggaatttttcagctccattataatctttttttttcctttacgtttttcaggttagagaatggaagatgacacccattataattttatgggactacctttgtatatgtagcaccttgttgactggaatgtcgttatgtgtgcagatattttattttggtcaacgatggaccacaaatatgatagtggtcctatacaattgtaataccatatttttagtgtactttctatgtttaggtatgtttagatacacaagtacttaccatggtgttacaattgcctacaacgttcagtgcagtaacatgctttgcaagtttgtagcctaggcgcaataaactattacaatataggctaggtgtgtagtaggctaatactatataggtttgagtaagtacaccctgatgtttgcacaaaaatgaaatagcctaaccttgcatttcttagaacatatccccattgttaagcaacacataactgtatacattcatatatataaatcctcatgataacccaataaggtagatattctagtaattctggtttatacttgaggaaactgagacacaaagaagctaaatagcttggccagggtcacacaggtagctgcagaacccagattcagacctaagtggtctggctccagagttcatgcatttagccactatagtacattgacgaaaggaggactagatggacaaagatagaagagggaagtctagggaatttaagcagaatggccttggtctccttaggcagtgtgtttgtgtatgtaagtgtattgagcatgtttgagaaagggtattgaaaaatcaatgactggtaaatgctgtcctagttattcacgtatgtctcactctcagtacagttatctattattctttgggagaataggcattagcatacaaaatatcaatagtaatctgcacataacaaatgttggtcagttagtggctgtcacattctccaataacttacagttgcctccagagcagacacagtcatacaaaggcattacacttttgtttcctctttccagctcagccctactgatggtgcacgcatacatgcacatgctatttaaactaagggtggcagagtaaagtgttttcctgaccacaagcctgaaggcagacttcccagccagtgtataaaataaaataatgtgtggctaagaagctagatattgaactgacttccataaagataatttgtaaaaccaaatgataaaaacccctcacttttatatacaaatgagatcatttgtcctaaactgataaaaacaatactaaggcaatgtttgtgtaaatgtgaaagccagtgaaaagtctggagagcagtgtctccacacaagattttccccacatctgactccaaccgcaagttctggggtttcctagaccaccctcagattcgataattcactagaaagactcacagaacccattgacagctatgataagcacagttacgattcactatagggaaaggatacagataaagattagccaaagaaagacacacacggggcagagtccaaagagttccaaaggcaacacttccatgtccttttcctgtaggtcagaaagtgttactctaccagcattaagcattggtaggtgatagtgtgcacatgacagggaggcttacccaagctgtagtacccacaggttttttgtttgtttgtttgtttgtttgttttttgagagagagtcttgctttgttgcccaagttggagtgtagtagcacgactgggctcactgcaacctttgcctcctgggttcaagcaattctcctttctcaccctcccaagtagctgggactacaggtgcccaccaccgctcccagctgatttttgtatttttagtagatacagggtttaaccatattaggctggtctaaaactcctgacctctggtgatccacacgcctcaaccttccaaagtttggggattacaggtgtgagccaccgtggtcagctatttttttctgttttgtttttttgagacagggtctccctctgtctctcaggctggagtgcagtggtgctatatcagctcattgcaacctccgcctcctggactcaagtgatcctccagccttagccttccaagtagctgagaatacaggcatgagccaccacgcccaggtaatttttgcattttttgtagagatggggttttgccatagtttttattgagacttcatcacataagcattactgattgatcagtttcccacatggttaatttcagtctccagcttggctgataacccatgacttaaggctcccacactaaatcacataattggtctttctggagtggccagcttataccctaagattatcacatgtggcccactctaccctaaacaaagacactgcagctgagtatgacatagataatctcccagaagccaatggcaaaggtcagacctctctttgggcgaagacaaattatttattacccaataagtaactgagctttctttagtaggatccctgagtccctcatctctaagttttggaaaagtgttctgcctgaaattgcacatggtttattagtcataatgtagaagtccattagtaaaatttaaaaaaaactccaagtcttaaatacaggtctgtttctttcttacactccaggactagtgtgggttaaaagaggcctctgctccacgtttcctgatggagccaacacctgcagccaatctggagagccactctgccatgttagagcaaggcatgtgatgaattatgccctggctgttgttcatgcagaagtgatacaccttgcttttcacacttcattggccggtacaagtctgagggccatatccagtttgagggtgaggaagagaggagccatcttaccctgtgtccagaaagaggtgaactgattgtaatagcccagttactaccctcaaggatttatctctaaaacagacagacccgtataacagactttgagccattgcttctgttttccctcctttctgtcattacctaattgaaacatcaggatttgtacatggaatcctgggaagtctgcatacctgctgtcagcaccagcttttctcattctaccactcactcagaccagggttcctgactcttgtggtttccaaaacttactttagggctgttgtaatccctaagaggaagaaatgtgacccatttttgtgcaggtacctcattcctcttcccccaaaagaccccatctctctagccacatactagttgctgatctctgagcataccatgatatgccacagctctatgcctttgcttctgtggtgcttttatggaaatgccctgcccaccccactgtcccagtagagcagacagactcatatttatccttgaggactcaaatttgtttttctgtaatttttgtgtactgtttacccatctgtgaactcataggtggtctataaacttctgttatcactgcttttataagtgatcacctatttgtgcctcctattaaaggtttgagggtagaaatgctatgctttgctatgtgcagtgtctcatgtgagaggccaaggtgagaggaagattgcttgagtccaggagcttgagaccagcctgtgcaacatagcaagatgccatctttcttccaaaaaattaaaaaattaactgggcaagtttgcatgcctggagtccccgctactctggaggctgaggtgggaggatcccttgagcccaggagatcgaggcttgcagtgagctatgagtgcaccactgtgctccagcctgggtgacattgacagactttgtctcaggaaaaaaagaaaaaaattttcatcttgccatcttttttcatttatggatccccagcacgttactagacaataagtaagttagtagacctttgttgaactgaagattatggagacattgaagtcctggggctaatagaagagagaagtcaagtcacaccagttataataggtcctcctaaaaaaaaaaaaaatcccatttcaactaaattatatctaaaaattaaaggttgaccttttgttttaagtaatacatgacccaatatactggttataacaaaaggtttttagcaaagattacacctgtgcttaagtgtcagcagttggttttctgcataatgtatgtatttatgcagtatgtgtaccgtcctgtgacctacactggttggtgttagttacaagggcccttggatgggtttaggagatggatgtaccctctcctgagggctgtgaatctgcagtgggaacaatgtcagacacagtcctctgaagatggaaaaaagctcagaggtcaaaaaacatacccctagcccatcaccattttttcccctttaacctctaagtgaaaaattgcacacaattttctttacgtatactttctaaaatcttgtgtctccttcaacacttcctttgatatatgtgggagatcaagatgaagaaaaggagaaatgggaatggcgaaaaaaataaaaaatatatgtaaaataattttattcaagatgacctactttctaaattcttagcactgatattttggagcattaaggtatgtaggctctgtacttggacttttcaagagaatgaacactagattcctagtttggaaaggtgggtaggatttggaaatctcagagggcagccagcctcttgacttattaaatagcaggttgttaggtgaagcttcaaagaaagtttggttttaagtagggggacagacatcacagtttgccaggaccaaccccagtttgcatttgaggttccagcataattattaacagtgccctctttgattcttgagaggttctggtctggaatggtcattctggatttgggtcatgcaggttgcaggctattggcatgatgaatgggaaggaagaagactccagagtgcagaaggctgaagggagaattatcttatgacagtaatttctgttcagagttttccttaaaaggcttcctgtagtgctttctgaaatgccttacagactttcttctgatgcaccttggacatcagtttatttttctttagtgcagcttttatagggccagtgtgtctcagtgcaacctggttttcttttaaactcgtgggcagcagtgctgcatgtgtcagtgattcaaacttgaacagattggctgtgaatggggtgataagaatagagagaaacacataccagtagaccaaacttcctgttcacaagcctttgaatactgcgtttcactgtctgaaatagcattcatcttaaggctgggatcatttattccctttggaattaagcaataccactgcagaaaaagaaactattttgggaaggccatgtgggaggaatttttctctgtattccaggctgaacagaaatatctttcatgcttttgaacaccacaccttagagcccaggtaattggaaatggacaactttcagataatcccaaatatttatgccaaggctaatgtatacatgttatactacaaagattaggaaagacttgagtttagatgcttcaacttaattacctaagtggcagaaaaagaactttccttcagagattcgcctctaatatagatgctattgagaagtaaaatgtaacatcttgtccctctccctctccttacatatgctcttggaggttgtttttgcatatgcccatgtagacttttccagattgttggagaagtttaaaataaggcaatgaaggctatgtcccccctgcttcctccctataaagctgaggtgggcagggcttggcagctggtggaaactgaagagataaataagtaccagggctcctggatggatagggtgcagaagagcccaagatgagagtgtgtagctatgagtgcctgccgtgggaagaggccatgaggacggagctgcagctggagtccagaagttcaggcagtgaaagggaggtgcgagcttgtaggaactagtttattagtccttttgatcaagctattgctcttttgttttttttgttgggggattactttagagggcaaatgtaagtcagatacaccttaaatatctgtcttgtcatttgagtaatgtatttaatggaacctaaggagttatgttggtctgttcctatttgacttttctacttgttaatagcatcaactaataaagagctaattgtcttgtaaagtttgtctttacaaattagctgcaattgaaatgagaacagcagtccagtgatgcttaatatttttctgctttattgctgataagcagtttggaaaatgtttttctatggagagcgtgtgaagcctcttctcagtgtggtaaatgtgatcacaatagatggtttttgtttttagttcttttttcactttggccttggaattaacatgaaaggtaaagatgttgagatttcctacctcaagcaatgctgtctaggtttatgagaagcagagaagcattttgtaaattatatcctgttgctcacaaactgtataattaacctacttaaagttcaaaatcatagatatctgcctgttgcatggggagtctggtaagattgcagtactcttatagatatcaatggcctatgtattgatttttaacaaataaattttattttctagctaaattaatcaaagatttaatgacctatgaatttgagttacatcggtgtgtatctggacttcatgtgaaatgttcttcattttagtgcaacattctatctcttttataattttaattatataagaaattagtagagaaagacctttatatggtgaccaggcattaaaaagtttagaaaattttcaaaattttcaagaaaaaaaaattgaagacataggtcttttaaattaaaagattcagtaagtagctgtttttctctttgtgtgtctagcacatagtctaacagtaggataatatttaggaagttagagaattagttttaagcacaagtattaagtcagtagtgatgaaaaagctagatattgttgaaggtagataagtagagcctgggaaggaggatagataggaaatggaggtttaaaaaaaatgaatttggtgcaatggcatgtgcctgtaatctcagcaacttttgggaggctgaggcaggaggatcactggaccccaggagttaaataaagtgagctatgattgtgccactgcactccagcctttgggacagagtaagaccttgtctttctccctaaccccacccttcagaaaccttggagaatttataagttatgaaaaggcttactgagtgctgatgtgtgctagggccagccctgtgatataccaataaaggggagagagtagaagccagaattgagtttgggaggaaagttgggcattgttaaaccccatttcacctggatctttaaatgcatccgtcaaagattatgaaaatcatcaccagccaagtgtttgtgggtttatgtatggaatgcaagcaccagttgtcccagcctcttcagtctttttatttggagtagtattcattctcacaaacccactgacctccccctcctccctgtgttccaggagagacagcgtctggagaccatcctcagtctctgtgctgaatacacaaagcctgacagtcgcttatctactgggaccaccgtggaagatgtgcagaaaatcaacaaggagcttgagaagctgcagctctctgatgaggagtctgtgtttgaggaagccctcatgagccctgacacaagatacaggtgccaccggaaagactccctccctgatgcagacttggcaagctgtgggagtctcagtcagagcagtgccagcttctttacccccaggagcaccaggaatgatgaactactcagtgacctcacccggactcctccaccaccatcctccacctttccgaaagcttccagcgagtcctcttatctaagtatcctaccaaaggtaatgttggcccagcaaagatactaggatttaaggtctagggctgtgcatatgctttggcatgaaaactgatgattttatcatgctaattatccaggatgttttcagtgaaatttcaatttaagaggtcattagctgagcgaggtgcagcaaattagggtgtttactgtaaagtaacaaatttgcactgtaaaaattgtagcagcacagaagagtagaaagaaagcacatttctcttctccctgcaccctttcaggttgtacacctgagtgataagcaggtgtaaaactggtgctaaaattgtcttacctgccttcctaatattttctgtgtatatatggctatctgttataggcatagacagacagacacacacatagtgttctgtactttttttccctcactaaatgccttgggtatctttgcatattagtatacatagctctacctcattctttttaatgaccaattgctcttcttttgtttgcaactaccgtttattttcagggtttttttttttttgctaataaaatccatatgcgcaaatattgtagcatatatatatttgcacaattctgcaaatgtgtctgtgggatcacttactaaaagtggaattgctgggtcaaagagtttgtgtatttttcactttactcaatatttccaaatcgtacttctaaaagaccatattaaaaaaagagtctatatatccaggtgacactttgactaagtttatatgtgcatataaacacaagtgttctccatacacttgccaaggttgcatattgtcaaaatttttcaattagccaaattgatagaagtttaatttgcttttctttaattatacatcaagttggggatctttccatatttttagttattatttgtattttttgacccacttattcatgttcttcacccatttttttaattgttttatttttcttgtgttttactgagtagtaagagctgtttgtggtaagcagatgagccttttatcataactagtctttattttgactttatttgtattttttcggcatataggagtttaagatttattggtactcataagtactatttagtcttctggttgtatgttggtttaaaattgtcatccttttgaggatttgttaaatggagtttaaggaaaaatcttttaaatttttttttctttttctttttgtacaggacttagaaccccaaaatcttttgttattacgtttttttcacacaggttaagaatttttttctacaacaatttaggttttaaatttctccaaaaatgatttgaaggagcttacaatgaaagatataaattttattggactaaaattagaataacaaaaatagtaaataggaggaaaaagcagatatgatattcacaaggtagatttacttatttaggaataagtaggattaatgtattgatttgcttaattgatgcttactattaagttcaactgtgagattctttagttaatcttttgttataagagaaggacacattgactctttaagaggaagatattgtcatggtactaaattctggcagtaatttatcacatgggcattattcaggggagtttgcgtgtttgtttagctacagcaagacttttacactgaatgttcctagtcagaaatcattatctacctagtgagtttttccatgatacacatcaggacttcggactgttgaatacatgttggacatcaatcccttcttttttctttctttctttttttttgagacagagtcttgctctgtcacccaggctggagtgcagtggtgcaatctaggctcactgcaacctctgccttccgggttcaagcgaatctcctgcctcagcctcccgagtagcggtgactacaggcacacgccaccatgcctggctaatttttgtatttttagtagagacaaggtttcaccctgttggctaggccagtctcgaactcctgacctcaagtgatctgcctgcctcggcctcccaaagtgctgggatgacaagggtgcgccactgagccctacccatcccttctttttgctatagtgaccatgtttaccttactaattctcaatggagactaattctgaacaggacatctgtttctgtgggcagagagttgcaatgattagaaaccaggatagggaagaaagtaggggcagggggaatcaaaagttgttgttcaggcacagtaaatgacccatcacttgaaaagttgagctgttgtcatcagccattgggcttccttagaaaccctttgcttccttttgatcttaaatcttttcacatatcttcctttatggagatctgccagttttttgttaaaaacattaagctgtgtgctgtctctaaagactatcttttgggagacaggtttcctcctggagagggctatgacaagaatgctgttggtgcgtacacgagcagatcttggcagatgtttttaattgctcaagcgtgtaattgtggaataggaggcctctgaagcttagtgcagcatctgttgttgcaagagaggtaagactctgcatcctttagaggcaggaaacatcaaggacacccaggttaccagacagcagtgtagaaagagtacaagtgagcagagctgatggattccaagaaacacatttttttacttattactttctgaaggtggacatatattaccttgagacagcagacagaaaattctttttaaaacaaccttcctatttgttttgcatgctctttctcttcaattaatttccacactggattatttgcctaacaaagtacaatgttaataatcgatttagggataaatggagaagagaggaatgtgaaaaacactgtaagttgacttaactatacagaacaatcttaatgatatttagaaaacctgagagttaccagtcaagaacttgctttatgtaacacttacagatgcagatgactttggaaatatgctaattttagttggcctttgtgaaccaccccctgaggtaaaagttgtctggaaagtggctcatcttcctccttttgagtcccttgcacccctctctcctttggctgcaaaaagggttttaagaagaaatctgtgaaaaaggggcaagcagaaagtgtcttttcccctatcatctctcccctttcctgtgtggatcaagtttccccaaagataacatattagaggatgcatatacacacgtaatgtgcttattaaaacatgtcactgttagtagattcctgtccattactggaaaaaaaaattcccagagaaattaaaatgaagggcatatgtttaaaattacaatgttctctgtcactgtaaaacttaaagctactcagtggctaccacaccttggctttctattggttttctttatttggttaataaatgagattacattgtcctcaccccattctatcataaagcgtttggttttagaatgcttcctggagattttgcttcttataaataacttagaaaaaaactacaaacatttcctagatggcatttattgctataaacagactcttaagttgtctattattaaatatatctactgtgataaactttctaaaaactttgaattatgcagatgattcccactattaaccatctttactccctacttgcttataaagtttagagttttgcagattgttctgttattttgtatttttcttaatgccttgcttccacctgtgaaagagatatttttaagccattttggaagtagaaacctaatatgtaatcttgacccaacaggataccgcccttggtgaggctttcctgctaggattactcacagtgattctggaatgccatttcactgttacaggcattcctcatggcttaaaacaggcaccttagtattaggacaatgagctttattgtctgtgataaaaaggtcaacagttgttttattagttgataagatatttcatgtaagatgacaattaaaaagctaaatgtcaaagcttggaagagctgcttacctttgtcctaacaaacctgaggtactaaatgctgaatcgttgaatcactttagaaagctacaaagtaaagaataaagaatataaatatgaataaagcatacagaatatgacatgatggatggcttcttaaatgtattatcaggattgtcaaataaatttagtgaacctagtaaaatatactcaacttaatgggttttttggggggttaatttgaagattttttttaataattagtgacaaatattcaataatttactcaactgggctgctgttttcaattttcatttgtgaaactgtataattattgacttgctgatccaaaaaaattacttctttttcaaaaagggataatttaaataaataatacattcatactgacatatagtatatatagaaaaattggtctctaccaggtgatatccaagataactaaccagaaattctagaaagaagaagctatttgtaattcactccattctcttcttgaagaataaacagtcacattttgactgtgtgtgtgatctacaatattgccttcttccctggccatctgtcatagctccattcaggagtgtaactatgcactctctcacttgtttcttgactttcttatttcttgccgatgaaccagtttttccatgaaataattttatgaatggtggccagtgtcctgttttagggagtgtcttagatgctatatagcaagaacgtctataggacaaagagaggaaatagtgcactaacacaaaagtgaagcatcaattaatttaatactgagtgtgtagttttaaaatattttatggctccccaaagtgatgtgcccttgcttttccaacttgtgttgagaaggaaatacataagcatgaatgctcatttgcaggtaaccctagcagcaagacccaacagtatgcctagagattcaagaggcttttgcagatgtcctcacctggaagatgggagagaatattgtgcttgtaataaccatagcatcatgcccaagagatcccgaggaagatgccacaagtcttctgtcagttctagttctctgttatgctgaactttctctataaccttggagaagtcatctcaatctctatataccacacctttcttatctgtgtaatctcttagttcttttagcttcaaaaggatatgaattggtgaactgaagttggtttgtctcaactctcctgagagcctaactgccaaggatggcatcatgtgggaaaaacacatcagagctccaagcgtgcagttgcagggatgcttttaaaatctacatgggcatggagactgtgagaccctagacctgtggatggtttacaagtcaagttgggaaattctagaactgaggtgtgaataatccatttctgtgttgattaatcgcagaccccagagggtataagtgaagaacagagatctcaggagttggctgcaatggaagaaacccggatagtcattctgaacaacctcgaggaacttaagcaaaaaatcaaagacataaatgatcagatggatgagtctttcagagaggtaaactttttaccctcttcccttttttctttctttccttcagcttaaaaatattgctacttattcaggaataggctttggaggccagatacatagacgtcaacacaagcaaacatttattcagtgggttccctgtatagagtgaaaataccctttttctacattccttttttctttctttttttttccaaccagatgagataaacatattaagccctctttaatgtactttatgaatctccaaccaactttgtttaaactagtacgtgctttctgacctgacctaacagaggatctatcagctgaggtgctctgtatttagatttcaaggtcaaatccagcaaatgttttctgaacgtgctttactatgagttggatatcacattggcaccatgatgaaattcacacacggatcaaaaatcgatccaggtttctagaggtttggaaaccagggggaagcagagagaacacatattgcataaccacaatagaagacagtggcatttttatgttacccccatggcatgagaaggggcacgtaattctgcctagggaagatctgtgtgtctgtccttacagatgataccaataggcccttaagtggttaggggactgctcacctgttgtcttgcgtagagacgctggaagcccctcctgctagcattgcgaggaatgcagagctcacatgctgggcttgggtaactttctcttcccatgctctagggacaaagaaagacgtggctgctcccatggtggtttgtgcttgatcttgagctgaagcaaataggcaaaatatccttgagaagtgagcagaagaggggttatagtagaaaagttaagtgataagatagctagtttttttagtgaatatattctaggctctctagctcgcttatatgggaatcttgctttcacatgggctctctggagtgttctcaggcacccgatctggctgctacagtattacttttggaaatttgtagctgttgcaaatgtatctctagggtggtcagttgagaatatccccaaaggtgaaacacttctgagctttggtttgtgtccttagttggatatggaatgtgctcttttggatggagaacagaaatctgaaacaactgaacttatgaaggagaaggagattttggatcatctaaaccggaaaatagctgaactggaaaagaacattgttggtgaaaagaccaaggtaaaagaaaattatatttcaatgcagtttttatgggcaaagtggtggtcccagttgattgaatttaaatgttgaatgcattactggggttttggatttgtgtgtcatgttcctggaggcagtggcactagagaaaaatcctaagatcatacattgtcagaaaccaagaactgccaggtactgggcagctgatgctgagagagcagagttcatataatttgtgagccgatattcctggcagctttatcctacttgagatgagtgcgttgtttgtttgctttttttcattggcctttctgcttttctgattccattgtgttttttaagtaatttctttagtatactgaagttctttaccactgctgccctgtagggatggcttaagcaaattcaaatagggttgcctcatttcttttatttcttttcatttttctgtttattaaacagatgaatgagaaccactcatctcacctgctttgccttgctattgttttcaatgcaagtgcactgctttttgacaaatgtattggagtttctaaaattttcttcttggggtagtcctcacacactgccaagagaaagctatctgtgaaacacagttgacacttatcttggaaaaggttctgtgtatacattttggatcacaacctgaatggtggctgatatctattagggaaagtatgaaaaatcacttgcaaattttagaattcaggatggtagttgggtttgtctgtttatgtgtttttttcctctgggaaatatacattactctcctctcccattctgagttagttagagcagaactaaaaataaaattccaataaaactgaaaataaaattccaatttgagaaagaaaaagcaaataagctttaacacattcttccttactcaacatgttctccactaagctgagaaaaagaaaaaatttttagtttgagtaagttctagtggtaatgtgtagaaagaatttctgctgaacgtgacttcctttttaggctcttatttgtttaagacctataaataagggcatttgatcttggtgccagagaatgagctcaaaatggtagtcagaaataaagtcaaattaaatgctacacatcaatttcttggttaccagcatgtcagaattaaactgcacaggcttttcatattaaattttatgtacgttcattctgcccccagactttttttttttttttttgaaacggagtctcactctgtcgcccaggctggagtgcagtggcgcaatctcagctcactgcaagctccgcctcgcaggttcagccattctcctgcctcagcctcccaagtagctgggactacaggcacccgccaccacacccggctaattttttgtattttcagtagagacggggtttcaccatgttagccaggatggtctcgatctcctgacctcgtgatccgcccacctcagcctcccaaagtgctgggattacaggcgtgagccgccgcgcccggcccaaacttttaagtagtatttgggtagtgggtgtatttttcctaaaaggccaaaatgaagtcaaagagttgactgtctaagtctgcagtactgaaggattcagttaatggctatgcttttcaaagattctgcaagaagccttcattggaggcatcagatgtcttgtgttaatattttattatcaagtaaatattaattaaattaagtaatagtagagtagttttattgctatgtatatcatattggaaaactcgtgcaacataggaattaggtatcatgttccctgtgaaccctcctgccatcctaatccatgtagttatttattttgtgtatctcacatatggcatggcctgcaaattctatttgtgtatttctcattaatatcagattctacacaaaagtgaagcaagttgagccaatgttaaatctcacttcccagggaaagttatcttatgttttcaaggtggaattctcaggtggaattctaggaacacgggcagaaacaagcaaggaagctacctccatccttcctaatattgttttgatggcttgacagaggctatgcactggagaggggactacaggggcttgacgcataggaccagctcatacagctatgagggaattagttggtcttagaaggtaggattattctctgtcattacatcatgtgaaaaatggcagaaactggcttggggtgaggaactccagaagaggatgtgggaagtggaaacaaagactggtctagatgatgttactacgtattcttgacaactaaactcaaatagagactcaacacagcttggcaaaaacattattatgtttctcaaataaatttattccaccatttaatgacacagctatttcatacactctgttcatactcctggccaactttcatccctctggctcagagatcatcttaccatagagaaattagaagcatcccatcttctcacaatgaaggcggggttccctccttccatcaaagaccactccctttggatgtgctctgggtgtcatcctatcccaccttcttgaggtcttcagtctttctgcaccctcaccccctggggtcagtttctctctctttactgtcagcatgccaatattattatttttaaaataaattactactttatcgattaacgataagctactaccttatctctcttctcttcatcatagctaaacttattaaacaattttctgggtatactgtgtctccttttcttcattttccaattaaacattcttcccactccagttggcttagacctctactcctccatcagattctctcctgttaagactactaaagacctcagtggtgcccagcctgctgggtgcttttcagtcccctcatgatcagactcccgagcagcattcagtacaggggacagctcttttcttggtgcttcttcactgtctcccttttgtttgcctctgtgtaccacaatcttctggttttccatctatttctcttacctctttctcactctttatctctcatctgaactcagttctcttgtaccctcatgtccttctatagctatggcttcaaataacttgtatatgctggtgactatcatagggatttctctagttcataaccctttttggaattctgactcatatcctgtgcctacctgacatccccacttggatatttcatgggtatttccaattgaacacacccataactgaactcttgatcttatcttttcccttgccttccaccctccaccctccatcctctagtttttccaaccaggagattgcatctctattcacctatatgttcaacagaaacctggaaattgatcttgacacgtctttccttatcatccctacattcagttgattaccagcttgtttcttgattgcttcaacatctctgcatctccactaacagcattctcttctctattatgaaaatctcttatttagtctacttccacttgctttccttcaatccattctcttcacagcagccaatgtgattaaaaagaagaaattagaccatattactgtggtttgcatcacactgtacttgactatgcatccaaattccgtagtgtgatctgtcaccagcctttctgtcaccaccctcccattcttcacagcactctcagagtcaccttcctttctatctttctgtttgttaaaagattcatcctcccccaaccccagtcctttgcagatactgttttcccctacctggaattcccttcctcatattccatgcctcattggttctgtctttcagggctcaagatcagtgttagtttttcagaaaagccctcctagacctttccagttcgggttagattttccctgttgttctttttacagataaacattttataatttatgtttgttttgagcctactagacatttatatcccactctagcctgtgaaatagaggagggcactagggcactgtgatccactgtttatccagcccgtagcatgtgccaggcaggatactgcccagtgtgcttacgaatattgttgttggattttcctgctaatggctggtccaggctgggccttagcaaaacactgagccaaacacctgccaaagagtgcagccaagtttcaggacagctgggctgggctgcccgtgtgcatatgccaggaggcctgtagtcacacggcccatcatgccaaagcgtaagacagaaggaggaagtggcctttccccttagggatcgtgtttccttttccatacacctgttgctgtggtcagatataaaccatggaatgagaaaagcaaaacctgaaaagatatctctgttgggcaagctccgattcagatgttaatagtacatcctgtaagcctggctctagaattttggagacaaggccggagccataggaaaaaggtttaataatacctcagaatgcctccccattcaaatcttttgttttttatttttttgggacagagtctctctctgttgcccaggctggagtgcagtggcttaacattggctcagtgcaacctcctcttcccaggttcaagtgattctcctgcctcagcctcccgagtagttgggattacagactcccaccatgacactcagctaatttttacatttttaatagagacggagtttcgtcatgttgtccaggctggtctcgaatgcctgacctcaggtgatctgcctgccttggcctcccaaagtgctgggattacaggtgtgagccaccaagcccagacatcagcattcaaatcttgatatgaaattactgatgttatttttttggctctgaagattggtctttagtgttacttcttttagctgatttaggaatgcattttattttgcacattcgttaccctataaaatataaaccataggcatacttctatagaaaacataaaatatagtcagtttgttctactgtgtatttattgaacatttttgcagcagtttcctgcactggccttttattacccttaggggtaccactgttacgaacatcaataaccctgtttccatctgaccttgagatacatgccacctgccggttgtgttctcggatagtagccacatcacagatggagccactatgaacattgataaagcttaaacaaggatctaactcagacataaatctggagggtatatttacttggtgaagcagtaagcaaagagaccatcacattttcttatagcaagtgaaagaagattgggacctctggtctagcaaactgttttcatttaatgggcctggtgacagagtagggaaaccgctagcaccatgaagcccagcttgggcaaaggcctgactgtggaactggcttccttcccttctactccccatccccattccaaggcagagcctgatctcaggcaatggctaagaagatacggatgtgtgcatctgtttgcgtaggttttctgtctctatttctagctgtgttaaaaatttgaaactaaaaatatttttcaatttcttctatttatggattatctgttttatctgtgcttctttttagcgcacaaaaatcaagtcagttgtaccaaaattaaataaaatggttaagaaaagcttctgattcagtagacgtgctgaggggtcttcccatgacccagatgataaacatatatctcaaactatccttttgtttaaggacaaatattgtgtgtcttcacacagatgcattgttatattttgtagccatcctagcctgcactcttaaacacatgaaacacacttaaagttttgaactgaagcttaaatcattctgtgccatacaacatgtacctgaatgaaatcttaaattctttgacttcctaatgtttctacagtaagcatatatcattgcatgttaaatggttaaatcttttttcccacgattttctggccaaagtacctgttacttcctccccatccttcctttggagccagagaaagacagtgagcctagcccagaattcttcagcaaagtgttaatacctcttgagtgcagaacaggtgccaagtcacagtcagtgtgcagcagggacccagcccttcccgtgcctctttcttacatttcaaagttggctccctggtcagaggaagtggaactgtataatgggatttggggattaaatcaataggattccagcttgaggctattttttttctcgtagttgtttgattacataagtcctgagtttctgactttctagttttttttttttctatgctaaacattcatcaattgtgtaattaaaatgtcaaagccaaaggaaaaaaatctaagaaagaaagaattataggatgttcctcttcagaggcagagaatggttggttactcaacaatcattatttgttgacacaggtctataatctttcctctgcagttccaaaatctgaaaagtttcatggggaaaaaaagtaattttgtaaggttgaatattcataaatgtagctacagaaatagtaacatgtttgattagagggtactgctccaaatctcactggaaatgtcatataatatacgctatataatctgtgttacctctatgaaatttcagaatattccaatatccaaaatacttcctgacttatatagtatcatggacgtatgcatatgtccagactcatcaaaaggaatgcttaaacatgggccatgtttttgcctatgaattctacttcaataaagctgttaaaagaaaaacgaatttcacataaatgattatgggcctaaaatagttgcctaatctatgaacctataaggatgcctgcctcccaaacaaagccacagggtttaggaacaggaaggaaagggatttttaggatacatagataggactttgaatggacctcccttaaaaatgactggccaggcgtggagactcacacctgtaatcccagcactttgagaggctgaggcaagaggatcacttgagctcaggagttcaagaccagtgtaggtaacacagtgagacctcatctctgtcaaataaataaataaataaacaaataaataaatgaaggcttagagactataaattttgacatatcactgcgtcaattccaaacctgaccgcatatctaatgaaatgtggcccgcgtgcctagagtgctgggttctgtgctaaacagtttggaaattacaaaagtggattttaatttttaggaaaatctttatcatgctaacagggttgtcagaactagcaaacagaaatacaagaacctcaggtacatttgcatttccgacaaacagaatcattttgtattgtaattatgtcccgtgcaataattgggacatacttaacattaaagtcatttgttgttcatctgaaattcagtgtagctgaatgtcttctgttttatctggcagccctacaggttaataaatttgtaaccttgaaccatctgtttatcaagtattgcacacttaaatatgataaaatgattttttaattggtatcctagaatattctgtgtagtattgaaactccagagagttagcaaattaaatttgcttattccttcagtaatacaacttagaagagagacaatttatgttattgtcttttaaccatctagcagaataagtagtcttttgacaagccttgcgtttttaagatcattcaagattattggcaactcgtgtgcaagttcaaattctttagtgtaaacttttaacaatcctgatcatttttatggttagacgataaatatttcacctctgaatttgaaatgtatcatccctgtctgtacgaatattgcatactgcaatctgtcacagtttttgtttggtttacttgagacatttaatttaaatgtaaaaaatttacaattgggatattatttgtaagagaggacttttatactgtgaagtaaaggcattaggaccaaatattttaagaatagtttttggtggatcctgtattaatgttctatatattcattagaaaaatcaaattgtagttaattgcttttgcctctctcataaccctgggtggctaagtcaatgggtctcaacctggctgcatatcagaaaacctggagagattttaaaatgcttgttactaagccttctatccctggatttgtaaccaaattggggcctgggaaatagtatatttaaaagctcttccacattgttctaatgggttaactggactgtgctacatgaggacaggatcaattgctctcttttctttcctctcctctagttttctttcaattgttattgagcaaatgaacaaacaactcactatggaagcaaatataggcccaattttataaactgatttctaccttaatttacccatgggtaatttatctttgtctatatatgaatgtggaactctagaaacgtcagttttaaatatacaaaataggtcaaaactggcatgaatttgtgacccaactggattttgctcgtacatcaagagaagacaagtcaaagtgagaacagtgctgtctctaggaaagtcccattctgtttgtggttttataaatgccctcttgtacatctggattttcctggagtgttccaattccttctaatcttaattttttcaataaagtgaaatgtgataaatttattaaaaatgcattttaggctaggtgcagtggctcatgcctataatcccagcactttaggaggccgaagtgggaaaatctcttgagcccatgagttcaagaccaccctgggaaacataatgagacccccatctcttcagataaaaaataaaaaattaatctggtatggttgtgcacacctgtagtcccagctacttgggaggctaagatgggagaatcacttgatcctaagagttaaaggctgcagtgaactgtgatcataccactgcaatccagcctggatgacagagtgagacactattttaaaaatttttttaattcattttttttcctgaaagtacatttatgaatattttttaaaaagttatattctctctcagtttggtgtttggaaaatattattgtgcctattgcagttagaataggtgagtttaccaatttaaatatggtggaagagaaaaacctcaatcttaatattttacatttaaaaagcaagaatccctaaaccctcaaatgccatctattttacattcactgtagaaggtgaaactttcagctctaattaactgcttgcctagagctaattttcctttaacaacttcctggacaataaatagaatagaggaatattaatttctttctggctcaaagttggtctacttctggcactcacaggagttatatcacctctgccgtcctctgtgatttatagccaggcccacctgccactggtcttctttcatcctttccctttacttcctttgccctagctttggccccactgagcttttgctctgggacccaggtagtggtcacagcattactgataaacagagaagctgcaaaaagttctaatggtgcctgcttgcatattcttctagatgcccccttgtatgaattgcaaaaccttttgagcacctcggaagtaaggcactatttaaatataagatttttttttttttttttttgaggcagagtctcactctgtcgcccaggctggagtgcagtgacacgatctcggctcactgcaagctctgcctcctgggttcacgccattctcctacctcagcctcccgagtagctgggactacagacacctgccaccatgcccagctaatttttttttttttttagtagagacggggtttcaccgtgttagccaggatggtctcgatcttctgacccgtgatccgcctgcctcggcctcccaaagtgctgggattacaggcatgaaagatttttttttattagttgttgatttgagtttattattaacaatacaaacatttgagagcatcaggagtacttttgttatttcttcagatttgagacctgtgttttaggccagtggctttctgtattatcaaatatcatatcagtgttttctgtcaaagataactttaaattttagggctttatacatgtgctattaaattataatgagtagtcttcttttttaaattactttttagctttccatttggaggtagagttgctgcaaactctggtgatgcagtacctagaaatagaactcttgggataaaattattttgctgtgtaaatagggcaatctttgatgcacacacataggagagaacaccttttcttagccagaggacaacagatattctgtatggctggttttattaaggaaaaaaaaaattctgaaactaaagactaaatctaacggtgctagtatattcagtttaactatggattagcacacgtgggcatcctttgttctgttaataatgccattgctttctccaactcttgcacaattggtgtgtacagtgagcaaacttaccattgaagatcgaagaaattttcgttgttgtctgttaaacttttaagttgttacagaaccatgttagattggtatgtgaagtaggggtctcaggtttatgatttctgaatttaattattttaagaaaattacatttctaaagccaaatatacatttctaaatttaagtgaaaaatggagactcaagtgaactggtattgatatcatgtagttttagatttgaaccataacatcttttatacggaatctatgtgtttatgtaggaaatcatggccattttgataaaatgtagtaaggataatgtcataggactatttcagaggaaaatccttaaaaagagtccttctgtgatgtgcttagaagctagttttgttcctgccagtttatataaaaggaatataaggaagggaaggtggtggtcatttcacttaccgaaggtcaaattgtcaaagtgcttcataaagtgcttttgtttaggctgatggtgttacacaagaagacacatctaaaatttgtttcaattgttcagagcatcataaaaagaacacaagttgggaagactggcaccaaaaaactgaagttttgtttcttaatttaagaggtagcattgtaaagccgtgtaatcactgtattagagtatttgcctattaaatcctagagaatgtccagggtctcattggcacgtgtgacttggaagggatttagtattctcttccttctcctttcttctctgactcttttctttttttcacagtccgtgtttcagtttatttttatgtcagtcgttgtgggaaagtctgtatttccgcagtccccgtcacatttttggtgtgtctgagctgcctatgccttcccttcactgctttgtctgtcttgcatttttactagctctctctcagtccttgaataatctctctggattaagattttctaactctgtaagttctgaagttttccagatagctagaactgtttcagatgacggggatgtcaattaatacacctagaattcctctaacctgagaacaaaaccagttaattccaaaacttgccatacaaaggccttgagcgagttaggctatgacagtccttgaggtaaatgccccctttcctttgtctgtttctctgacaggtgactcttagcaaggcttgcttatgaatttggttggcatttctttgattgttggccaatgaccaacactcaacatgaccattgcttcccctgcttttgtaacatggtggcaggaagaagggagggaaggaaagtgggagtcactgccatgaagtggactgtgctttgagaatgcagaaacccagtccctttgtcttaacttccacttatatccctttatcctagccactaacaagatacgtttctacattcatagattgtccagagtttgtgtatgtttgtttatgttatccttgagaaatgttcactagcacctgcttgggggtgtgaaggtaatttctattctattttctggtttctgaacttcaggagaaggtaaagcttgatgctgaaagggaaaaactagagaggcttcaggagctttactccgagcagaagacccagctggacaattgtcctgagtccatgagggaacagttacaacaacaactgaagagggtcagtagcaaacaggaatgcaccagttattttgcttttcgtttttgtttttcacttaagtgccacttacctgtgacttacgacttcatatagcataagtttgcataagttctagtcattagatacgtttaaatggaaatatgcatgctaacagtatatattattccatgctaatcagtttttaaaattccttgttagaatccttcacataatttctaatgcaaaaccatttctggagtcatttttttttgtgacaaaagaagctatttctgatttgtaaccaacatcaacattatagcatttgtattaactgatctcttcccctgcattctctgctgcatcatgaatcctatttacccttgaatgttttgttctttagcttgattttagactcttgtccccagattatcctattttctgatttgctccccaccagcagctattcttttgtgtttccttttctttctgctggttagtgacattgaactaattagcccaatcccaacaattaaacaccaagacccaagatgcagggcattacaaatgccctcaacatctcatgtgagcttcataatttctaagaacttaatgcagcatagactttctagttaagctttatcaagttattctttgatccttaaggttggcagcgtttaacacaaccacactggttatcttctgaaagcaagacttcctaggtggatagtttcacaaacactggcacagccacttaatatttcatagcctcttggcaactgggtcatttcctttgaacagcagccccagtaaactgcttccttctggggaagcagtcgttaacagtcttggatatctgaaagagtcacgtaatagtaatttgtcttgagtgattaacaatttatgattctacctgagtataacaagctagtttcatccatgttattatgtttgtaccttcttgggaatggggaggttgaaaaatttattgagatagcacatccttaaacgttcttaagatgacctttaatacaaaaatatttgctacctctgagaacgtcactaggtgaaaaaataacagttaaagcttttcaatgtattgcagaagttgagagcatcttaataatgagaatccaatgcagctgtttaaactgcagcataatagttttagtatttatttcttacaatgttggagcaaagaaagttttaaccatatgtcttccctttactctttttattgtatgcagctgaatttgttgtaagaagataaaacttcctgcctctcagtcacaattctctgaaaattttatgataaaaatgattggaagaaaactagtatttgtaaagtaatttcagtttgtaatttgcttgtgtttatgctagttaacaaaagagatgggaaaactgattttttttacatttgcttacattttaactctccttatcactaaagattttacacagtcattggaattccttatttacagtcagcagcatagttgtatattttgtccttcccttcctctggttatccatttattgtgttctttataaacattgctttacataaaaatttatagactctattcacaacttggattatgattaacataaatactgtttagcttaatctagattctgtaggataactcataatatcagttatatgttccaaagattctgactacaaaagaggaaaggaaatgatgcagacagtcttttccattaattgaaggcagagacttcttccctttcctctccagagtgtaaaattcttataaaacctctttccttaggagagataactggcttgtgatggctgcagttcaccttatattaagaggtctactaattctgtttttcaaggatgacgaccagtataactcttcaccaatgccttggcttaatcagtaaaaagttcacttacttcatgagaagtaagtcctaaagttcactttaggacctttctgtgttatcacagcttatctccctttagacttcaaacacttcaaaatatgacttcactacaaagctttcccttgggcatttaaactagatttaataaagtttgttttattataaatagcttcattaggtggtaagtcacacaaagtaaaaaataaaagaataagaagaaagttattttattaaactgcatattgaatacttcagctgaaattgtagaatgattttgtgcatgcagcataatgacttgtggctggtcttcctacctttaaacatgatgttagagtctgaatattattttcatctgatattggttttgtggcctgtggttggtatgttgttaacatggccttaccaatctggtagttgatatgggcacagcaatccctgggttactaatagtgtagaaaagaaaactgatgttaaatgaaaatgagtcatttaactcatctcatgtggaaaaagataatagaaataatctcatcctaccttctcatttcatatatgaggatatttaggcccatagagttggaatgggttgtccaagactaatggataaaatgattttagagccagtgatagaaaaaaggtctactaattgtagatatcactggataaatttttttaatcaagaccaaaatcaaacttttatttgagtaaataatcaaaagcacaagaaaactgtcccagccaggtaactgtcttcttgtgcttttgatatttactcaaatgaatggttgattttggtatcttgattttttttttttttttttttttttgagacagagtcttgctctgtcacccaggctggagggtagtagtgcgatctcggctcactgcaagctccacctcccaggttcacgccattctcctgcttcagcctcctgagcagctgggactacaggcacctgccaccatgcctggctcatttttcatatttttagtagagtcggggagtatcttgatgttttaaaaaaattttattcagtgatctacaattaaaagacctttttactgtcactggctataaaattagtttatccattagtcttggacaagtcattcaacttctatgggctgcaatatcctcatatatgaaataaggagtgtattagtcagggttctctagagggacagaactaatatgatatatgtgtatataagatagatagatagatagatagatagatagatagatagatagaaggggagttcattaagtattaactcccaaaatcacaaggtcccacaacaggctgtctggaagctgaggagcaaggagagccagtccaagtctcaaaactgaagtacttggagtccagtgttcaagggcaggaagcatctagcacaggagaaagatgcaggttgggaggctaggccagtctagtcttttcacgttgtttcttgttttgttttgtttctgcctgctttatattctagccactctggcagctgattagatggtgctcacccagattaagggtgggtctgcctttcccagcccaccgactcaaatgttaatctttggcaagatcctcccagacacacccaggatcaatactttgcatccttcaatccaatcaggttgacagtattaatcacctcaaggaggttggactagattatttcaactgtctttttccatattccaaaagtatgtagttaaagtgtaaaagttaacaaaaccctgagccccatttaaatttgcttctggagttggccatgagctgttattactgcaatttctcctggtcataccacatctattctcttcttcctgtccctccatcaggcaaagaaaacataaagaactgcatgtaaacttctgccgtatacattatttaaaaagttactggaaagaaaaaagaaattgcacagaatttcctttagtgcagctgttttaggtccttcatgcctggcctttgagcttgccatccagtagagatatgtaatgctcttttagtgagtgaagtatagttaaaattttcattcaattagtcatacatacttcactttgaacttcctgtgtatattattctgtgctcaattaaactattccttcccccaaattccattcccagacttcttattcatacataaaatcttgtaaaagtttttattcctctccctaatagttttttgtttaagatgtaagtttatatacacacattttgatggtttagataacttgatcagatgattatgtcagtggagtctgagtgctgagcttagcctaattttcaactttcttacttagtatgccattattttcatgcagtggtttaagtatttactacaaataaatgaatgattctttgactttcatgcagggttaaaataacacatattgcatattagccagatgtggagtaagcaactgactagcaaagtgtatatattctgagtcatatggccactttgaatgaagattacttataagccagaaaaagggcttattccttttttttaaatctcagtaatctttgaacacaaatcaagcttaattggaagaccttataaacttgagtgtatgtgcttattatgtcagccagtgtattatttcaaaacagaagatattgttttaagccataacacttgagttagttcttaattccttaattcttttaactcattaattcttttagaagttataaatttgaaatgtctgattaacttgaaatgtcaaccaaacacttgaaattgagcacatatttttttggagccaaataaaatgtaaagaagtgttaagaaatgttgaatatgtttttcaaattgtgtttttcctgttcttaagctttgagaattgtctgtgttgacatgatagtcttgttgctaattactcagtagctaatagctcttctatgaatcatccctagagtaaaagtcattgcagaagatagaaatacatttcattttatcataaagcttgctttatcattaatataaaaaccagagtggggatggggttgaatatcgatatagaaataacttagcatataattatttatccaactctctttgatgatttgattgaagaacaaccaaaaaatgctttggttatgttagctatgtagagctgtgagccacagagcccagctgcctcttccttttggatgtagattatgtgtaggttatatttataaaaaatctggctgggtgtggtggcttacacctataatcccaggtgagtggatccatgtgagtagaggctgaggtgagtggattgcttgagtttgagaccagcctgggcaatatggcaaaaccccattctacaaaaaagtacaaaaattagccaggcatggtggtgtgcacctgtagtcccagctacttgggaggttgaggcaggaagattgcttgatcctgggaggtcgagggtgcagtaagctgtgttgtgccatggcactccagcctgagtgacaaagcaagaccctgtcttctaaaaaaaaaaattaaaaaaaaaaaaggaaaagaaaaagaaatttcctaaacatacgcgatttataaataatgttaaagactccaaaaataagagggtgtttaaacaaaaagtatattagagaataatctatacaacatgcatcaatctctgcatgaatgcagatgcataaatatattcctgtcttcaagtacctcataggttagagaatgctttttctagaccatctgattttcataatttctgatcttccttaaatgtcctcaagattattctgagagtggtggtgtttaaccttttgagtcaccctttgtgcctcataaaagctttgtttacactttccagtaaaaaggtgtgtacatatttttaatgggctcatagaaccctggctttaaaacctcacttttcaatttttaaaaaaaagactttattttttagagcagttttatattttcagcaaaacccagcagaacttacagacatttgccatattccttctgcccctgcacatgcgtaggctcccctcattatcaacattctccaccagagcagtacaattgttacaattgctaaacctccaccgacacatcgtcatcacctagagcccatgtccaaaagttttttgattgcttatccctttaataaaattattagagcatgcatttcctttgtagatatatgatatataatccatattattataaatatatatagtgtgcatgcccaaagaatgtatatatttaaaatcgtgtatacatactatgctacttgtgtatacattagaaaacatatgttgagaaactgaaaaagaaaataaacaattaaaaacgagtatgaaaggggtctaatttttttctgcacagtccagcagattgtgttgtgtaccatctgggatacatgtatccctattagacacctctggtctgtacgtgtgccaacttttgactctttaatctccacattagtcttgttttctatgaaaaattgaagaaaagaagagcttcctttcctttcctttcctttctttctttttttatttttatctttatttttattttttgacagagtttcacccttgtcgcccagggtggagtgcaatggcacaatctcggctcactgcaacctccatctcaagcaattctcctgtctcagcctcccaagtagctgggactacaggtgcccaccaccacgcccagctaacttttgtatttttagtagagacggggtttcaccatgttggccaggctggtctcaaactcctgacctcaggtgatcccccctcctcagcctcccaaagtgctgggattacatgcatgagccacccaccacgcctggccaagaagaattttcttgtaacgctatgttacacctttggactgcagattatgtttaggttatttactgagttgtttttgtacttccttctccattttaaagccacccagtgtgggtttaacgcaagaattcttacctccacagagaagtctaaaactgagggtgaaataaatgctgccttttcgattccctctaacagtcacgttctgggatttaactccaaaagatagtgttatgttctaaccctggtcaatattgtaactggaaagatatcttggaccaactgcttttaataaatgtttcttcacattaagaaggtggtagttatctcagtgtgtcttgttttcattcacttttctccaaaggatgctgacctgttggatgttgaaagcaaacactttgaagacctggagttccagcagcttgaacatgagagccgtctagatgaagaaaaggagaacttgactcaacagctcctgcgtgaagttgctgaatatcaacggaacatcgtttctagaaaggtactttttccaggtgtcattcaatgtgaaaaatcaaaatatatttctgcttaacatagctatgacatatgtctgtctgaatatcacatttgacagattacgtagtctgccatgtatgtggcaaatggtgttccaaattagacaaattgagacatattacagttgttacataatgctgtagatgcatttatgaatagtacctaattgtttcattcacgtgaaaaccaaggcatagaaaatcaggaattcagatattggttttaaactatttctttttgcaatcatagtaactgggttcagaataattctatgaacaaagtctattttggatttttctctgttttcattgctcagtagttctcaaaactggctgatagcttattaccattagaagtagaatgccatgtggattactactgactccacccaacccctagcacttagatatccagcccagaattcaactttgttccagaatttagaatcatacccagggctctgtactaaaccaataaaattgaggaaaggaaagacaagagaaggtgttttcttaaactctcagtttaaataagaaattccattgtttttttctcatgaggcgtacccaagatgttgtaaaaaattcatcgatagcctaaaactagatttcctgttgacttctgggttcttcaagataggtttttaatcagtcgatctatattagccttcagtaaagaaagtattgaggctgacaggtcaaagaaatgcctcacagtctcttggtaataatcactgcccaccatcaactaaaatgtagtcactgttattccagtggtgaaaatttttttctcccttttctaggacagactagcaaacctttgagtgtctaatgtacatcttcctatgatcatctcttttcctccaggaaaaaatttctgcattgaaaaagcaagccaatcacattgttcagcaggctcagagagagcaagatcattttgtgaaagaaaagaataatttaataatgatgttgcaaagagtaagtatttccttttcagcactggctacagtaaaacataggttccaaattcagggaaattgccccctttaaagtaaacaccttttaatagtgaatgtctatacaatttaaggaagatttttatatacttttttatttaatcctccacattcataagctgatactctgaactattaactagcattcagaaaataagcaaggatgttttcttcatgcttttttcacattgtaaaaatcttaacgatggaaagtctgtatttttaaatgattgttttcctcttttttaaaaaagtcataccattcatcaaatagttaaaatgcattctaacaccaatttagggtggacttaaggaaaaatgtcctttttactactgtcaaatattttggcccagctgatctggtgttttgaactctagttatttgttcatgggtctttctagcaaatgtcacattgcatttagtttgaattaattgggtaggtagaaactccatatggtatggtcaaggggtggcaagatcatcctcaccaaagagactatgtcctcttctggtccaacacctaaagtgactacctgtaaagggatttctttgcccaaagacattgaaaagcaagccgtagcctaactctctgacatgaccccggtatcatttcagcaataagacaccaaacattaaagttaatggggctagtctcagatctgaaccctgcatttatgccactgcattagcaatatgacacttgggaccatgagaatggcatgcagagaaagaccaaatccagaaggaagtattaaaggatgaagctgtaccatagtcccacctaaaataaatgagtattcattcccttcttagctattttaggttaagaggaaaggggaaggcctgacaccatggctcatgcctacaatcccagcattttgggaggttgaagcaggcagatcacttgaggccaggagttcaagaccagtctggccaacatggaaaaactctatgtctaccaaaaatacaaaaaattagctgggcatggtagcacacaccttgatcccagctactcagaaggctgaggcaggagaatcacttgaatctgggaggcagaggtttcagtaagccaagatcatgccactgcactccagcctgagcaacagagtgagaccctgtctcaaaaaaacaaaacaaaacaaaacaaaacaaaaggagaagagagaggaaatagatccttcacatagaattataagcccatttggggtgccccagcagcccgcacatatttctgacaacttccatcttcctctttttcccacctcgaagtctctgaatggagttgtattttccctctctatcccttgctctggggatgaaatctgtttccattagcatcctcactactattttacctttggaacacaatattcaaagtcacaggttaacttagatagtgtaatatgtagtatttaatatttaaaattttagccaaaatagagaaaaactcccagtgatagattttataaaatgggtaagcacaatcacagatataatattttcctattaaaatatataagatacaattagattgtaaaaattgtggtctataagtattaagatttttatttttctaaactgatctatagatacattttaatcccaatcaaaatcccaacagacttttttctagaaattgacaagttgatgctaaaatttacagttgatcttcattattcagggattctatgtttgtgattatgtctacttgctaaaatgtatttgtaacctctaaattgatacttgtggcacttttgcagtcattcacagaaatacctggagtggtgaaaattttgagttggccaatatgcacattcccagctgaggttgaacaagggagcatcccgccttcttgttttctctctcatactgtaaatgagtgttatttttgtggattatttaatgccatgtttttacgtttttgttttttgttggtgatttgctgcataaaatgcctcccaagcatagtgactaagtgcagtgaagtgcttctaaatgcaagaaggctgtgaagggccttatggagaaaatacgtgtcttagatgaacttcattcacgctgttatagtgttgctgactgtcagttcaaggttaatgaatcagcaatatatatcttaatatacaaataataatatatagtataatatgttaatattaatatataatggtatataatatgtaatattaagtaagtgtcttcaaacggaaacacacatgaaacaaagttcagtattgatcagttgatgaaaatattgtgactagaggcttgcaggaacccaaccctgtattgttttaggggcagtggttcagtattcactaatttcagtgttcgtggcaaaattatataacatagttaccaccaataatcaactgcatatgaaaatgcaaagagcctagaacagccaaaacaactttgaacgagaacaaagttggaggatttgtactcttatttcaaggtttactctggagccatttaaggcagggtggtactgccatacaaatacatgtatattaaatagatcaatgaaactgaactataagtccaaaaatggacccatacatatatactgtcttttgatttttgacaaaggcaccaaaacaattctttcaaagaaatgatgctggatcaactgagtcaacatggaaaaaaaagtaaacctcaatattgtcatatgatatatgtaaattcattcaagatatatcagagacctcaatataaaaattaaaatgataaagcttccagaacaaaatataagagtgaaagtttacttttatagccttgagtaagcaaaaatttttaaaagaaatgacaaaagacttgtatccacaacatattaagaacctgtacacatcaataataatagcaatacatcaataaatttttttaaaaaacaggcaaaagtcttgaataaagattttaccaaagaacgtatatgaagaaccgaaaagttacatgggaaaatactcatcattagtcatcaaggcaatatgaattagaacaacaatttaattccatctcataaactaaaatgactaaagaagtgaaaatctcaaatgttgacaagaatatgaagcaactagaactttcatacattgctgacttgagtgtaaaatatacagtcctttcacagaactttatagaagtttattttaacatccatctatgacccagcaactccacttctagatatttacacaatataaatgaaaacatgtcttcatataaaacttcttcaagactgtttaaagtagttttttccataatagtaaacaaaacaaaacaaaactagaaaacctaaatatccatcaataggagcatggataagcaaattgttaggtatatttatataatacaggactcctcaacaataaaaaacagtgaactactgatgcctgtaacatggagtgaaagagggctgacacaaaagaatgcatattgtatgattccatttatataaagtggttacattttataagtaggcaaacactttataacacaggcaaaactagtgttaaggccgtggaaatcagaacaatgcttgctcataagggtggaagttgacaggtaggggcatgaggaaatgattggggtgacagaaatgctctttatcttgtctaggatattattccatttgttcaaactcataaatttatatacttaagatctatgcatttcactgaatgcacttttttttttaattaaaaatattttagccccagccatggcaaggacacatatacaaattatagcacaataaaaaagtgacccataaatgttgcttaataccaaattaattcaagatgaatcatagacaaatgtaaaagctaacaccataaagttcccaaaagaaaatatatcactgggttgtgatattacatcatcagatattatgtcatcaacaacatcatgtgatattacatcatcaacaattatgtgttatttggaaggattaaaagaaaaagacattagaaaataatttttgttggttttttttttgtttgttttgttttttcttagacagaatcttgctctgtctcccaggctgcagtgcagtggcgcgatctcggctcactgcaacctccgcctcatgccattctcctgcctcagcctcctgagtagctgggactacaggtgcctgccaccacgcctggctaatttttttgtatttttagtagagacaaggtttcaccatgttagccaggatggtctcaatctcgacctcatgatctgcccgcctcagcctcccaaagtgctggggattacaggcgtgagccatcacacctggctgaaaataatgtttttaaaattttattttaaacacatttttaaatgactctataaaatttattaggaattaaaggttatattgctaagtatgtttggaaacaactcatgcagcatatcagctagcagaagatgacctctagtatacagatttgaaattttgactgagtatgatgagaggaaatagaaatgggggaaatatgtgagaatctgatgttagtctctaatgcaaagtcaccatgcttctcagttgcatcgaaggttgacttttaagtttaataggttttgtattccttcaggaaaaggagaatctttgtaatttggaaaagaaatactccagcctctctggggggaaagggtttcccgttaaccccaatactttaaaagaggtaagctatgattttacatgtcgctttatgttgccttagaaatcaggagatgtatttcagctttatttgattagctgaataataaaaatattaactcaaaggacctgtgaaagcactcaatgcttggatggtttccctgcctttcattatgtatgctttgaggatttcagagattatccttgtgtctaatgcagatgcacattgtgtgtgtgtatgtgtatgtgtgtgtttgtgtgtgtgtgtctactttgctgggtggtgacattgtgggttaatctggggtttcaaaaacttgaagatccagaccaagatgagtcttaaattctcctttttccttcctgagtctcctttctccctcccctctcttattttgcttctccttctcctgagtcttacagaacatgaaaatgcctgcaaacattttagaaggtggtctggtttctttcttttccctatttccccacccccgcaactgttgtttctgccattttcccctctaaactggaaagtcctatttacagtaaactgtacatactctttatctccaatatccacctttccccagtccccatcaccactttgcccaccagatatcttaaggaactacactgccacactgggagaatattttaactctaatttggaaaattataactgagaaaaaaaatagtttatatatatatatattttttgagacagagtcttactgtgttgcccaggctggcatgatctcagctcactgcaacctccgcttcctgggttcaagcaattctcctgtctcagcctcctgagtagctgggactacaggtacccgccaccacacccagctgatttttgtatttttagtagagacggggtttcgccatattggtcaggccagtctcaaactcctgatctcaggtgatctgcctgccttggcctcccaaagtgctgggattacaggcgtgagccactgtgcccagcctatatttatattccttatacttattgtttttctaaaaagctaaaagaaaagcttgcttctacttacgtgtttgcacaatcaaaaaaaaccctttagacagtggagtttggactcttacatagaaaatatttttgtgtgtgtaagtatatgaaacaaaatgctcatcacaatattaagtgtgactatatgtgtacctcagaagcattttgtgaaatatttcttccaaagctttattagatcattcagtttcatagtttcttttcattattcggaacgtggaactgtcaggttcaatgaacaaagcgtggttgtgaatggaatgtcatggcctaagacaatgttagcaaggtgggtaagggtgcaggtcttgtgagtctgttaaagaaatatggtctactgcatgtgtaatgggaggcctttaagtggttttaagcagggaggtgacatttgctatccatttgttaaagatcactctgggctgctctgtgactactggatcataaaaagtaagagagggagatgcagggaaattgttgtggagattactgcagtagcataggctagagatgctggtggcttgaattggaggatggcagagagatagaaggagttagctggattagcaggtattttggaggtagagttgacagttcacagttcttgctgatagattggatgttgggatgaagtaaataaaggaaggtgtccggaatcatgccattattccagtttgaataatgaagtagatggtaagcaccttttagtgagatagggaaaactggggaaggaattgtttaagagggaagatttggagttgactctggacatacagagtttgaagagcttgtggcatccagatgaattggatgggctctaaagtcttttcgtctcctaatagaagaatgaagtctttccttttctgttaatgagttgctctttatttcctgcagacattctgatgtcaaaagcacatttagtttgttttactattgttgtgtatctgcaactcttctgcttgttgagtacaacaatgagttgctatgagaacacatggcaattcttgtgctgtgtgttcactttcctgtacaaagcagacttgactcacaagatgtttttctttttttcttctgctctctctttcattctctctcctttttcttttttaaaggggtgattgatttataacctcttttaaagacctcccaggttttaaagcagtttacatttttgaagcaattaattaaattgtatggtttatgactcatataaataattaaaacttggcttcaaaacagtcgactattaactgagcaaaagaaaaactcaaaattgttcattttctttctgattcagtattacatattgaatgaacttgacctagttgactacttcttttcttcagtttaacattataaaactttacgtgatatctatcctgccttctgaagtgcaagtctctgacacatccaatttataaacaatcaactctagcattctccactttgttatcaaccctttcaaggtttttaccaaaaatcaaggttttttatttttcagcctaaaatttgtaaaaggattgatggaggcatggaagaatctttatgtcaaatttaactcaatttcagctttaaaagagaggtgttattttatatagctttttcacactgttttattggggtggtgaaaatcatgattggtctgtataattactttccatgaaaattgacaagtgccttttccacagattcgggagttctgcttctcagatattttgatccgtgggtattttctctaagctgaagccagaactgaattattgagttcaaaagtaactggaaattctctgtcctatgggtagagatgggggttagggaggctgccttgaattgaaacataccctggttgcaactctaccttaggactccgtgtgtgtgtgtgtgtgtgcatgtgtgtctgtgtgtttgtgcatgcacacatttgttttgttagggaagactcacctgcatgaaaggacagtgttatttttattctcatttggttgagatgcccaaaagctagaacccactgtaaataattactgttttaaaaatgttttcttagtgtaaaacccagtagccctcagcccattttcctcacactttaattcatcaggaaacagaaacggtgaaaatctaagaatgaagatttgtcggaaaggctctttaattagggaatgagtgattgcattgtcaattttacatcttggtgtactattacatcttggtgtgctattactttaaatgtatatgttgttgacaaccttaatccatcaacagaatgaatgctgatacttctggatattttaaaatagaagattttgggttatttatactacagttatcttgatttcatcagaaaaattatgtttaatacttagaatgccaattttcaagattaagcaatgtaaatccattttaattgctgattattcctttaatgaaacatttgataataccacagatatctggctgtgccgctctaagctaacttcattgtactgggaacattaatactctcgcatgcctcagcttttgctttctttgtgtttaacttctgaattcctccttttagggctatatcagtgtaaatgagattaatgagccgtgtggcaattccacgaatctatccccttccactcagtttcctgctgatgctgatgctgttgccactgagcctgccacagctgtgctggcgagccagccacagagtaaagaggtgtgtaggcatgacgtttcattcattcactgcttttcttcatgtcagaaattaacccacggccaactgaaaatgaggtccacgagaacgtgcatgacaaatgtatatctgtttggccagaggggtagggtaaggctgagtttataaagtataccaatttgggggtaatgctctgccaataaaaaattctagaaaccatgaaatttatgctacggagtggagtactaggagaagtaagtcaaagaaatatgttctatgtcttagcactctaactcaacttagttttcttataaattaaaaagcctttctaaaattgttgatttgagttgccttttcagtttgactttgttttcgattttgttttgtaacatggatgcttttaaatattaggccttttaaaagccttctaggggaggggtcaataataataaattaaaataccttcagtgatccaagtcgcttacagtgtgggattttaataagaggctaaattgaaagatattgcccatcaattgtaacttcttaattaaaatataacaaaacagaacaaactatcaatttcatttctatgtcttattctttcatttcatgtggacacatatataccttttctttctcctataaagcaaagatcacctgtctattctggatttgtgtttccttccgctctttctcctcatcctatcactcaacatacatcagccccatggcctgaattcatggctacatctgtcgatcctttacctttaaatgacacacctcctcctttaccagctaagaaacacagaaggcagcagcagcagcaggagcaacaggtaattaggaactggaatttagagtttgggaatgttattttgacaacgaaattacttatgtgaaatcttttcttctactttcccaaaggcatttttaaaaaggcaagttgcatacttctctgattttttttttcctcttaagaacatttagtgtgttctaagagtgttagaattgttgtaaggttttgataccttgagtgttccctactggcttttatatgtttgagcactttttataccctcatccttcagttaccattcaaccaaaatattgcaacttatctcagatagttctcaaaatactagcaagcatttctataaaatccatagtataaagagttatcttatcaacacaaaatatttttattatacatagttgaaaccataatagacatcattcccttgttactgtgtcagaatttgttaaacgttttactcccttaatcagagtacctttgttttaatctgttttataaatttgtgtatctctttacatccttctaatgatcccatgaagtaaaaattatctccatattaaagttttgggaactgaggctcagtgaggttaagtagcttgtccaaggtcacaccacaaatagtgcatttggtccataaatctagtttttattcaccagatttttaaataaataattttttattctaagtgttgccttccttttagaacactcagagtacattgatgcttgggtattcaaaaaaaaaatttgttttgagacttcctttcgattataatcaaatacctacaggaatttggtgccaaaagatcctaaggagtcattgcactgatgtaggcgagctctggttggtcatgcttagcccttatgtttcttgaaggtacctttaccatcaattaccatttgttaaaggactatatctctcactgccttaaggttactgccacctgggctgatatgaaaggatattggtgaaaggtggatgaagtaagttatgtatacaaggaagaaacaaggagaatggaagacctaaatgccttcaattttgatgttaggtttatttctttaacaacttcattcaagaaatctctagtagcaaaacaatcacagtttacaaacctgctgttttctgtcaaatttcagttagactgtgttttcattggggtttcttttctattttattaagctatcattatggaatgttggaaagttatgaatttcagaatttataatatttggtcatagtgggagctagattgaagtgttctgatgtcattttactatctacaaggagcattaatcagccaaactgcaaagtattattatcatcttagtatggactacctggccatgaattctagctctgccgctgtccagctacatgactttggccaagtttatttcacctctctgccccctagatttctcatctgtaatatagagatagtaatagtacctacctcacaggattattataataatttaatgagataacgtatataaaccatcatacctggcacatagctcttaattaattgattagctagtataaacagttaattataaagttaaaatgcagatttttatgattggcatatttgaagactgtttataaatttgctaattcaaatttgcattaatttttgtgcatttcaaaagcatgagcttttaaaatgacttcaaaatgatcagacctaaaaaatctttaattaagaaatcactttactatatatatttatgttttatttctttaaaaaaataaagcaatgttaagattttgtgaagctaagtggtgggaatatgaatatctcttaaattatcctctattcttatctatatgtttcaaatatatttcagcaaaaatttttttgagctcatttttgtgttttttctttctttttttattttcatagttttggggggaacaggtagggtttggttacgtggataagttctctagtggtgatttctgagattttggtgcacccatcacttgaacaggaaatcgttttactgttaaagacatttctagggtgaggccaagaaaaatttgagtaagtttcaagtggacaaaaatcttgctttagaaatctgaaaaaaattaaatagtccattagaggatttttaaatatgagagattactgtaggggctccttggccaagatctttttaaaaagtaacctagaatgatgccttttagggaaactttatgtggatttggagtgtgtttatgtgactgaaatattattacaactttcaaacaacttccctgtttactcgctttttctctttttctccttttccccctttcttgtcctcttctcactggtatctgtgtcatcacacagaactgcccggaaggggagaaagtgcttacgtgctttgtccactggctgttctgccatccacatggcgaccatcataataatttgtaagttgtcctgaggccccaaggccgcaggcactacagaagtgaaaggtggaattttttaaagatttctaggttcagcataaattcctacagtgtttagtatctaatcaaatactagctcaaatctatcagtgaacacaatatatgttgaataactttaagaaaaattctgttaaaattccagttttttttgtaagtgcataattcttcatttcttcagtcacctattacagttagtcaagttttgctattttgctttgcatttgcatttaaagcactttagaagtctggaagaaaggaaaaaacagcataaagaaggcctctatctgagtgatactttgcctcgaaagaaaaccacatcttccatctccccacatttcagcagtgctactatggggagaagcatcaccccaaaggtaggacctgggagaaaccacgggcttcccattccatgagtcttcttgtcattatattcactgatgtgtaaaggcctttaaagaaaagtgctaaataataaatcattacatttacttgttaggcagacatcaggactaaatctcattttctacctgttcagaggacatctgaaactgtatgctctggggccaaagaacatgcttcagggtattttctaccagcacaacccaggcgatgagtggcattcacttacatgatggacttccgtggctgcatcccacatctggagataagataggatgtagcctctgtgttccaggaataacagcaacaaatatttattcagacattttcatgtagctgacgctgggttgagccttttatgtggattgcttcatttgaaaatccagcagcactgggtagtagactactgattattattccagttgtatgtatggataaactgaggtgtataaggctaagtgactaaccaaggagccctcagctggtatgtagtggagtggaatgtgaacctatgcgacctgatgcccgcccaagctctccctcaggttctgccgacatgcctgaggggatcattgtggcaagagaagaggcaggtgtgaaggaggttctgaatgagacagacttttgagcccttcccctgcccttaatcagagtaactttgttttaatctgttttataaatttgtgtttcaagtacattttatctacatgaaggattttgctatttttaaaaaatgctaaaaccattagggtgttaatagatttcttcagtttcaacccaccgcataacaggggataaataaaaatgggtgcatttgtaacaagagtagctcttccctgttcttttgcatggtgcgcatgcattcttggccctgcatctgccctctgctccttatgcatgaagaactttcagccattctttcaggtgattttggacagtgtcttccccagctgtcttcacttttggaattgctgctgttggaggaagtgctttgatattgcgactaccctggaacttctcgggagggccagtaactggcctttaccacttagcatcaacaaatgaaatgcaaagacttaccttctctgccctgtacacttagataggagctttggaaacagggatgtggccatttcctaaaggtccattcagcctgcagcttgcctgaagtactccctcctgcttcccgcaggcccatctgcccctaggacagagtaacagctgtggaagtgtgctccctccctcactggcagccatggccaaagactcagaatctcggaggatgctcagaggtacgtaccttttaaatcaagtgtcatggccttttgttaagcattagaattcttcagggggaggaagtgagaacaggggtagggatgattagaggagggatcaaccaaaggcctaattttactcttaatgtgttctctttcgggagggatatataacttttcctatttatacatatagctggtatattttaaacattcccgttgtactttatagatttgatagaactctgaaaccagaaagacccctagagaattactaaccttcccattcgattaatagaaagaaaagagagaccagtgagatccaaggagattaccagggcacttaaccaagatcactcacctgggttgtgtctgagccactatgtcgaatgaaccttgtgctaaagaatcattgagctgacacagcaaatatagcattagtggcccagaacagaattcttataggccttttaatgtagatttgagcttttatacttcatagttgttatgtttcaggtagactttgactctcagcatttttttttgtagtaatacattacatttataatgggattctcagatagtcttcatggggctagaagaaattactgtaatgtagttccagggctaagcttcctgttgagaggattagatttcttgtgttaacacaatagtttaagtcaacaagttacattgccctaacttttgagcaggcacgatgctaggtgccaagaatgcaaatgaatgataggaagcttgcctttgaaatgtttatagtctattgaggaagaaagacacagaacagatgatttcaataaaatgtggtaaatgaaataatggcggtatgcccaggatataaatggaaatgctttggggatggcaggcatttggccttcaaatacattcatgcagtgatgggattcaaatcctcccctctaagcaggctggaattcgattctagctctttggcctctctgccaatggtactgagagataacactggttttccatcaggggaaaatatatatatacacacacacacacacgcacatatatgtaatacatatatgctacatatacatacataaatttatatatatgtgcacataatgtgtattgtgtatgtatatatgatatatatatatatatctctcactggaacgaggttttcaaatcattactaaaggcgatttaaaaattagagggtatagtattcataataggtttataatgtgtaagagacatttgcagtggtaatatttgaatcaaataaactgattgaactattttattttctttgccataatttcttaataagctaaacatattcttttgatgtttataaataataaacataaatccatctattttggctctcatttatcactgttaagttgtgggtcaagtctatttgctgttgaaacatttttctgtaatatttacatataaatatttgagacaaggtctcactctgttgtccaggctggaatgcagtggtgtgtgattatagctcactgcaaactctgccacctgggttcaagtgatcctcccacctcagcctctcgagtaagctggaactataggtgtgtgctaccacacctggctgatttttgtattttttggcagagatgggtttttgtcatgtttcccaggatggtctcgacctcctgggctccagtgatctcccaccttggcctcccaaagtgctgggattacaggcatgtattagacttctttttaaatatatttttcccaccgtcggaagacatcaaagcttagattggccacaacaccaacaaagaccattaagcattttcatgtacttcaggtgtttaattgaaagagcaagcatttgggaaagagggtgggatcacaaattactatactccatgttaaaagcattttcttgccaggtgtggtggctcatgcctctactctcagcaccttgggaggctgaggagggaagattgcttaagaatttgagaccagcctgggcaacatagtgagatcccatctctacaagtaatttaaaaattagccaggcatggtggcatgcacctgtggtccccaccactcaggaggctgaggtaggaggatcgcttgagcctgggagtcaaggctgtagtgagctgccatcatgccactacactacagcctaggcaacagagcaagaccctgtctcaaaaaataaattaataaataaaagtattttctcaaagagtaagaaaaactagaactttatagtaaataaatagattagcaaaactcaagagccattaacattaccatttaagaggattttgtgagaatatggtgaaaccgagggaaggtttgatctcagttattctaatctgttttcccctgaagtaatgggaatcccatgccagtttcatagaggaaaactgagctaattcccttaggccacattactgatgttcccgttgcaaaatcaaatctgtctttgatttatctttagtgctcttgttctttattgatacgtcctttatgcagctcagaagactgcaacttcagtctttctctgctgtaactgtgaagtgctcttcctcttgaagagtttcatgtaattctgatggggcagcttctgaggaaataaagaaccattatatgcgtgttggtccaaggagatgtgttctgaaaagacagcctgctgcctttggctcccctacccagaggaggagaagtcagggtctatagttcttagaaccccagcagactgtaaaactggcaggattttctacacagcccaaactggtggttcacaaaaaacccaggagggatggatcataatttcatttagaattgtttgactagcacttgttaactttattaaaatagcaaatacaagtaaaattctatggatttgaaaaaaattatacctggcatattttcactaactcacatttagtagactttaatcatcttttaaacttacacaattaacttaaatacacctttttttgctgctattcgtaatggatacatcaaggatgatggtgtaagtataagccttaatcagcactgttaatagaactgacagcgtgagtcgtgcaaagaactttgagaggagagtttaaaacagagagctgagaaactcagcttctgaagttggaatggttattggcttttgaacaacttgtgaactattcctttgtcagctttagaatgaatgaaatctttgtccttttgttttttgttaaatacaggaaagtccaagaaaggtatgacaacctccttgtgtggtgtttttgtttccagcaaatattgaaaggtcattgtcaagtcatgtttaagaaatgatcagatttaacactgtgcagtggtggatttttagtctaatgattatttcttttacacaatagagaaaaattgttgcacatttgcaagaaacacaatgctgggtgcagctgctgttcattcactggcagctgcatgaccctctttgttttggcttttaatcgcaaggtcagaccctgcaggaaacatgagtgctgtggaagcattgttttgtaagattcaggatctatataaagagaatagagggtattgtgatgtatatgagctaagtgtaaaccatgattctcctttaaaaaggacaggtataaataagtcaggctacagtcaaaggatgaaaggatttaggaagctcctacttattcatttcattggagcctgttttctaagaaagacttagtggagagtgaagtatagtttaaatgattggcttgaataagtaagatggttatttcctgtggctaggtggtagagatgtaggatgttagacgatgtgttataaaacttgatgaactgtgcttcaaataattgaatggcattttacaaacttgagctcttaaaaactatttgctattgtctgtttggaaaaagaattgtttgatagatataatctgtttttattcttcctattttctggttgatgaatatgtgtgaaagatttatttgtcttgtaacagtcttttttgactatgcatgtatcaattttttttaaggtttcttgagtttttctctgtaaacttggatttaatctgaaactgtgaacatcataccttgttaatttgctattgtaactaacaccatcaatgagtgcatgttggaagtgttgtatgtttttcctgcccccttgtcatcctttttgatcttgtatctttttccctttctacaatcattctccctcttcattcctgacttgtcctgtgccctcttcttctggctgtggactgtcattaggaagaatgaattcctcagcaggtgagctatgacaggctgaattgttagaaatactggttaattttatcctcttaaccccaggttatactttaagtcatcttactttctatattacagcccagatagccatgtaaaagtatataccacatattgggaatgtattggcaggactctacacattgtgtaatcgttaactcacaagagacttttcaggtccaattagccagaattaatagagactggcattaaaaataataataataaatgggccttgcacatttggtcccttggctgtcccaggcagtgaagagctgaactggtttgggttccttgtgtggctatgattagaaacaagcctcaattaggtcttgctttatacaccttataaactaccccttcaaacagctatttctctctggataggaaggatttagagcattttcaaggccctttttactgttttagttgctttcccactgattaatgttattcttgctacataattaaaaaacagaaaccaaatagtctcaggggttgggaaagtctcatttttcccaatcttgtttctttgctccccctcaaaaagtagatgcattccacttccttatttgactatttatatagaatatatagatgaaaagataaattcattcagtgactgtttatcttatgacatccacatgccaaataaatggaggtaaactgtggtgcacaggacatctgcatcccctttcctgataaagcttcaatgagagtggaggcctaggccagtttactgccattctagtgttccttcactgcaccagcatctctccttgggcctcctaccaggttacccagccccgtcccctgatcttctatgacgtttcctctgtttaaaatatctatgcctttggatggccaggccagagcctgaatcccaaaatgagctctttggaatcacactggttcaattgcaggatcacaggagaggggcccatgcccgtattgataattgcaggggttacctgtttttgggggatttgttcagcagggaggaagctaggccaggtgacagtggggttcactgaggtcagtaaagtgttgccagtaggcagaaatgagtagctccatgaggtgaacttttccactcactttggattcatgggaaataaaaatcatgggttgggaaaaagatgcttattattggcctcatgctttttcgtttaagttgccatgaaaatgtaaaatgcttatcctaccaccagaatgactgggagattcagtcgtagagtcaaacctcaacaacttgtgagttggtctggggaattaatattcacaacccttagcacagtacaaattgtaatgtagctggcccttctacattcacctgaaacatctgagtcattttagtttactatctccttcacctgtaagttctattttgttattctgtgttacttttggaaaagtagccgaaaaacaacaacaacaaaaaacacaaccttggaagatctgaggagcaagacatacagttcccttaagaaacatgctcaccttctttcctgcttttccaagatggtggtaattgcttcatatgggttggtttttcctcaatgtgaaaactcagggagaggaagaggttgtggcaatgtcactcattgccagagagataattcttgtatgttttaaattacatggctgtcctttagggatttgtttttcatactacaaggaaatatcgtccatgtagttggtgccaatgtgaaacttttctatgccacaagcctttttttgaaatcataagaaaatatacgtgtgtgagcttttcaaataatttctgttgtttttttgtcatttgcataataaataattggaaacaacttaaaaggagcaattagtaattccaaaagttcaagtatcaaaggtaaatatttgagtaatgaattatttcgccttccttaaaaaaagacgcagcttcacgcatgtgactataccagcttcatttaatgctgtgtggattgatcattataattcatgacattctatttagtcttgtggtgtgcttttatgttttccatcttcccttagctaaatgctatatggctttaaaaaatacatatgtatttataatttataatggcagattatattaaagtaacttattttcccagaaatgtctgaatctgaaataacctattttcacttaaatatctaaaaccactccaaatactaatggtgtgaatactctgcatgaaactaaaaccattttacagaaattttgacatacaatgctttgttaaggcatcatggatgtggcttctatttttaaatggaaatgtttaatcaatagctgagaaagccattgagaattacttctcttctttcatcctcttgcctactattgaccatttcattattactaaaactttcattgaaaggtaggtagagcacacaaaaaagaggaaattcaaatggtccagttgtgaactctgaatagctctggtaataactccctgggtaatggaaactattcgagtagacattctcttatcagggagaaagagattacaaactctagtactggctagagaaaagttttttaatgaatggaggaatttgttaatcaatatgatgcctgcttctgagtctatgataaatagagaattgaaaagaaaatttgacttgtaatgccctaaatcagcgatcagagagcaagccatagcagtaacacaaggtaaagccagtaacctaaagtgccaggtgaccgagcaccagggtaaagaaaagacctcttggccgggcacggtggctcacgcctgtaatcccagcactttgggaggccgaggcaggcagatcacaaggtcaagagatcaggataatcctggccaacatggtgaaaccccgtctctactaaaaatacaaaagttagctgagtatggtggtgcactcctgtagtcccagctacttgggaggctgaggcaggagaattgcttgaacccaggaggtggaggttgcagtgagctgagattgtgccactgcactccagcctggtgacagagcatgactccgtctcaaaaaataaaaataaaaaataaagacctcttatttatggtgcttttcgtcctactgatgcctacattttcaaatggttgttatcaacagcttgtggaaggctgattgttatgatgggaaaagaagagagctagggtaattacgaggagcacagtcattggaaggaatgttgactctgaattaaataagtaattgacagacaagaacaactgaaaaagagagagagagaaaatgggaaaaatgtgtagtttggatcttaacaagattaaaagtgtcagtgatgatatgagatacgagtttctgaaatcctacacttgaaagattccacctgcttttttatgaccagactgagtgctccttaagttgaataccattgaagaagtgcctgccctaaaaccctggttttgcttgtcactaggaggcatcttattttcacttgaacacagctatttctagaggattcagggcctttgattgtgtttctgtttggtttcttttgtgtttgtgtgttgctggttgtgctgagatgtaggaatgccataggaaagtgtcaagtgatcctgctgaggggtaagagactcagcagaccacttcattcaaactgttgcttgcactgagcacggtgctctttctttgatcttcttggcttcaaaacaaattagaccaaggcccaagcttcataggcagatgtttctggttgctggcttgtgtctgtagatgtttaagattcaaagactgaaaaatgaggcaaactaacatatttatggctccttccttaggttataatcaccaacagatgagtgaaggacacaggcagaaatctgaattttataaccgcacagcatctgaatcaaatgtctacttgaatagtttccattatccagatcacagctacaaggaccaggcctttgatactctgagcctcgatagctctgatagcatggagaccagcatctctgcttgctcaccagacaacatctctaggtaagatttatttatgggtaaggtttctggtttggaaaagagcctactgctcacaaaaagtaaagccatcaatttgggaactgtatatgcacaagcccaaatttttgagacataaagggtctgtaatgcagaagagggttggtatcatgatggcctttgaaagtagtttctcttatcttgtgtaacttagctagtcaggcatcatataatctgtttccacctttatcctgtttttctccacttgagctcaaatttacactgtgctttaaaattgatttccttctgttggttagctctaagcttcacttacactgcttttgatttaaaaaagagggcccaggcacagtggcgcatgcctgtaatcccagctactttgggaggccaaggtgagtggatcacctgaggtcaggagttcaagaccagccagaccaacatggtgaaaccctgtctctactaaatacaaaaaattagctgggcatggtggcgcatgcctgtaatctcagctactcaggaggctgaggcaggagaatcccttaaacccgggaggcggaggttacagtgagccaaaactgtgccattgcactccggcctgggcaacaagagtgaaactccatctcaaaaaaaaaaaaaaaaaaaagaaagaaagaaaaagaaaaggaatgatttccaacagcagtcagaactttggaggatttcttacccttgtatttgttaaaaggaagctttttgctattctgtatgttaaaatttttgtaaggatttaagtgttcacgtttgtatttatactttgagacaagcaaaggtggtcttaacatataaatctggccatggtgctcctccttttctaaagttttgatgtcccactacctactgtcagatcccggaacctggcactctaggtccagcccaactcccgttcattctcccgataaacctcacagagcttaatgattgagaggatgaagaactctcccatctctgtgcctttgactgtactggttcttaacattttctcaaaggataggcacaaagtcagggcttagtaagttaataatgataatagtaataataagtatctgtgtaggtagtattcagaatactcttctataagccagtttaataattttagcagaatggagattgtatgcagaattaactctcaattgtctgttttctgtgacccaagacctattttctgagcattatgtttgtctacactgtaaataatgatattgaaagagcaaaaacattgtctgactcatgtaactttctggtagtcataaagtgatgtctcaacaaaaagtgaagggcaaatgtacccacaactctgagtaatcctatcatcctacaaatatttttttgtgacataataaaccacgagaccaagtttgtgtgactagaatttcagcatggaattacctcattaataggcttataatttgggaatattttagtacataagttaaaaacaaatcttaagcagaaaagattttttagttttttactcttctttctaccaatgttcaaaaaatttccaattaaggatgctttatcaaaatacacattccaaacattggttcctcattacctgcttccctgatgtttatcacttattttccatcataataatgggtaagagcttatcttagagtatcataaattttgttttaaagttgatggtagtacagaagagaaatgcctgtttttctctcccctttgcactccaccttttacaggcatcttctactttggctccaattttttgacattcagaagatctcataagacaatgacattaaatactattagtagtttctgaccatggggattagttatctgcagttgccagcaccacagagtcagttttgtgtaaagcaactgtggaaaatgatcatggccacacgtaactacttgtcaggaattaccatcctgcaatagtgctatcatagaattaagggacaaatgtgtctcaccacacacacacacacacacaaaaggtaactacatgaggtgataaatgtgttggtattattattattatttttgagacagagtctcactgtgttgcccaggctggtgtgcaatggtgcaatttcagctcactgcaacctctgtcttgcaggttcaagcaattctctcgtctcagcctcatgagtaactgagattacaggtacccaccactacacctggctaatttttttttttttttagtagagaaggggtttcaccatgttggccaggctggtcttgaactcctgacctcaggtaatccacccaacttggcctcccaaagtgctgggattacaggcgtgagccacgttaattagcttgattgtagtaatcattgcacaatgtatgcatacatcaaaacatcatgttatataccataaatatatgcaaatttaatttgtcaagtatatgtatgctcaataaatctcatggtgggggcaggagggaagacatgtaagcaaagaaaatggtaaacagtgaaatctaaataaacattgactatatgaaaaaaagggataaatggggattaggctattggtgagtttgttttgactaactggtgagttttcaagacctgaaacttagtgaaattcaaattattttcaaattaatgagagatataaaacatacatatttgatgtcacaaactacactatagaatataaatataattttatgcccttatacgtcctgcatgcctgtctttggctttctcagttggggcaatgaagtttatccctttccacccatgaagtcaggtattcacaatgaaggagaataagaattcctgtacaaaaattaaaagatttctttcccttggattcttgctagctgaagagaacagaacttactcttttgtatctcctcactggctaatggaaataatgagaagatactgccatgttcttctctttcatgtgggagaaaacacctggctaaaaagtggttcaaggttactctgcaaagtgcagcctaattgttaagcttataaggatccggtattcctaagacagttcactccttaatggatgtgttttgtaatggggctgtcagtactgattatagaataaactgtatgccctgtgttctcttcaacagaactcttagccctagatttaaaccatcctaggtttgatttacaaaaatataatttgagaatactatattaataagtatctataaccaagaggtctctgattcttcatttttatatgaatttttaatgaatttatttttatatgaatgtgtctaacaaacatgtatccctactctatgccaggttctatgctacagggatacaggcacgaaagtctgtctgtatgtcctcaagagagtctagtaaagaaggcaggtacttaaatgagtacaaaagtacacatgcattacaaatagcatatggtttccatagctgaaacagcaaagtaaataagttttgacctaggttatagtctctcttttccagaacagtcaaatagaatgtaagcggtggaaaataaaatttcctgttttgtgttaaacattttcaagttttcactttgtctgttagttaccctgactgttcttgcacctttcactccctttggtttcatctttcacttgagtgatgtcttttccatcatttcttttgaagctcttaaatctctttatacagttttctcattggtatcatgagggggtactcttcacaaaactggccactatccatccattgcacctataggagaagtcatgttttaattggcatcatgatttaataaataaagtgtccacacatataaagggacaacaaaaagtagctcataatacatattccacaactgaataaagtgactccaaacattaggtgtcatttatatagaacgttggtgatagtcttgttggtctgatatctttaagtcattaaactaatgggaaggactctcatgggtcattatttttagactttggaggaagcatttagaagtcacactttgtaagatttggttttggtttatttacctatgagtaaagcattagcattattttgcttgcctatattttgtcttctaaactgaggtaagtcagtgtcacctacaattctcagagttgaattgatttgcctcttcggtccaatgactcgtaagtaacattctttaaattatatatgcttggattttgttatgcacctcccttgaccccatgtgtgtgtgtgtgtgtgtgtctggggtgtgtgtgtgtgtgtgtgtgtatgtattagagagacttctcagtctaaaccaatattctcaaaaggctttggtgtttcattcagtgccagcacttcaaatattgctagaatagaagaaatggagagacttttgaagcaggctcatgcagaaaagacgcggctgctcgaatccagggtaagcttcatattttcatgccggaggtctgtgataccgtggtgcaggagccctgcgcttggcatcagacaatactcctccttaaggagccgtgtgttcctggaataaatcactcaacctttctcagtctcattttcttatctgaaaaataaaggtgttagatgatttctaaggctctctactgcagtggattttccataacttgaaatatatatatagtattgacatagaccgaaatgaacactttgtgtttttttgtgtgtgttttttttttgttttttgtttttgttttttgtcttttgatggctgttttgtgttcctgccaaggagcagggaggaatgtcatgtctttatgcattatttcttccttcccagcttgtgctaactgcactattttaatatttaaaatcccacgtttttatgactgtatttcaagtcagaatctgacttccttaggaatcccccaaaatgcctttgcatcctgccctgaagggcacctcctttccttttctaacttccccacgtgcttcctctgtgaccttcagccaggaaactacagagcaacaacaggaattagagggaccatggccttcagttagaagacagtagtcaaaagacaggctaaatcacgtgataagtgctaaagtacagtttgtgaggctttttatttaaaatgggagagttgctggttgatatgaaatgatgaaatgactgaatatattaacaagctggattttcactgaagaccacaatttaattgttaattaaatttagtggttgcatttctgcagatgatgattttggaagctataccaggcatggttatgagttgttttcttgtaggttatgtattataagagactagtctacaaaccaagatttgtctagtaagaattgtcttttttatattgattggaaccattcaagtataaccagtatgttttaaaataatcattgttatgcataatgtttaggaacgggaaatggaagccaaaaaacgagccctggaagaagaaaaacgacgccgggaaatcctggaaaaacgattacaggaagaaactagccagaggcagaagttaatagaaaaggaagtaaaaataagggagagacaaagggcacaggttggtcggtcaatctgaatgcatatgggcaggttgccccctggtggcagttcctagaagacagctgttctgtgtctgaggatgctttcctgggcactgagcattagcacttgacatgtaagggttaagagaagagtgtgcattcctgtgcaaaaaaaaaaaaaaaaaaaaaaaatgtgagttcatttcaaaactcttagggaaccaccaaccaaatgacacttttctttagtcatgcatggaacgttttgccaggagcagcactttttcttccacccattccttggagtacattttaaaaagagaatcttttttgagcagcttttaaaaatgcacctggatttgctgctgaaaacaaatacaacatttgaactgaaacctttgcttggggaatggaagaggtcctactaagccatcttttacaagcaaacagtctagagcagtgtaatttttcaccaagtccagtgtctttgtcatggtggtagtgttttgtcttttttctgagcactgtattgtcacatgtgttccctttgctacagtagtcctcaacacctgtgcacaagcttgttgtattcaagcaaagtttggagaaaccacacattttatttaatgtcttatcttggtcatcatagaatttgaatctctgttcttgtcactatagctgcttacataatatgttttctgagcaactaacataaagttttgttaagtactatgtaatttaaagctgaactctattttatcaagattcactagactcaaaggcaaaagataccattacttttattctttgtggttgctggccatttgatagtatagcagttagagactatctttaagactttgtatgctttgaggtatcagtaagcctgcagcatctgttacaaccaaagtaccacataatcaaacgttaagtattgaaggaaaagtagaaagtaaaatttgtttattttatttcatcatgcccaacgctctgccaaattttgacttgcagtgaaagtcatccatgcgtgtttactatctgaagccaaaccaaaaagcacaattctattttaatcctgattataagtgttgcctccaagtatataattaggtcatttccccgaggcaaagaggtggggttatttaacagcataaaataagacaccattttagaactatcacccatggtgatatatgcttcctagattggacgggctttcataccagccatcagtaacataaaagacatctaaatacatccctttggcatctggtcctggacagttcattacattaggtccagttttgattccacttctgtctttatgttagctttacttttcaaaatataaatctctgccttcaatttctatcggaatatatgtaaactgacaagtacagctttgtgggatcctgtgggggccgtacttactaaatagtgttcaatcaatcatgtcatgcttgagattacttgagaatgattgttaagctgtggcagggacaacttctggaaacttaacagtggagcagtcctcatctgcaaggagcagcccagaaaacttcatgcttcattacaagagcaaagtacatcttttaaactaagataaatgaccatttttcattttctcaactgcccatcttaaggaatagaataaattgtcctgagtttatctgcctctcccctacatattacagcatctttctgaaaatactatccactttttagactccaaatcataagtgctttgtttatcttaagctcttttaatcatataggcattttaaagcttaggttttacagttaatttctgcttctaaacatctgtgacctaaaacaaaacaaataattagctatagatgcaatgggttttgcacttttccaggctcgtcctttgacacgctacctgcctgtccggaaggaagactttgatttgcggagccatgtagagactgctggccacaatattgacacctgttaccatgtatcaatcacagagaagacctgccgaggattcctcatcaaaatgggtgggaaaattaaaacgtggaaaaaacgttggtttgtttttgatcggaacaagcgaacattctcttattatgcaggtgggtgataaaaacaatttaagccatatactcaaatcaagaaccccctgttaaagagcaaaggcaattgaaattcagtgtaaataggtaggttgatacataacagaattaatggcaatattagatttgtaggtgtacattattttatatttagattatatagtccatatgatatgaatttcctttctagaaataataaactttatatgttactttaaaaagtgggaagtggtctatgttacttctgaagtaaactcaggtcccaataaatattaagtaaaatttattctttagatcaaaatatttccttttatttgtttttctgttttaatccattctttatttaggtaacaaattgtttatgttcactgtattttatgaaacatcacaatatcatactagaaatactatcattatagggtgggatcagaaaaaatattgcctttcaaaccaccacaccagaaaaaaaagggggtggggagaggtttgtgattgattgattgtcatacgtcccatttaagtcacacacaattaggcagccgtagctgaaaatcattcaactatagttcataaactagaatgatcttttaagcacagagagtaaagctcattggtaaactagtgatcagtactatttattaagtgactgaaatatttttggattcttaaatgttggctgacaagaaacataccctaccaaatcttatataagtgcaggaatattagtgtaactggcatacttattaagaacctcttatttcctcttggatcacatacgaaacatgtctatttttagtacaagtatagctctactttctttgcagctgctaaaaaagagtggtgtcataccagatattatgaaaaaaaccctgttttggggtgactgtcagtatttatgagcatcaccaggaatagtaaaatgtatcgatgcaataaaatataaataacagtctagtcatttaatcaatccagtgaggtcaggttatgtttataaggagaagtgtgagaaaccaagcagcctgtggaagaaaggaaagagtggctcaggagccccagaaaatgggtgaggagctggtaggggaatgcctgcctttcaccgaggagctctttgggtgaggttccagttactggagaaattagtggcctgaagccgatggcctgccggtcctaggtcccctgctttgcctctctaaggctttttgtcattgagttttataaacatccagagcagctttcttcagttaatacaatttgatgtctgcacactgcataaacaaaactgtatgatgtggtattgtcttcagaaaacctcacccagaattttccaaaaatacaactttaaagaacttcacacaaaactgcttcactcttcttctgtgctcctgttctctgtgagccttatttcattctctcatctatcggccaggtgagtggtttcatgacctggccaactgcttcaaacctaagctccaagcttcagacccatgtaaatgtgtctttgcaaaccaaaacttctggtgactgatttcaattttaaaaaaataccaaaaccttcttggtatatgaaaaattacccagaaccctaatttaaaaaaacagacaaaaattacatttcatttgctttttaatatgtatttatgatataactggctggtgagacctagttggacaaacgctgctcgttcggttctgtttacggccatcacctatcagctttgtccactcctacccccacccctgcttctcatacacaacaagcacaggaatagaccagtccgcaggcagtcatccagatcgcaatttacgctgtacttaaccctacaggagtcatgtcccttctgtctgtcagtgagggaaatggccgtgtacttgtgaaggagctgcaaatgtgaacactgagtggcaaagtcccaggactctgtgttattcatggccctggcctttgtccttggcctcctgcatattaactgggatctttaggagagtctctaaagaaaaccgaggcctagaaaatatgtctgcaaattgatggcataatactgagagagacagaatgtgcagcgttatctcatcaatttacaatagcatcattgcttctcttcgctcataatgtggctgtgaggcttatatttttcagagttctttctcatatatgaagtgccctgcaaaccaaagtttccttctgcttgcttgaaacactggcaagatttgcttttatctccagattttattttacatttgctttcagaaaacaaagtattattgtattctcatgaattactgcaatatcatttccagcaaatgtttgagagatacattgaccttgtctttcgcagaaactgactgaaacttaactgaacatggtatcagttaaaacagtgtttcacaaggaagaggaaaaacaaagaaaaaaatatcgtcaatgggcaaataggttaggatattctggattaaatgcaattaaatagttttactctctgctgaacttttcagggccattattttttagactagctttttgtagttaaaaagggacattcacctagtaaaaaattcaaaatataacaaaaatttgtatgatgaaagtaagtctctttatcattacaaaagttctgatctctcgtttttaagccttaaatatttcatattttctctattcacttctatatatgtttcagtatgtatatattttcttttttcctcttatacatttgggactaaattattcattctattcgtaccctatttcatataatagtatttcaagggttttttccttaggagcagatacagatctacctccatcatttcagtaactttgtagatttcattgtatgactggtctataattgaatcagtctcctattaaagctcaagcagatcttttgcaaccttgtgccacaacaaacacaaatccatgtacatttatttgcacacacacgagatcttatacagtaagtggaattgcttagtaagaggatttttgtgtttttaattgtgtttgttttacctactgtcttccaaaagaggctgtcttatttgcacttccactactagggtatgatagagtctctttccctgcctcctcattcatgcttttaaaattctttaatatgctgacacgcactgtgatccttgcagagtttaagttacaaaatatttcaagaacttagtagatcacagagtggtgctatatgtttgagtcatgttttggttgtttttgttttgctttgtttttatggtaaatgtgatgaaatctttgaaaacagtttggaaattgttgcattgaaaggacaataaattatttgcttgtagctctgttgaaaacgggggaaaaatcacgcaccctgaataagaaatttgataggaaataaatatgggtagaaaattattttaaataacaagtcaaaaaacactttgtaaaaattttattacaacagatctacatattaatattttcattacaaagacggtcttggaaaatgtggagaaatcatttgtattggtgctgttagagtttacactttccatgctaacctgaaagtcagtatgttgggttatcttttgactgctaatctgctggagagccttaggcaaagtcatctcgttcttcggtttgcagctagtaattttatggcttttctttttttatttttccagtatagatagaaggggcctcatgcactagcccaagttctctgaattaatcttagataaattaaatactttgtaaatattttaatgattataattgtaataaaattattattttttctgttcctcagtggcgataaagtatttaacacttatctgtctttgcagacaagcatgaaactaaattgaaaggagtaatatactttcaagccattgaagaagtctattatgatcacctcaagaatgctaataaggtaaacatcagttttctaaattcctacaatttgaatgcataattaagaagggaaaaatatttttggagtctaagaagtttgaaattgatgttctgatgtaacagatagatatgatcagaatggtgctggaaaagtaaacatgaagtaagtgggatggccgttctctttgaggaaaaaaaatatcatagcaaattgaggaaatattctggacataatggtttgggaaaccctgcgaaacgactctgccagggttctaaaaagaagctaccatatagttaagagggggatcgtgagcaagtcctagtagggctaagaataacagctactatttattaaactcctactctcagctaggtaccctgctagagctttacaaactagctgctgaaataatttatgagttctgtctgagatttcctgttcagaaaaatggtcaatcctgaaaaaggctctgggacaggtgtgtgagttatagtagagcaaaagtaacgcctttgtaaatttaataaattgaaaattttgaagaagtcatcacatgtctgtgttatttaatgttgtattttaagatgtttattttacattctttttccttttttgaattttagagtcctaatccgttactcacctttagcgtcaagactcatgacagaatctattatatggtagccccatcgccagaagccatgcggatctggatggatgttatagttacgggggcagaaggttacactcacttcttgttgtagtgaactgaggcaacagtccacttcagggcagacggcaataatctcttacaagaatgaagccatattcaaccccagatgagaaaacccaacagatccatcccttgagctgtaaacactcagaactcctttcatatcaagacaagttatttgtaaaaaataaagaaggggttttaatacaaaccttcataataaatagcaaaataattgaagcttccatgagaaagaaaacactattttgataaattggatcacttataggaacatttctaataaactgtttttaatcagttgtcggatttggtgaaataaactaaacaggttacagaatatctgtatgtacttggaaatacagaataactttatcacccaaatcactggcattgacattattggtaatcaactggctttttttaaaaaaggtagcattttgttgacagttattttgtaaacataagcaaataagggcttggagggaaatacattttaggaggagttttgccttaattttttaagtactgcaccaaaaccaaagagctgacctgacttctgtggaacagtagtaactgcaagtgatgaactgcatttcgtattgttctgtatatttcaaaatggtattttgatgccatcaaatgcccaggaaattgactttgcagtgtcaccactggtgtaagctactatatatgtatatatatatgtagtaaaccactttttgtaaaagaagaaagagcaaaaagctgtgtgttttagaaaaaaaagccaggttacgcaacaggcattctgtcatgttgaacaattttaaataaagagaatatctggtgttaggagcttgttttgctgaagatttctccattcctggtgctgagaataaaggcaaccagtagccaatgtcctttagattgtctgatttctttttgttgtggagcacacctgctaactgctccctcaacataactatgaaatcatagctctgttttcaccaaagaacagaccaattaacatacttatttgcagaagtggtgtagttctataaaacggcaaatgaagttcaacttaatattctctataatgtattattttattttattttttacaattagccttttttttagttaatttttgtcaaatgaaacgacttcaggcaagtctcttttataatggtttttcaagtgccatttattctagtttatcatgttttgcatgtttgaaagtatgaatgtgctctttcctaaaacatggcaaatgaatagatgtagagaataacaatattacttacaagatgaaatgattagattagaagtgtccctttattaaactttgtcagcctgactgggtacaattcttttgttaatttgcagtgtggtttgtatacacgtatacgtgttatcaataataagattttgcaactggatgacacaagattttacttgaacagtgaaggacaaaaatcatgattgtggaagatatttttaaaatctgattttgcagcgatcacttttaaaccctgtagtgatgtaagactaaaatataattgctaagattttgttggttaatgtaaagatatgacttttctgcactgtactctcttcataggattgtaaaggtgttctaatccaattgcatgatgtagtaagcctcttaaatatgtgtgttaaatatattgagtttggattaaaatgttgacatgatttcacatttgaaaataaactcatctcttattttgaagttacctatctgtagtatgatggaggatgaattaatcgcaaatgacagttgtagaaactatgtaaagtttgttgtgtgctaacattatgatttgtagtgtataaactgaagtattccaatagaagtatctctggttacatcctattgcttacaaaatgaaatgaaccctgaaaaactctgacatcatattgttgtctgtttacacagatacatttattgctggggattgcaa

SEQ ID NO: 88 - DNA, 17467 bp, Homo sapiens
atgctgtttttattgttactcatgaagacgcgggggaagctttggttgtgtaaagctgagaactgcacccaagcttccccgttcaccccacctaccaggggatttgggctaaattcctggcctggcccacaaagaagaccaagcggtcagtcccattccgtcccatcctgatttacaggaactcacaccagcgatcaatcttccttaatttgtaactgggcagtgtcccgggccagccaatagctaagactgccccccccgcaccccaccctccctgaccctgggggactctctactcagtctgcactggagctgcctggtgaccagaagtttggagtaggtttggtgctgggcaggggtggggagtagggtggaaagcatggagtgaagaggtctagggagggggtctcctcacccccgccttcctgcccgccttgatctcgggggtctctataggcttgcttccacctgggacttctgcctcctcctaccccagcccctcccgcctcaggcctgttgtgctcagccccccaggacctcccctcccccacgcctctggcctcattgtttggttaaagcaggaccccctccccctcccaccacctcccctccgactgaacagatggacagagacccgggcccacggggagaggaagggccagccggtgccgggaaagggaagcggtttggggaaaacaaaacagagggaggagccagggagaaggtggccccaggagggaggaggagggaattcgctaagagggactggggcctgagacggaatgggggcgggccccgggcggggtgggggcccctgggctcccagggtgggagctggctccgaggctggctggctccgcaggtccgctgacgtcgccgcccagatggcctccaggctgaccctgctgaccctcctgctgctgctgctggctggggtatgtggtcccttgtgggatgggggacgggggtggagacgggaggcgggatggtgcggggtgcgggcggtggctgaggattaacccttcaggctccggggaatgaggagagctcctcttgggatcattgagtgtgatccttgcacacgcactcgtagatggtggaaagagctcaggactcagacagatgcaagttctaatcttggcgggccatgtaggagctgcgcagcgtggtcctgaggacgtcacttttctcagcctactcctcctgatttataaaatgttgaataaacagatcccaccctgtccaccaagcaggcttggcaggaggatcacatagggcaaggagatgggaagcattttgtgatatcaaagcaagagtttgttgtagaaaagagctgtggggaggagaggtttggctgctgtgacacagacggtggtcccaggctagggcctgtgaagacagggaagaatggtagcaaacatacgtgggtctgggtgggggtcaatagcagtgagaggtcccagtggtctgggaggtcatggactagaaataaggctaagaagtgcaggatcccaggagaaaggtaggtaggggtgtgtgtatgtgcgtgtgtgtgtgtgtgcacgcgcaagttggtatcacatactcagcagatgatgtagttatgagcagggagtttggaatcagagaccttgttttgacccctagctgtttctcccatttctgtgagaccctggactagttaatatgtgtcggtatgagtttctctacctgtgaaatggagctaatgcgtggtttctcagtggaggatctgttgacattggggctggataattcattgctgaggggctaccctgcgcattttaggatgttttgcagtatatctctagcctctacgcactagattccggtagcatcttccctgctgtctccctgtgacaaccaaaaatgtctctggacattgccaaatatcccctgggagtcaaaattgtttcagagccgctggcctatactacttctctctccctcccttcctgcctcccttctttcctccttccctttcttcgttcccttcctaatgtgtactgtttttccacacccactaatgggttgcaacccacagtttaaaaatttactgttctaaatcaaggagcacaagttcaaatgtctgtactagccaagcaagtgagtcaaacaggtagatatttacaggaaattgcaagaacatagataaatgacaacactcagcttcactgtttggaaaacaacttcctacagggcagtaattggtcagagattacagagtccctgactatccctcatcttctgcagagcacattcctgtgcacccccaccctcaccctgtattgccccttctctgaggaattagtggtggtggttctaagacagattgctcatctgccgcactgtcagaaattactctcttgtacaggacattttccacatccacaccttctcttcctgctttgagtattttagaggactgtgcctcgtagtaagaaaaaaatgaaactcagtttcttgaaccacaggatagagcctcctcaaatccaaatgctaccagctccagctcccaggatccagagagtttgcaagacagaggcgaagggaaggtcgcaacaacagttatctccaagatgctattcgttgaacccatcctggaggtttccagcttgccgacaaccaactcaacaaccaattcagccaccaaaataacagctaataccactgatgaacccaccacacaacccaccacagagcccaccacccaacccaccatccaacccacccaaccaactacccagctcccaacagattctcctacccagcccactactgggtccttctgcccaggacctgttactctctgctctgacttggagagtcattcaacagaggccgtgttgggggatgctttggtagatttctccctgaagctctaccacgccttctcagcaatgaagaaggtggagaccaacatggccttttccccattcagcatcgccagcctccttacccaggtcctgctcggtaagaccctgcttgaattctctccaggtcatttgttggacactcccataagagtcaccaatccagacacttacaaagccatgcctctgggaagaagctgtaaaaatgggctattatatattgggggtggggtagagggatgtatcttttcattcttgaacattccatcatttcacagtgatgtaataggcacgattgcttgtaaaactctgtgactatacaagaacatataaaataaggtcgcagccactaaccatgtttcatggcaaggagaggtgataagaaagatgaaattaggcgcagtggctcacgcctgtaatcccagcactttgggaggccaaggcgggtggatcacctgaggtcaggagttcaagaccagcctggccaacatggtgaaaccctgtctctactaaaaatacaaaaattatcagggagtggtggtgcatgcctgtaatcccagctacttgggcagctgaggcaggagaatcgcttgaacccaggaggtggaggttgcagtgagccgagaccgcaccattgcactacagtctgggtgacagagcgagactctgtctcaaaaaaaaaaaaaaattatcagagatagacctagagtagatgtggttagtactgccttctagctctgtgaccttgggcagatcactttaacctctctgagccttgagtcctcttgtgtaaaatagtgatgatgctatctacctcaaaagattaagaagcagaaagccaggccggatgcggtggttcacacctgtaatcccagcattttaggaggccgaggcgggcagatcacgaggtcaggagttcgagaccagcctgactaacatggtgaaaccccgtctctactaaaaataaaaagaaattagctaggcatggtggtgcacacctgtaaccccagctactcaggaggctgaggcaggagaatcacttgaacacgggaggcagaggttgcagtgagccgaaatcatgccactgcactccagcctgggaagactgagcaagactctgtctcaaaaaaaaaaaagaagcagcctagtgtctgacttagtgggaggtcaaaaaaatgtaaatcctctgccatcttgagggattactgtcaagtcccatttggtaattaccctaggaatggcacaaacaaattactacaagcagtggggacagagctattactccccagagagaattctaaaaaggctacagaatctttcttggctgggcacggtgactcacacctataatcctggcactttgggaggccaaggcaggagttcaagaccagcctggccaacatgttgaaaccccatctctactaaaaatgcaaaaattagccaggcatagtgatgcatgcttattgtcccagctacttgggaggcagaggtgggaggattgcttgaacctggagattcaagtgagctgagattgcaccactgcattccagcctgggcaacaaagcaagactctgtctcaaaaaaaaaaaaaaaaaaaaaaaaaagagagattgagagaacacttccagctcagatgatctgtgatcccctccaaagcagggaataccctccattccagcctggtccccaaccctcattcccaaggaaggcccccgactcatcctgcaagtatctttcatctctgccctttgttgcaggggctggggagaacaccaaaacaaacctggagagcatcctctcttaccccaaggacttcacctgtgtccaccaggccctgaagggcttcacgaccaaaggtgtcacctcagtctctcagatcttccacagcccaggtgagtgcccaggaatgggcagtgtctgcagaggagggtcctgagaggactctgaagggggacccagcgctggggaaagaaaggacagagggaatgttggagctacagtatcagggatggactgcagagcaggtgaagaccttggcaggagcattaggtcactccaggaactagactgttcttctaatgagaccttagacaagtctctggcattcatcaactgctttagaataaaaataaccgggcaggtacagtaaaatagtgatgatgctatctacctcaaaagattaagaagcagaaagccaggctgggcgtggtggctcacacctgtaatcccagcactttgggaggccgaggcaggtggatcacgaggtcaggggttcgagaccagcctgaccaacatggtgaaaccctgtctctactaaaaatacaaaaattagctgggcatggtggcgggcacctgtaatcccagctattcaggaggctgaggcaggagaattgcttgaacctgggaggcggaggttgcagtgagccgagatgacgccactgcactccagcctgggcgacagagcaagactccgtctcaaaaaaaaaaacaaaaacaaaacaaaaacaaaaaaaaaaacaaagaaggagaaagccgggccgggcatggtggctctcatctgtaagttcaaggagttgaaggtatgctaggactttgggaggccaaggccttcaagaccagcctgggcagcatggcgaaacctgtctccattaaaaaaaaaaaagttgggggtacggctgggcatggtggctcacacctgtaatcccagcactttgggaggctgaggtgggtggaacacctgaggtcaggagttcaagaccagcctggccaacatggcaaaaccctgtctctattaaaaacacaaaaattagcctggcatggtggcaggcgcctataatcccaactactcaggaggctgaggcaggagaatcgcttgaacccaagagagtgaaggttgcagtgagctgagatcatgccacttcactccagcctgagtgaaacagcaaaactctgtctcaaaaaaaaaaaaaggaagaaagaaaaaaggccaggcgcggtgactcacgcctgtaatcgcaacactttggcaggccgaggcaggcgattcacaaggtcaggagttcgagaccagtctggctaactaacatagtgaaactccgtctctactgaaaatacaagaaattaccctggcatggtggtgtgcacctgtaatcccagctactcaggaggctgaggcaggagaatcgcttgaacctgggaggcagaggctgcagtgagccgagatcgcgccactgcactccagcctggatgacagagcaagactctgtctcaaaaaaaaaaggccgggcgcggtggctcatgcctgtaatcccagcactttgggaggctgaggcgggcggaccacgaggtcagaagatcaagaccatcctggctaacaagatgaaaccctgtctctgccaaaaaaatacaaaacttagccgggcatggtggcaggcgcctgtggtcccaactacttgggaggctgaggcaggagaatggcatgaacccgggaggcggagcttgcagtgagccgagattgcgccactgcactccagcctgggcaacagagcgagacaccatctcaaaaaaaaaaaaaaaaaatggggcgggcgggccaggcgcggtgtctcacacctgtaatcccagcactttgggaggctgaggtgggcggatcacttgaggtcaggagttcaagaccagcctggccaacaccaggaaaccctgtctctgttaaaaatacaaaaattagccaggtgtggtggcacgcgcctgtagtcccagcaggagaataacttcaacctgggagacagaggttgcagtcagctgagatcgcaccactgcattccagcctgggtgacagaccgagactctgtctcaaaaaaaaaaaaaaaaagaagaatacccatatgcattcattaatatatagggctagagggctagagagctatagacataaaatagacaaaaaatttttttgctcatttttgggtcaaaggagtcttgggactctaattcttttaatttttgtgttatgtgaatttgttatcatttacatgtattatgttattaagtaggtaataatgataatactaataataaacttacaaaacgatccaatgtagttgttttcagactttgttcctcggagccctaggactttgcaaagctgtttctggagtcatggtgggagtggggtgtggggagcctgagcagtggggaagggttcaccacttcctgtgagagggaaacggaccagctgggctctgagctccccacccagcctcagccagggtccattttatattgtgggcttcagacatgcctttgtttgaaagcagttctgctgctttaaaatgtttgataaccattgaactaatctacccacctccctttttaaaaaaaaaaggaaaacttttttttaagctgttttttttgttttttgtttttttttaaactgtaaaaacaatacttaggtctggctcagtgtgcctgtaattccaacactgagaggctgaggtaggaggattgcttgaggctagaatttcgagactagcctctgggcaacatagacagacctcatctctacaaaaaattttaaaaattatccgggtgtggtacgtgtctgtagttccagctatgaaggactgagacgggaggattgcttgagccaaggaattcgaagttagagtgagctatgtttatgcctctgtactctaggttgggtaacagagtaggaccctgtctctaaaaaaaaaaaaatttaatttaaattttaaaaactcacctatcaccccatcatctgaaaaacaccctctttcagatgtgggaaaaacatggctcagaggtgttcaagaaatgttgcatttatttattacttacaaagctgtaagtcagctttatccgctgtcttgctaggttggtgaaaaatacgtaacagcattcaatattagggcttctatccccatctagctgcacactggagctgtgccaagcaaggttcttggtcttatgttgtacttaggcatcagcaaagcctgggaaaatatcttttttttttttttgagacagaatctcgctctgtcgcccaggctggaatgcagtggcaccatctcagctcactgcaacctccgtctcccagattcaagtgattctcctgcctcagcctcccgaatagctgggattacaggctggtcttgaactcctggcctccagtgatccacccaccttggcctcccaaagtgctgcgattacaggtgtgagccaccatgcccagctggggaaaatatctttaatctacttagtcctagaaaaattatctttcaagtgctttttttttttttttttcagtggactgaaggcttttgcagagcaaaagccaggaagttttgtcacaaacttccaccaaggccaggaagcagagtctattccgtgccaaaattaagggaagaaaagagggaaaatctaggcaaatggaatttaatatctcaaaaagattatcttgccgagccatagtcacatagcaagctgaggcagcggaggcttggggctacttctcttgttcttggttctgggtttaccttctttgggccttatttgccacatctgtaagaggagtgggctggaccgcgctccaccatgccgtattcactaagtgagcagatagaaccatagaaagcatgctcactctcaaatcgtgctcatggaaagaacgacgtgttcaggactcatgcctccctttctcaacatacccccagacctggccataagggacacctttgtgaatgcctctcggaccctgtacagcagcagccccagagtcctaagcaacaacagtgacgccaacttggagctcatcaacacctgggtggccaagaacaccaacaacaagatcagccggctgctagacagtctgccctccgatacccgccttgtcctcctcaatgctatctacctgagtggtaagggtgcccttagccagttagtcttcccattctgggtccttcttcccctcctggcttcaaagcccacttaaccccaagttctacaatcggatctcaatgtccctgcactactctttgctaacaaggcttttagctcctcttcatccttttcctacctgcattagagcaaccctcccacctcttccctctagccaagtggaagacaacatttgatcccaagaaaaccagaatggaaccctttcacttcaaaaactcagttataaaagtgcccatgatgaatagcaagaagtaccctgtggcccatttcattgaccaaactttgaaagccaaggtaagttcttaacctttccttctcctgtttgaaacctacttgagtctcctgactttttttctgctgtagtcccatcattttggggtacatgcttacaaattcatcacttctactccttccatctgtatttccaccctatcttttctccttctcctttctctagccttggccaaggcagacattgtatattttaggctggaaacaggattctcaagtttcttcatgcatctctactatattgaatggcaaaatgtgagtcgtgttcctattctacacatctgtttctttttccagtcaactcatcagaagactctggtggcttagcaagtcctgtgtgtatgtgggtacctgtgtacagcatacatatacatgtgtagacgtgtataagtatatccttgtatatgcatatatgtggtaagtgcatgtgtgcacatgagttaaatggcttaagtgcattagcagaaattgaacaatttagtttgatgagtagggagggagagaagacagaatatggagcccagaggatcccaactggcaagctatctcatccccagttaccagatatttccacctttttaggatggcaaaacacagacctatgagacagaaaacagtaagagacaatgtctcaatacctggctgagaaacaaaggctctgttcttggaacatgctaggcttggttccacattgggagctttccttagcttttgtttctgcctgtatccctcttcactcagatcctcacatagcttgttccttcttgtcatttgggtgtcagctcagaggtcaccttggtggagaagtcttctccccattaaagcagcctcctcctcaccctgtaatatcactcctgttttattatattcattacactcatcaccatctgaaattatgtcatttatttgcttatttgcctaggacattgtctgtctccctaagatactgtctctctacttgaatacaggaacctgtcttgtttccttctgtatctgtagtgcctagaacaatgcctcctatcataggtgctcattcagtgtttgctgaataaatgaatgaatgaaatagagggtgccaaagagagctactcagtaaaagtggctggaagacttcatagaggagggtttttttcgagacagggtctcactctgtcactcaagctgcagtgcattgacatgatctcagctcactgcaatctctgcctcccgagttcaagcagttctcctgcctcagcctcccaagtagctgggactacaggagcccgccaccacacctggctaatttttgtatttttagtagagacggggtttcaccatgttagccaagctggtctcgaactcctgacctcaagtgatccacaccctcagcctcccaaagggctgggattacaggcatgagccacagcgcccagctgaggaggttatttttgaccattctttgctcagttatttatccactcatggacttatccacccatctatccatccctatctaatgtatttgaccattcatgactcatttagcagaaccaggacagcctgtataaggcacagaagagtgaatatatgtgacaggtccagagcattgttcaaattcaagatacgttgggggaggtataaatatgagatttttttcaaatcaattggaatggctatttaatcaaagccatagatgttaggtggaaagtaggaattaagaacttaacaagttaggtttaaatgtaactattcgaattataagaacaagtatttcctctctaaaaatgtttttaaagtttcacacaaaactctaaaccaaaaatcattgtaaaaatcccttgggagtagactgttgaaaccattgaggtgaggtgataggttaaggtgagcattctggacatataatatcaataataaatattcaaatacaaagcaggtataatatgaagagtaatttctatctccccaagccaatatgagttttgtttgtttgtttgtttttcttttgagataaagtctcattctgttgcccaggccggagtgcagtggcacaatcccagctctctgtaacctctgcctcccaggttcaagcgattctcctgccttagcctccctagtagctgggattataggtgcctgccaccactcccagctaatttttgtatttttagtagagatggggtttcaccatgttggccaggctggtcatgaactcctgacctcaagtgctcgtccgtcttcggcctcctaaagtgctggcattacaggcgtgagccactgcacccagcctgagttttttttttttttttaagccaaaggaggaggagtagttttgtgcacaaaagccactatttagagttccttaggttttaaacagataattaatttaatgtactaacaaatgcaaaattaaaattttacttatgccttttaattttaagctgaacttgctacattaagagtagggtgatttggctgggcgcagtggctcatgcctataatcccagcactttaggaggctgaggcaggtggatcacttgaagctaagagtttgagaccagcctggccaacatggtggaattctgtctctactaaaaatacaaaaattagccaggcatggtggcacatgtctgtaatcccagctactcaggatgctaaggcacagaatcacttgaacctgggaggcagaggttacagtgagccaaaatcgcgccactgcactccaacctgggcaacacagcaagactctgtctcaaaacacaaaaaaagaataggctgggtacagtggctcacgcctgtaatcccagcactttgggaggccgaggcaggtgaatcacctgaggtcaggagttcgagaccagcttggccaacattgtgaaaccccatctccattaaaaatacaaaaaataagccgggtgtgatggtgcacgcctgtaatcccagatacttgtgaggctgggacagaagaatcgcttgaacccgggaggcgaaggttgcagtgagccgagatcatgccactgcattccagcctgagcgacagagtgagaccttgtctcagaaaaaaaaaaatagggtgatttttatataaaaacactctcatttgttcttgaattaattgccatattgaacagattaaactcctttaaaccattttttctatctacaaacataattagtattcccataagcattttaagctccctttaaaaatttaatatgctcgattttcttttttcttttatttatttatgtagttttcccagacagggtcttactctatcacccagtctggagtacagtgacacaatcctcacttactgtaacctcaagctccttgggatgaagcagtcctcccaccctagcctcttaagtagctgagattccaggcatgagccacctcacccagctgattttctttttaaacacatctaatacctgacaggtcgtaattacgactgtgcttggccatatcatcctaacacctaaagctcacttgtaaactgaaaattaaatttgaagggtgaattaacttctagccaacattccaatatcattctcacatttaatgaaattatcctacaactttgcttaaaagcataaaactagcatgtcagagtctcttaaaaattacaatcactattttaaataacaaacatacaggttaccctgaacttaacacctggttttaacatgatgaagttggtttcttttgtcattcttatactaaattctaaatcttcctggcacttaaggatatttacccaaggaagggggtgagatttaccggctcaggtacaccgaggttactggcttgaaaattcaagaccacagcatggtaaatttttcttcagagattcaaggttcatacataggacttgaagggcacatgctactcaaatgagtatatccaacttgagtgctacatcaacagggaccccatgtccactcttttcagtcgaaattggcttactatctacttcttctgggctattcaggttccgacaattgattgctttcagttaatttctttattgcccagttgaattctgcattcttctagattctttttgttccttcagcctcaatcataataccatttaatgacagtctcatatcctattagactagggtttctcagccttggcactattgacatattgggtcagataattctttgtcctgtgcattgtagaatttagcatcttccttagcttctactcactagaagccagtagcactgtgtgcacatcctccttgccccctgccagctatgacaaccaaaatgtctccagacattaccaaatgtccactgagaggcaaattcactccgagttgacaacccctgtattaaacccaggggccctgcacttcttacatacttttgtctggtcaccagttgaaagtccttcttcttttttttttctctttttgagatggagtctcgctctgtcaccaggctggagtgcagtggcatgatctcggctcactgcagcctccacctcccgggttcaagcaattctcctgcctcagcctcctgagtagctgggattacaggcacgtgccaccacccagctaatttttgtatttttagtagaggtggggtttcatcatggtggccaggatggtctcaatctcttgacctcgtgatccgcccacctcggcctcccaaagtgctgggattacaggtgtgagccaccgtgcatgaccaaaagtccttctaatagcaaagtggaaaggtaggctgtgaacaatcttgaatgccatactaagatttgtacttattctcataggcagtgaagagccatcaatagtttttacagaggctgacctgataactctggcggttcaatgtgcatgctatatactatatgcacaacacattaggaaggaagggaacagcgctcagagaaatcaaatcacttgcccatattacatagctcgtcagtggtggagtcagggtataatcagaaactcatgctccttcctctacctctccccagcacagagttggatcagcactgttcacccagctggtatccccatttcatggtaaagcctggaagcttaggtctgactgatgcttgttgaaatacagactgtgggagcagactgcaggacagcattgtgacagagggtggggccaggagagagatgcggtaggaagactgttaagatgcatctcttattttctaggtggggcagctgcagctctcccacaatctgagtttggtgatcctggtaccccagaacctgaaacatcgtcttgaagacatggaacaggctctcagcccttctgttttcaaggccatcatggagaaactggagatgtccaagttccagcccactctcctaacactaccccgcatcaaagtgacgaccagccaggatatgctctcaatcatggagaaattgggtgagctctggcagcttagggttactcccaggccatcagaggagaaaggggggatccctaagatgtagttagcattctctagagtattttttacatccataatctcagtttgtcctgcaaccctgcaagttagaggggtaggtgctattatcccattggatcattgtggaaatggaggctcagaagctttatgtgacttacccagagattccatgatttacccttgagctagtcagaggcaaaccagaacaccgacccaggtctccagctctcctgagttttttctatggttccttgtgacataggcagtggaacagtgggacaggtaaccgaggtgaattatggatgctccttccccagacacatttcaaaacagtcagccaccccgtggaatatgcaagaagctatctggaagtgcagatctggaggcttctgagtttacgagaggcaacagagactccattttcttttttttttttttttttgagacggagtcttgctctgtcacccaggacaggctggagtgcagtggtgcgatctctgctcactgcaagatccgcctcccagattcacgccatgccattctctcgcctcagcctcccgagtagctgggactacaggtgcccgccaccacgcctggctaattttgtttttgtatttttagtagagacggggtttcactgtgttaaccaggatggtcacaatctccggaccttgtgatccacctgcctcggcctcccaaagtgctgggattacaggcatgagtcaccgcgcccagcccagagactccattttctaacctttgtttttttgtttgtttgtttttgagacggagcctcactctgtcacccaggctggagcgcagtggcatgatcttgggtcactgcaacctccgcctcctgggttcaagtgattctcctacctcagcctcccaagtagctgggattacaggcacctaccaccacgcccagctaatttttttgtatttttagtagagatggggtttcaccatgttggtgaagctggtcttgaactcctgggctcaagtgatccacccacctcggcttcccaaagtgctgggattacaggtgtgagccactgtgcccagcctcattttctaacctttgatctcatgtccagccctgtcacttcatttcttgttagagaatttgaccgcctaacacatgattccatttccttgtatatgtcatctgtataggaagaaaacctcttttttattttcattcaacacttctggccaccaaacaggtgtgggagtgttttctaagcaattctccagttatctggggacaccaactgggtgtcctacaattgaatccaattctaacactctacctggaaataacatcagatcccgtgcagtttaagtgctccgccccagcaaatttccccccgtttccaatgtcagttacaagactgggttgtcacctgtgcatcagaccaaccagctataatttggagattcccacaactccctgctagggtttcatcatttgctagaatagctgacaaaactcaggagacacttacatttactggtttattatgtaaaggattaagtaaaggatacagatgaacagccagttgaagagatacatagggcaaaatctggaagggtcctgggcccagcagcatctatcctgtggagttctgtttgctaccttcctgacacatgtatgtgttcaccaaccagaaactctcagaaccctgtactttaggagaagtcatcatgtaggcatgattgattattacccaatctccagctcctctcttctccccagaggatggagagaggggctgaaagttccaagcttctaatcacacttggtctttctggtgaccagccccaatccaggagccagcaggagtagcctcattagcacaaaaggcattcctatgacccaggaaattccaagggatctagtagctctgtgtcaggaactgggatcggagaccaaatattagatggtctaatatttggagctaaagatgctcctatagcatattttcccattatttcacagcatcatggcattgcatataacctcattttttcatatatgacctatctctgatctattacctcacttccaaggtcctgggagataaggaggcaatgacatcatttttcagggttgttttagggatgaggggcaaggcctctcaccttgagagagagtggcagtgttgggcccactaatagaggatcccacgaactgccagagggtacagtatgtaatctggcaaacaagggaagaggaagagagcactgggactcaggatgaacccagagaattcaggacaaaggtctccatcagctgagggtatcatgctggcttctgactctgtttttctctggttttgccctagaattcttcgatttttcttatgaccttaacctgtgtgggctgacagaggacccagatcttcaggtttctgcgatgcagcaccagacagtgctggaactgacagagactggggtggaggcggctgcagcctccgccatctctgtggcccgcaccctgctggtctttgaagtgcagcagcccttcctcttcgtgctctgggaccagcagcacaagttccctgtcttcatggggcgagtatatgaccccagggcctgagacctgcaggatcaggttagggcgagcgctacctctccagcctcagctctcagttgcagccctgctgctgcctgcctggacttggcccctgccacctcctgcctcaggtgtccgctatccaccaaaagggctccctgagggtctgggcaagggacctgcttctattagcccttctccatggccctgccatgctctccaaaccactttttgcagctttctctagttcaagttcaccagactctataaataaaacctgacagaccatgactttc

SEQ ID NO: 89 - DNA, 9029 bp, Homo sapiens
gagaaggcacctcgccccggaccccctatgccccgcagctcagtgactcttcccctcgccctccgccttccccgccgcagcccggctccgcctcccaatggggaaacatcccaaaaaagggcagaaaagaaatttcagcataaagttggcccactgggaaagagaggagcgtccgcggggagcgggggagaagagggaaggcgcgcggaggggagtggggccaggcggagccaggggcggggagcggaggggctcgggacgcgtccgggtgggagcgggggcggggaacgcgcggtgaccagcctggccgcagccgcgtggaaaatatgcggggcacgtggggggcggggcggggagctgggtcctgagccgccgggtgctcgcaggaagggcctggctccaggggcaggggctgggaggggaggcgaggggatgagaggtcaggccggtcctgggggcagcaagcccggccacactccccaccgcgaccggggctctgggctcgcttcctgcttcagtttccccaagctcccgatgagactccgctactaccaccacgtcgataacgcaaacctagagggactcagggtaaactgaggcactcaaactgccgaggagctccgcctcccgagagacatttaatccggggggatttgcaggaaacttctaaattaagggtagcggctgctgcagctgagggggggcacgccggtccctgcgcccgggcagctgccgtgagctcacgccccgaaatagccccaggggccccagccgcagctgccactgggtccggctgtcactcagaggaagcacggagcccccagcccaagggtcccctccccttcgcatcgccggggtttttccagccgaccgtcggccactttttcctccgacggctggcagggaagagggggatgggggcgggaccccaagggaggcggtccccagtgggtgggcgaagggggcggccgcaccccccggccgggccgtgcttctgcccctacaaggtttgggccgaggtgggggagggtcctggttgccggccccgcccggtccctccccgccttttaggcgcccgcgtggccgggacgtcccagtcccgctccgtcctcctcgcctgccaccggtgcacccagtccgctcacccagcccagtccgtccggtcctcaccgcctgccggccggcccaccccccaccgcagccatggacgccatcaagaagaagatgcagatgctgaagctggacaaggagaacgccatcgaccgcgccgagcaggccgaagccgacaagaagcaagctgaggaccgctgcaagcaggttagggccgggcccagtgcagcctgctctccccgcgcctagggcaagggtgggccgctgccatgggtcccccagccccgggcctgcccgccaaggctctctctcacccagggtgggggctgggccttcgcagtaccctcagggccttcgccagagccgcttctctcccctacaatagcctggggaagccccaggcccctggtttccactctgcctttgcagagcgcggttggtcctgctccttggggcctgaagttttctctgtaccctcaacgggtcccaccagtacccttgactgtactgtcccttttatgttattccgcttccatcccagtagcctccaaatcttagtagcgcccctacacacaccgcgtctccattctgggcctgggccccctcccagcctggctgaccaagtcccctctgtcccagctggaggaggagcagcaggccctccagaagaagctgaaggggacagaggatgaggtggaaaagtattctgaatccgtgaaggaggcccaggagaaactggagcaggccgagaagaaggccactgatgtgagtgtggacttgggggacaatgggaggagttagggctctgggaaggggccccccgggtatgggaataagaggattggggcaccttatccccttatgtccccagcgccaggagagaaatggtttcatctcagtaaccagggctagggtaaacttacacaagtaatccaagacagtggataaatcaaaaccacctaccacttcccccagaggacttagccctgtaattctgtttggttccagcttttagaatgtacagtgatcaagcaatgagtcattgtgggggtggaaggtataagaatttaccatctacctcaattaatcctccagctgaaattggagaggagactgcagccgtttggggatggggggatgtggatgtgaggtactagcctgcaggaggagggagagggatccagagatgagaccccacttgagttacaaccctaaggggccattagaaattccctggccttgacctctggcttcagcagccctgctgtgccctggggccccagctcaggttctaatggctcctcatttaccctcattaagctgtcagcctggagaccatgccaggccacagggcagagggacagggccacaaatgccaaagcagctaccttggcaggtcatttaccctgagatttctctgcccaccccacaaccccaaccagacttcacttcctgccattcccaacccccagcttaaggtaggagaatggccatatggctttggtgtggtggtagtttccccattctctgcctcagtttccccatcttccttccacccaggattgttttaagatgaacctatggttagattagcataaagcatggtctgaacatcagagatgacatagctgtttgtgtcgactgctcatgttcccagccccccaggggttgggcttctgtgacctccagcctccagttttggttctccaccagtcctggcacttgggagggagctgacctgcagctgctagcacagacaaccctgggcatctgacactctataaataaccaaggcccagtgcagctggaggcaagattggaaacccaagttgctggtgggggctggaggggcaggggggacagggacagagctggggaggcagagccgcagcaccaggagcagataggaaagactgcccaagcttcctggtgaccttgaacacagcactcaacttacatggtgcctcagtttctccctctctcttgcttcccatttttctaatggggacagtagtgcctgtcctgtggttagagagccgcccccgtaactgggaagagcttgagaggcaggaaatggcacatatcagtcccatgatgaggaccccaggacttcccaaactttccagagtcttttgtcaccccaccatcatgcagagtttttcttttacagtctcacctctctctagggtagtactccaatgtcccccacagtgattcttcccaacccccaatgctgtccccagaatgcttccacactgtcatccggccctgtgcccatgatgggctcttgtcactctaggtggccaagctccaggtgccttcagcacctggaagacaagctaccatctactctctatatatggtgctgtttctcctgccctacagtccgaccaaggacctgcttcctatgctgtgtccaagtgctgcccccagcccctccccccacctcctttccctacacaggtcctctctcctttccactctgaaatctcagggtctctgtgtccttgtttttgacagagaaaggggataacctaatatttatggaatgtggaccctgtgcaggcaatgtactcagtgctttctgcatgttattttacaatttcccaaacttggcttatcatcagaatcactcgggggctttaaaaaaaaaagagaagattcccaagcccccgccctacacatcccaattcagtggatctagcatggagtaagagaacctgtttagttttatgagtctcaccgaaggtcctgttgattaactgagtattaaaagcagtggattatctcagaacagccttaagaaggaggaactgttattgttaactccaacttgtgaaggaggaaactgaagcttagagaggctaaataagttgcccacagttacacaggtgttgagtggctgagccgtggctcaaagacaatctgactcagagccgatgctcttaacacgtggctgccctgctcctctcattttcctttactggcgctcgccttgctctgccctttttctcagtgtttgaccagtttttatggattttttccaaaacctccatggttttgcctcctactgcaagcccaggggctgagtagacatccctcacactgcccctgcattgcccccagctctctgctggccttggcagggagccccttgctacagccatgggtattccttataggcctgcctcttgggcttcttgctgggagtctgccttacagctgatgacagatgacatcactgaacttgatacttttttttttttttttttttgagatgggatcttgctatgtttcccaggcagggctcctggggtcaagctgaactcccgccttagccttcggagtagctgggatgacaggcatgcaccaccatgcccagtatcactgagcttgattctgtgacgggctattcttagcagcagtgatgtctggttggcctgattctcctcccatccccttacctgggccaggctttgctgtgtaggaatcagagctgcatcagacctggccccagcacttgaagtgctcccacagggaacaggaggacttgtgtgcaggtgacctttgggagactaactgtgcacagtgcaggagaggccctgcagcaggggagcggagcttgtcaagcaaggaatgcatgtatttttttgtttttttgagatggagtttcgttctttttacccaggctggagtgcagtggcacgacctcagctcactgcaacctccgcctcctgggttcaagtgattcttgtgcctcagcctcccaagtagctgggattacaggcatgcgccaccatgcctggctaattttttatttttaatagagacagagtttcaccatgttggccaggctgctctcaaactcctcacctcaggtgatccacccgcctcggcctcccagagtgcggggattacaggcgtgagccaccatgcccggcctgaatgcacattttttactggagcacagtctgggcagaagatgattggttggggaaaaatcacatagaatgtctagaaaccaggaagcctcagttctttctgagaagaatctcgccatcctctggagcctctctgatccttatccaaggctaacaaggcctttttgacccctgacctctgacccacaggctgaggcagatgtggcctccctgaaccgccgcattcagctggttgaggaggagctggaccgggcccaggagcgcctggctacagccctgcagaagctggaggaggccgagaaggcggctgatgagagcgagaggtggtcaggggcctcggggaggatggtccgggagggagaagggagcctgtctctgctggtcctgaccctacgctcaccctctccctgcctttcagaggaatgaaggtcatcgaaaaccgggccatgaaggatgaggagaagatggaactgcaggagatgcagctgaaggaggccaagcacatcgctgaggattcagaccgcaaatatgaagaggtgacagccttgcccctctgcctgctcgctgcccagcctgcaacatgcccagtccttctccactgatctaccctctctttctcactccccacaggtggccaggaagctggtgatcctggaaggagagctggagcgctcggaggagagggctgaggtggccgagaggtaaagatacccgggggtgacaagtgagcccattggccctggggccttccacacagtgggaaggtagcatcctaggcttggggctgtagggacaggccctgttctctgacccctgcccgctgcccccagccgagccagacagctggaggaggaacttcgaaccatggaccaggccctcaagtccctgatggcctcagaggaggaggtagtgacccctctgaacctttctgggcaatggcgccttctctcagctcaccttccctccgtctcagcaccgcaggctgctctttctcagctgctggggatcaggaagggcctggggcttctgagccctgcctgctgtcactctcacaactttgctcttctcttctctcctccacccgtcccctgctgtgccatctccactgtctggcttcgctgtgccctcacaccctgccccccccgccacacaccccctgcagtaaatgtggggacctagaggaggagctgaaaattgttaccaacaacttgaaatccctggaggcccaggcggacaaggtagaggggagcagaggggcagtgaggatggggtcccacaggggagggaggtgaggggcccaaggcagggaggggctgggtgttcaacggaggcaagatgaccaggagcctacggggtacaatggagaaatgaaggatctgtggtagcgctgtactgatggcgtgtgtgtgtccccaaaagtattccaccaaagaagataaatatgaagaggagatcaaactgttggaggagaagctgaaggaggtgagagtcctcttccagttcccagtctcccctcaagccaccctaatccttgccagagacggcctgtggcaggacacttgagggttgggatggacaagaagcttgacttaggcagtagtctgtgggagggcctaattctttgccatttctcccatcctgcctttacccccaggctgagacccgagcagagtttgccgagaggtctgtggcaaagttggagaaaaccatcgatgacctagaaggtaaaagaagcctttataagtaggtccacacctgccgtgattatcagtctgtcctgtaccttctcatcccattttatttgccaccaataaactagggttgggccacctaggaccctaccaactccccaactctgtgggccatgtctacaattcaagtaattgtagctgcccacggcgcaacaactccagtgcttctcaaacttcagcatgcatgagaatcactgggagagttttaaaaacagattccttgactctgccccaaagagattgctgactttgggctggaggatttacatttctagctagttctctggtactgccaatgctgctggtcctcatgccacactctgagtggcacccttatagacaattccgtccccgagtgtaacgcagtagagttctagtgcagagactggcttattaactagagagctgttggactgaacatctaggtctgcatgacagcactaatagaaaacactattttaagctagatttgacaaaagcaaacatccagatatttgtgagtctgtggctatttctattgttaatgatgatgtggctaaagttgcctttcctttttattctgtgataaccctttcactttcccacttctctcgcttccagccttctcaggcaagctccaattttacctccagctttaggaggtttgccctttctggctccagcaccctccctctcccctctaagcaagcactcctgcttgtcgagagcattgtacacacagctccctggagaggcaggagctgccatgggtagagccaatttggggtacagagaaggacagaaaagagatggggtagagatggggagaaggagttcctgacagctgtccagcctgttccctggcctccctctctcactctgtctttgtgtacctctgattctgtttttctttccattgctctctctccttcctttcctctttccctccactccctttcccacactcccacctggtcccctccctggaccccccccagatgaagtctatgcccagaagatgaagtacaaggccattagcgaggaactggacaacgcactcaatgacatcacctccctctgagccccacgccagcgtggccacctcagctctcttctctcctctcctttccattctctctatggggaggggagcaggcaggaggagcagaaattgccaacattgcacagccaggctgggagcagcctagggagagcccccatcatgcccaccacccactctggcactggcttcatcctttacctatccccttccaccctcctttgctgcttaataaattctgaacttggtctccatgctgttttcctgccctccagagagcacctctatcgccaccacggagcactggttcactcctgacaccctggcacttactgacacccccagcccctgcactgagcccacccacaaaacaccatggcccacgctgaaacccctctgcacaggcactccctggctgtcgctctctgattcaccactgcatgtgggcacgtgtggccccatcaaaccatgaccgcctctggtgccaatccctgacctcagagcacttagctggggttccaggatcaaacagagtgactggaaaggaagtagggtggtgaggtgcaggacaggggcaagaaggttgcaaaaggtctggaatggagcttggaaaaatgttggatatcagcaacatggggctttcactgcagcagcaggtctgttttctacctcaagtctgtctgtctggcccttcctttcctggcgcagtctttgtcttaccttctgtctccaacttccttaaaccttctaaagaagaggataaagtagtttatgactcagccctccccaccccacctctatgaccccaaggccttgagtgaggcatccacgtccgtcctgttcccctcatcctagtcagtccatctgtttgtccctgccaaggggccctgaggtccgtgaatgcatgtgtcttccttgacccactccatgtctatatgtcaccttcccctggccctgcctccccacgtctcccccttgtgtctcccttctccctcacctgctgcttcccctcacagagaccttggccagtgccaaggaggagaacgtcgagattcaccagaccttggaccagaccctgctggaactcaacaacctgtgagggccagccccacccccagccaggctatggttgccaccccaacccaataaaactgatgttactagcctctcaaggccctttaatccttt

SEQ ID NO: 90 - DNA, 6376 bp, Homo sapiens
actgtgtctgtccccgtccctcagatttctttgtgtctggtatgtatgcctcttggggcctctatttatctgtcagggtctccgatgggagggtctccgaacctgaggtctaattgagccttagaatatcactcctgctaccaatccaaaaattccgtctgggacaagtctcccaggaatggcatgggtgggagggaggctcttgtctaggactcaggcgctagctttgagcggtgtctgtttgggggcctcagtccgtgtctgtaagtctccctagggagcggctctggggcttggtctggagaagccacttctctctggctctggcctcctggggctccctgcagctgaggccaaggctggggtgtggccgcctccgcggcaggccggcgggctgggctcgggtgggccggggcgctccctcctttccacgcccccacctcgggttcccccgttcatcgcccccccatccccatctcagcgggtcccggcttccttacatggtcacggccgggcttccagctcccggacgtcccccgccccccgcccccaccggacacggcccccgccctgttcgccccgcgccaccggcccgcgccccgccatggaggacctgggtgagtggggccggatccccgggtccgtggcccctcaccgctgcccagagctgcctccccgccgtcgctctcccgcatctccccatccctgtcttcttacttctgcttttcgcctctgcccgcgcctcctttccaactccacgtcccccttcctgcctctcccttcctgcctttcctgggccggccgctccctcccttcttccctcgctgtgctcctccatcccaggctgcggcagatggaacgggaggtgcggcgcccgcgggcgcccgggcgcggggctctggggagggaggggttaaaggggcctcggcccggggaccgggaaagtagagggcacgggaaagtctggcatcaagttttggagaaaaaaagcgggcctgcctgcaccagagttttgggagaggaggagttaagggctcctgagcacagtgagggtcaggtccttgaggcaaggaagagaatagtaactcaggagtgcctaggcgcccgcgaaggcttcagggtttcacgcgggtgctcagagacgaagactgagggcaggacttctgggttctggaagtgaaagggctcaaaagacccggatctggggatgcagggatggagagaggtgtcttgtccggaagggggacccaggtatctcgtcctccctgcgaagcctggggctggaaggctgtgcgctccacgggagagaggggcttccggcccctggcggtagagggcgctgctcggtaggggtaactgacgctgtaccgcagataaacagccaatcagaaggcaggtcccagcgaagcgccagtgaggagcccagggcgggactcaggggcctgggagtggccaggctgggcggggcctgtgtaggtagagggaggagttaaccagcatggaagagagagcgtccaatcagaaagctgagggccaggcactgggccaatggagcaatttggaggggagccaaatttggcttgggtgaagagcccattttgactgcatcagagaagatggggagaataaaataatcaggaggctgggtttgtgcttggctccaagcgtgagcaactgggatattctggtcataaatattccttgctacccttcgagcagtgctctgcctggctctggccctgtgacctcttctcttaatactggcttctgtccttctccagtactgcccactgggaaccttatcttctgatctaaccgtgacccttgtctctctccctgatggcctcttcctgcagatgccctgctctctgacctggagactaccacctcgcacatgccaaggtcaggggctcccaaagagcgccctgcggagcctctcacccctcccccatcctatggccaccagccacaggtgagatcggatgttggggactggggcagccactagggccaggctcggcctggtctatggggatctcagcctcagtggggcagagtgcaggcctgtcatcccacctgtgcgtctccgctctgtagacagggtctggggagtcttcaggagcctcgggggacaaggaccacctgtacaggtgaggggcctggaaaccagggcatgggggccaactgagtctcaggtgaggaggcttggattccccacccctgaacccaggctcccactctgcttcccagcacggtatgcaagcctcggtccccaaagcctgcagccccggcggcccctccattctcctcttccagcggtgtcttgggtaccgggctctgtgagctagatcggttgcttcaggaacttaatgccactcagttcaacatcacaggtaccagggtgactgagagaggccttgatgcgataggggcaggggagggaagggtggggcagagactaagaggaatacacttcccagagtagcagttaaagggacctaaagcctcaagtgtgagggtgcgttgagcatggccctatatgtagcgtcctcctctcctctctccagatgaaatcatgtctcagttcccatctagcaaggtggcttcaggagagcagaaggaggaccagtctgaagataagaaaagacccagcctgtgagtttggcgtcgttgtcagggctgagagatgagtcctggatatctgagtcactagagggagcgttgctctgggaggctctgagatgacacaagcatgttcttcacagcccttccagcccgtctcctggcctcccaaaggcttctgccacctcagccactctggagctggatagactgatggcctcactctctgacttccgcgttcaaaaccatgtgagttgggcagtgggccagtgtccatttgtggctccccaaccccttctagacaattccacatctgctgctttgctgactcaattctcatgtcctccccgctgcagcttccagcctctgggccaactcagccaccggtggtgagctccacaaatgagggctccccatccccaccagagccgactggcaagggcagcctagacaccatgctggggctgctgcagtccgacctcagccgccggggtgttcccacccaggccaaaggcctctgtggctcctgcaataaacctattgctgggcaagtaagtggagccttgtgagaagggaggcagagacctgtcacagacccatctttagtgagagctgggctttatgctgttcccttttagtaagttaatctgggaagtgggtatcattattacttatgttttatggatgaggaaactgaagctctgaaccacacagcaggttagtggtagggtgaaaattccaaccatgttaccatttattgtggtcctactgtgtgccaggcactgtgccagctcctttacaaaccctcatctcatctgatcttcacaaaacactctgtggctccacccaatatctctcaggcatctacaaaggctctctcttcctccgtcagagtctggactgggttcactggtccttgttttattgactgagcagatgtgattgacaacagctgtgcctaggggttaacctagtgccccctgctagatcaagtacctgactcccagcccagaattgcccatctcagcaaaggagggtggcattgtgacttttgtggatcataggcactttcatcttcatgagtcccttcgtccattaaaataaatagatttttatgtctgtgttggtgtaaagatgggtatgttattattgtgtattacagcattttcttctagttcatttttttattctgaatttttaaaaacggatttttcacttcctccctcttatttattttgaggcaaattctcactcttgtgacccaagctggagtgcagtggtgcgattgtggctcactgcagcctcgaccttctgggctcaagtgatcctcccagctcagcctcccgagtagctgggactaaaggcgcccgccacctcgcccagctaattttatttatttattgtagagatggggcttcgccatgttgcccaggctggtctcaaactcctggactcaagtaatcctcccacctcagcctcccaaatgctaggattagaggcacgagccacccagcctgatcgtattttgattttaaaaaaattaaaacgtttttatgggcccctaaatgtattgtgggctccaggcgctgtgcctgctgtgcctcatgtataggtcaatcctggagcgcagctggaagacggaacacgggagctagatctccatcgcttacaggctgcgtgatctcgaacactggattctttattctgatcgctcagagaggactcgaaaaacgccgcgtaaatcttgcctcactgggcatgtggttgtcagagccgctctgacccgcctcacctcccactcgcaggtggtgacggctctgggccgcgcctggcaccccgagcacttcgtttgcggaggctgttccaccgccctgggaggcagcagcttcttcgagaaggatggagcccccttctgccccgagtgctactttgagcgcttctcgccaagatgtggcttctgcaaccagcccatccgacacgtgagccccgcccggccgcaccgagcccgccctatctcaccaggagagctgtgggacgggcctccaccgcatgggtcccgccccacccgcgataccccactccacccctaccccttccccttggcaatgtccacggccccttggactccactcttcctttctgacccccacgttcctagttagatcttctccccctccccccacgcatgccttagtccagtcacccgggttccgcgcgggagaggaaggcgcgaaggcacggaggccgcgctgagtgccctctccctccctgcagaagatggtgaccgccttgggcactcactggcacccagagcatttctgctgcgtcagttgcggggagcccttcggagatgagggtgagagtgaactcgactcccatcttaaaagctgcgggtcccctcgacgtctcgccccagcccctccgacctccggagtcctcagggccatggttttccttctgctctcttctggccctgccctctcctacacagactccggacccgagccctccccgctctgtcccgccatagacccggctcctccttccccaaggctccctcggactgcccctccttcggccccagatctcaggtcttgtgggtcccccgtcccgcccgcaccctttgctttcagcccactcggttccctctcctaggtttccacgagcgcgagggccgcccctactgccgccgggacttcctgcagctgttcgccccgcgctgccagggctgccagggccccatcctggataactacatctcggcgctcagcgcgctctggcacccggactgtttcgtctgcagggtgcgagctgcggggcggggcgttggaggggcgggtcaagggtacagggctgtggggcggggccttggaggggcgggtcaagggtgcagggcagggggcgggccctcgggggggcgggtcacgggaggtgctgctaggaacctcgggtggggcgagttttccgggcagggtcccaccggacgggattcttcgcgtctagggcgggctgcggggtcccagggcgttatccgctagtaacgcgcgttgtctggcagtggccgctgacctgtctgtcctctttcgcggcttcccttccccaggaatgcttcgcgcccttctcgggaggcagctttttcgagcacgagggccgcccgttgtgcgagaaccacttccacgcacgacgcggctcgctgtgcgccacgtgtggcctccctgtgaccggccgctgcgtgtcggccctgggtcgccgcttccacccggaccacttcacatgcaccttctgcctgcgcccgctcaccaaggggtccttccaggagcgcgccggcaagccctactgccagccctgcttcctgaagctcttcggctgacagcccgctcggctcgccctctcccccggaggccgcgccctcccggaaaagccgggtcctccagaccccgaggccttgctctcagagcgggaggccccacccactggagagccccgcccctaaggtactatgagtcctcaggggtcaagttcagaaacggcccagccagacctaaacccacacgcccacaaagtggattgcacacagacaagaactcccgtgcgggcctccactctattcccacccttgagggagcccccttactgggggagggtccttgcaattccagcgaatcggaggccaggccaggacgtccttgctccctgcaccctcactgttctgtgcactttttctacctacataaacacacgcattccacctctc

SEQ ID NO: 91 - DNA, 228903 bp, Homo sapiens
gtaaactccccgcgctggggcgggcggccgcgagccggcgagcgggcagagctcggcactgcgccggggcgcacggctcgggggacccaggcccagctaccttccctccgcccccgggctctgttctcactttccagcagtggaaggacgggaagcgggagccatgcagtccgaatcggggatcgtgccggatttcgaagtcggggaggagtttcatgaagagcccaaaacctattacgaactcaaaagtcaaccgctgaagagcaggtgagtggtgacagctgggcagaggcgcaccgggcggctggggggcactgcgtctgccactctggggcgaggagagcgggtcgcgggagctctgggacaaggacccagtgcccttgccccggagcagagggcgaactgcccctcgcagttgggggccgcgcctgcccggcccaagtgcgcctttaggaagctcggatggagcgcacttcgcgggggcgcggcgggtcgccggggacgaagcgtccaggcgcggggaccctcggccgaggatgccagctgctgagactgattgggggctggggagcgacctggcgcgatgtgggggaggaggagcgccgggccgggacgctgtcccggtgggatgggggagaaagagttctagtgaaccccctttctgaagatcccagcgggttgagggctcggagagggagagctttgggtggactgagatgcgacattggagggaagcaattagttcgcttggagtcacctcttgggagtccggtctctgtggggaaactagcctctgggctcctgcaggtgaggtttctctgggctccgcctctcacctccagaccgctgctagcgggcgcgggaggggccagggcagcggtgggcgtgtccccttgttcaagttaaactctctggaaatagagtcccattcaaatccaggccttacctgcagaggggaaatgagccttggtcttgggggttactgggagtgtaccccgcttggcagagacacgtgtttaattcgctggggacttcagaaactttttagacgaggagtgaagacatccactgctctgatgccccatcccctctagtgcccacttcccttgagccaccctttttgctgcctccattcccacttgtctgtcgaaatggattgggtgtcttccgttctctctgtccggcagccactctggacgcctcgtacttctcgtttacaatgtttcctaaaagggacatggtcaatggaggctggaatagctgagaagggtttatttccacccctctaagctgtgagctaggataaggctatcattggaagcatccagcagggcttctgcactcggctgtaacttcctgccttgcccttcgctgtggatggggcctgggtgaatgggcctggctggcagagtgggagagggtcttgaaatgagggtgagtggagaagggcaactgaacggggagccaagtggtgtaatcttggcctctggcgagcactgggctggttctttttctagtggaaagtgcagccaggtttatttccttcagggctgtggcaggactctttatccaagttggggaagaaaatctgggaacagcggtcctactgactgccattgctgaagactctttgtagatgcttcacggcagattggaaggaaaccgcctaagcagttggacgtataaaaccagcctttagttggtggtttttcctcataatggctgttttgtgtgtgagcatagattgtgtgtgttgggggctgggggttttgagtaatattgtgtgaagggtattgttggttatgctcatcagggctttatctgcattcggctgaagggaccagtgttttactgggcagtctctgcttttgcttctataagcaaatgcttacacggccagaatgagggaatgagtgtgtgtgtggaatcctgaaagaaataaattaaccggactgtttggaacatttctgatggtagctgatacataacattaaatcagtttgagagagcgaggaaaataccatctggaaaaacccaaatgagtgccgtgaaactcatgttgcacgatttgggcctgttctttttcagagtcagcaaaaaagacttgtaagggtgaacgtcctcagtagctagctagcaggcacgtgtaagggaaaatgtgggtatgtgggaagaaatggcttcacacgttaatgctagaaacaggtgtgggcctgaaccagcagggaaaggaaggctaaattaaaaaagttgttgtaaaacttgtatatggagcacacacatgctctttgaaataaaccagttaaataaaatctgtgaataaatatatggagttggcaacatttctctatactgttttccacagttgtctaaggtattgtcgtcgacatctgttgtgtgacttaaaagggctgcacattgttcagggccttctctctcattgctttttgtcttatgtttttgctggggcacctcacttcttacaagtctttgtcggaaaaagttgaaattgatatgtgaagactgctgtagccgttctgcctatcaactgtcttctctggattgtccagagttgttagagttgaaaatatgtccagaatctgcccgcttcttaccacctcctctgctaccactttggtccaagccaccatcagcccttgcctggattattgcagtagtcttttaaactgcaatacccacatttagtgaattttcagtatagtagccacaatgttcctgttaaaactggttctcagttggaggtgattttgcccctggggtcatttgacagtgtctggagacatttgtgattgttacagtggaagggatcattacccatatctagtaggtggaggccagagatgctgctaaacatcttacagtgcacaggacagcccccacaacaaaggattatctggtcccaaattgttagtagtgctgaggtcaagcaactctgtgttaaacctcaagtcagatcctgtcattctctgcccagaacctgcccatggctcctaatttctcccagtaaaattcaaggttcttaagatgtcagctctgaccttatctcttgttgcctgcctcctacctccctctgctacagccaggctggtctcctcactgtttttggaataccccaggcccttccaccactgggcatttttatattgcacttgccttgatcatcctttgcccagacagacccagtgctcactcccccaccaaccagtatgtgcctgcctccaggagtcttaagaacattaagtgtgacgttgactgtgggaaagtattagcatggtgcctggcacgtagtaagtgctcaggaaatgttagcagatgttgttcttgttattttctttacagttcattctttaaacatcattcccatcacactgatagtgtggcccttttttgaccacagtatttgcgattgctgttcctccaaattctctgtcttctttgtccagctatatatttttttcccatagggcttatattataatctactgtataattttccaatatgttatgtttattacgtgtttctccatgctagactgcaaactccaagggaacagggttttctgtttgttccttgctcactattgtgtccccagagcctagaacaaagtttctcaacctcagtgctattgatattttgggccagataattccttgttgtggagggtcctatgcattgcaggatgtccagcagcatccctggcctctatctattagaggccagtactcctgcctctatcaattatggcaaccaaaaacatctctgaacattgtcagacatcccgtggtaggcaaagtaccctcatttcagaaccactggcttagaacaatgcgtgacacaataaatatttgtttgagtatgtgttgctttcttccttaataccataacccactcaaggtatggtatttggttttttgtttttgcaatgaatattgtgtttcctttaaaatagatacctactaggctttctccaaagaggaattcatatattgttcattggggctaacctcagatattcaagtctttcatgaggaaggacatgtttcatttctaacccagacatccttgcctttaggaatctgaagttgctggatttagattatgtgaatctcattttggtcatattggtggttaaggctgtgtataggaagacacatgctgtgggaaaaggttccaatgaattgtttgcacaccgtttcctccgacaaggttttagaaaccttgtgttctcctgggaatgagttctgaatggtgggtggcagaggaaaagcgctgaatatctagagtgagcccagaattcacataggcatagtcatggcagggaaacaaatgtgaaactgttgaatgagctcctaggagcagaggaagtctctacaggtcttttgtacccaaaaacattttaaaccgtaggagcatctttcaggctcatagtccttttgtttggtttactcagtccacatggctttgtagttgttaatgtccttttcctggacagacttcacagttggcttagtttaattccaatttcttcttaaatctttagtactatttagacagctgttattacattttctgcaaattagaaatgggaatgaaagtgagtattagctttatcatggcaggacaggatacagcagtgatccccaaatgctgattcacaaaggtgtgtgaacttttaaaggtttgggtgaaatgagaaagacaaagactgttgcgtcacacgcatacctacatatatttgggtgtaaggccgctgccatttcttggagttatgctgagatgtttttctcctgtcttcatattaaaaaatgccctttctttgatgacataataatccattcttggcaaaacaaaactgtcaatcattttttgatttctgaaagttttcttgattttttttttggtctgtctaatctgagggaaccactagcatagagatgaagagccttgttctgccatcgatgtctgtccctaactaactgggtgaccttgggcaggctgggtgacgtctaatttcagtttcctcatctggcaaataggggcctgcctccagtagtctcaagaatataagtgttacattgactgtgggaaaagtattagcatggcacctgacacacagtaagtgctcagtgctgacacatagtaaatgctcagtaaatgttagcagatgttcttgttgctattttctttattacctagcagcgaacctggcattttggaaggtgttttgcatttgcttgactgtggttgtcttctctaaggcaagtgttgttacgcaacacagttctttgaatgttagtaaattcctttttgcttttcttctaatgaagtgttcagataaatattttacactttgtatctttcatttaatcataacaattcttttatgctagttaaaaaaactaacaattttgacattagtgtatccataaaaattcgtgttcaacacatatttattgagtcctagtatgtgcacattaatactaataatgatgggtcacatttattgagtatgtactatgtgtgagccccattctaagtgtttttacgtgtgtaaaacctatttaatctttgtgaaatctgcatgaggtgatcataataaataaaaacaataatgatattaattataattttaaaaacagttaagacttatctagtgcttcctatgtgctaggcactattatgaatattaactctatattaatgctgttaattcaaccttgggtgtatgtaatagtttattattctcattctacagagagggaaactcaggtatgccaagttggtggggcctggagttaaactgatgcttctgtagctacatgctcttgtcctctagtctgtactatgcctggttgattgtgcaaaattcaaagatacatcatactgtgccctccctgtgtggtgagggaaagagaactcatgggtccagctaattatacaaggcagagtgtggtccctgtggcagggtgggcatcagcagttgggggcatttaacagaggaaggggaactggggaggcagttttgtggacaaataggggtgtttgagtttggccttaaaggtgaaacaatagtcaaatgtgtttctctacactaagtaaaatgttagacatcttggagggcatggtcctaaagtagacatttagggtttccgtttgccttttaaacttctaacctttctttaagctctttcttgtggtctccaggcacctgatgatacctcatggtggcagagaggctgcatgcatgtggacaggtttagagggagccctgcttaagtgctgtctgtggtcgctgctttgccacttaaccagtacatctgtgttcaagaaacttaacttcttggagtctcaatttctctaagctgtaaaatgagatcaatagaacccacccccttagggttggtagaacttttaaaactaagcaaaaatgtataaatgtgtttaacatagcacctagcactgttagtaaatgaaattaattcctccttttctagtagaattttactatggtagcagtttttacccttctcttaagaataactaaaacatatatagaatcatgcatccaaaacaaagtagacaagattgaggtgcctcaacctgcagatgttcaaatcgtactatgcagattcgttttgtggtatgattagagggaacacttgattaaagtgggattctcagtcttggtttcgtttgttattggagatttccttttcccgattactactatttacagattttacttaagttgatatatgtttaattccctttgagttctgcagtgcagtttgcacaggctgatgtttatatctgctccagttgtgcaagaagtggaaaatatcctttttttagaacagatcacatgtgcttactgtcaggaataggacctcagtgtaaaaaaatgtatcttgggacaaatcaaagttactaaatttccctctccaactgctttgtttcaggattggcagtattaggataaataataggaaaaaaaaatccttggctactttctttttgtcatctttcaaggacaataagtgagagtttcattttttttgtgtgtgtgtatgtttgtgtgtgtgaggtataaaatgtactttgctgagggtttgtctaatcggaataaattataaaaatatgtttgactacactccaagtatgcattatttggagaaaataatcatgaagacaggtcaaagatattaaatgcagccaccacaagcttttgatattataaaggcaaatttgcagtttataagaaggtttttgtgagtctagtgaacattgtgtactccgaggataggaattataccaagggataagtctgcatctttatagagacaaacgaggtcgagaagacccacagggaggtctgggatctctgttgaaatttctgcacctcccgttctattgcaaatgatcttgggaggaggaccaggtttggcttctcaatggtaagcttatttctctagcccatttctacaatgtggctttcttatttcttcgcttcgtctttccctcctgtggctttggatgcatgctgtgaagagtagagaagtagacctttggagtgttcacctgagacccctgtcctgggattcagagtgatgaagcttttatctttaatggctgacctttctggggacttctcaaggactgggtgctgagtgtcagtctctgtgctggccatagggagtccagtggagaagcagatgggttcctgctagcatggtgcatacatcttggaggtggcgcacagttaacaatgaaccaaatacatgagcaagatgagttttactaactgctatggaaattaaatggagcattattggtagaatgggcctatgaaagaagggggctttttattcggttgtatgatcaggaatgacctgttggaagaagtgattttcaggcaagactgaatatctgacataaaggcacaaatccagacactaccactcactggctctgtgactttggtcaagttatccaacctttctgaactctaattctctcttctgtaaaacgggacagttgccatcttgcaaggcttctgtgaagataaaaggtaatgtatgtaaagcagctaatattaggcttgaggcttagtaggtgttcagggttacccataggactgaagttaacatatgaatagtggaaaaagaagcacagacattaatctttgttataagtgtttataactcagtcttaaatgttttcctaatgttgagtgagtcagagattcatgcttgtctttataaacctaaccctggactaaaagaggagatgggtcttgttagttttgttatcctttctttcctctaggatcatcctacttgatgtcatcccttgttctcctgactgttgttgtcctgagataattaatgtctgaccatagtttttggggctggatttttaattacttttttggtgttaaggagaggcctaagtaattgaggattaaaaaggaaagcctgagattgatttcacaaaacatacacgcctaccacgaacaaataaccagtgtagaactcctgactcctagtcctgtgtttctgtcctgagatcatgcttcctgtccactctgttgtgaaaatgtcagtgttggtgcagaaacaaaaaagaagaagctctcctcccacataccacctccagtgttcaccaactttgacatccacaggaagtggcatgcatttaatttgacatctttaaaaaaatcttcaaagcatttggattttagtagctgtgttctttgattcaagtacccacagagtgataattttctttctttctttttcttttgaggtggagactcactcttttgcccaggctggagtgcagtggcatgatcttggctcactgcaacctccgtgcccaggttcaagcagtagtcctgcctcagcctcccaagtagctggaattacagatgtgttccaccatgcttgactaattttttgtatttttagtagaggtggggtttcgccatgttggctaggctggtctcgaacccttgacctcatgtgatccacctgccttggcctcccaaagtgcaaggattacaggcatgagccaccatgcccggccagagtgataactttcacaacgaaaaatactgggttgtgtgacagcaaatattttaagtctaagtgcatgccctatagagggcactggtagaatcctgtcatataagaaattgtgcctcattgagcaatttcaggaaggcatctgtggtcttcaccctccccacccttgcctcttctccaaagtggggtaacttgctgaatcattcacacacattcatcagttttcccatgtgattaagggcatcattggaaaagtggttgtccccactgttgggagaaagcatagcttgtatttgtagaataggtttccttctgggaaggttgacttgcctcagtggaaagaagacttgaggcagagaggtttcacttagcctggtggctgtggttatatatgaaattacgaaatgacagacaggaatgctatatttactttggtacctttaccataaaatattcctaaatactaactgattctaggaagcatgtttttcaaaaacatacattttattttttacagttggagatttgaaatttggtgaaaggaaatgctcatggaaatcctaaagatgatttccttgtttaactcaggacctagctcaatcctggtgaaggctactagagaacctcattgagatgtagccacactgtacctcttgcctgcagtgtgtcctaaattcgtagagatggtgctctaaaactgagttcatgaaccaacacacagatatgtcattggtcaaattgtaacattcccttccatcaaaaggactaggtatatatttgtcattgttttgttttgtttttagcatttgaattttttcagcgaaaggtggaaaggtattatttcagtgttagttttgctctgctgtattggtgagcctgcatagttgcaccatctaaatttaggatgctggcacctcagccaataagaactctttgtaactaatttataatgcttttggcagagagtgcctagaataaacattaaaatagtgttggccagttaaggtcatttactttcaagggaagagggtgaccccaaatatgcattcttgaaaattctatttatttagttttaaaggaagagtttacaatagcttatgtgaagcaatacctaaaaatataagcaactggcatgattcctggtcacattccgaataaaggtttgtccatttgctgcaaagaagcatgcttggaggataacttgtaagaggtcggccactggcttatggtatattaaacaaccagtgtgtagactttttggaactgcatcttgtatcatctcagcgtggtaatttttccactggtctttgggtaggtacacactaataatattttttatctaggcaaatgcgagatgagtaaatgctaaatgataggattttggaaggtaattctaacaatactgattatatttggaagctttaaattgttgattcagcagtgaatgagagagtttgatggtgcttgcttggtcataatatcaaaatcactaaagtgcatgatgtaacggcagggagctgaatggcaaggacaattaattggggtttgtttttgggaatcaatgataccacatgtcaatctgctgtccttagggagtctctccctagtgttacccctctttctcacttttgggttcatatacctgatacctttctaaaaaagtcaatttcatggctccaggagtggagaatctgatacaggcctggctacatgtccttatcacagggattggtttcacgggggtgcacattgttcaaagtgaatcccaggattttcttgggtgctaccacaacagtaatatagatctgataacaaactttctagaggaaactatagagctttccttttttttttttttttttccttttttaaaaaccagtgagtaattattatcaatgattatctctggcctgacaatacaagtgacactcctttttttttttttttttaactaaatgtattctgatctggtgaatttttcattctaaaataacaatacaagagtatttaatatggagacatgagatttgtggtaaaatcattagggcagtggttcttaaactcgagtgtgcatcagcattccctgtagggcttgttgaaacagatttcagggacacactcccacagtttctgtttggtaggtctggagtagggtctgaaaatttgcatttctgacatgtttctaagtgatgctgaaactattggttgaatcacactttgaaaaaatcatggcactaaggtggtggtgatggtgttgggagtgggggtgatttgctcaatgaacttgtgatagaaagcattgcatagagatgggatataaataatatataagcttgggtgacagaatacccatatttgccgtgtttaatcagaaaatgaatttattggttaaataacagaaaagtctaaagatggggctaaccaggccttccatggataggattcttggttgtataatgtgatctctgagtgacttagagttaacctagctttactaccataaggagccctggcccaaatctcaaaaaggggttgtattttaatctacactctaaaagtgtgaaacttgaagcatactgcagtcacttgactgaaagatttggttgagaaacagggtgatggtggttttgggcatgtccacatgaccaaactgtttttcacaaaacttctgctgaataaaatttgaaatactactgtcagcctgttttcctgtcttaatgaattccagacagtttgtagagtgtgggagcttccaaaacagagaggtggaatggatgtgaccagccagcatctgttttgtcacaaatgaggatgtcctgacataatggaatcgttccccttgttctgaatctcaccaagctgttcacttctctgatcatgaagtacagactgtgagaaggaagggcaaggccaatgtcatgtaacacaagccaaaagaaaatttctggattccttatttaccaggaaattcagcctacccctgtgtttcatccacttagacccaagcattttgatttttttttttttttttttggcatgttgacattctttagagaaaaagcgctgatctgttcttgttgtaaactggttaagacttctaaccagtctaataagtctaaatttcagagtaagacagatttgaacttaaattccaatttggccacttactggctatatatgtgtctttgggcaagttattcttgtggcctctgtttcaacagaggctgatatggtttggatctgtgtctctaccatatctcatgtcaaattgtaatccccagtgttccaggtggggcctggtgggaggtgattgggtcatggaggcagtttctcatgaatggtttagcactatccccttggtcctgttctcataatagtgagtgagtcctcatgagatctggtcatttaaaagtgtgtagcacctcccctgtcattctctcgctgctgctcccaccacgtgagatgcctcactccccttttgccttctgccatgattgcaggtttcctgaggcctcccctgaagctgagcagatgccagcatcatgctttctgtggaaccgtgaagcaccgtgatttaatcagcccatggaaccatgagtgaattaaacctcttttctttataagttacccagcctccggtatttctttatagcaatgtggactaatacagaaaattggtgccaagaaatggggcattgctataaagatacctgaaaatgtggaagcaactttggaattgggtaacaggcagaggttggaagaatttgggggactcagaagaagataggaagatgatggaaagtttggaatttcctagagactgattaaatggttgtgaacaaaatgctggtaatgatatggacagcgaagtccaggctgaggaggtctgagatggaaatgaggaactcactgggaactggaataaaggtcacttttgttatgtgttagcaaagaggttggctgcattgtgtccctgccatagggatctgtggaacttttaacttgagagtgatgatttagggtaactggcagaagaaatttctaagcagcaaagtattcaagatgtagcctggctgctcctaacaacctatgtttatatgtgtgagcaaagaaattacctaaagttgaacttatatttaaaggggaagcagagtataaaagtttggaaaatttgcagcctggccatgtagtagaaaagaaaagcacaatccccttggtcctgttctcataatagtgagtgagtcctcatgagatctggtcatttaaaagtgtgtaggacctcccttgtcattctctcttgctgctgctcccaccacgtgagatgcctcactccccttttgccttctgccatgactgcaggtttcctgaggcctcccctgaagcctccccattttctgggaagtaattcaagcaggctacagaaatttgcttaagtaaaaaggggccaagtgctaacatccaacacaacggggagaaggcctcaaaagcatttcagagaactttgcagcagaccctcccatcatgggcccagaagcctagggggactgagtcgtttcctgggccaggcacagggctctgctgccctgcatagccttgggacactgctctccacatcctagttgctccagatccagctatggctcatagaggcccaggttacactcaggccactgcttcagagggtgcaagctgtaagccttggtggcttccatgtggtgttaagcctgtaagtgcacagagtgcaagagctggggcttgggagcctccaactagatttcagaggatgtatggaaaaacttggatgtccaggcagaagcctgctgcaggggcagagccctcataaagaaactctactagggcagtgcaaaggggaaatgtggggttggagcccctacacagagtccccactggggcattacctagtggagctgtgagaagagcactgccatcctccagaccccagaatggtagatctactggcaacttgcactctcagcctggaaaagccacaggcagtcaatgccagcccttgagagcagctgcaggggctgaaccctgcaaagccacaggggtggaactgcccaaggccttgggattgcacttcttgcactagtgagccctggatgtgagacatagagtcaaaggagattattttggagctttaagacttaatgactgccctgctgggttttggacttgcatggagcctatggcccctttcttttggccaatttcttcctttttgaacaggaaaatttacccaattcctatacccccattgtatcttggaagtaactaacttgttttttaatttataggctcataggcagaagggactagccttatctcagatgagactttggacttttgagttaatgctggaataagttaagaatttggggactgttgggaagccatgattgtattttgcaatgtgagaaggaagaaggatatgtgatttgggggaccaggggtagaatgatatggtttgaatctgtgtccccaccaaatctcaggtcaaattgtaatccccaatgttgcaggtgaggcctgatgggaggtgatttggatcatggaagtggtttctcatgaatggtttagcaacacccacttagtgctgttcttgtgatagtgagtgattcttatgagtgtggcaccacccctgttagtctctctctctcctttttttttttttgagacagagtctcactctgtcacccaggctggagtgcagtggcatgatctaggcttactgcaacctccacctcctgggttcaagtgattctcctgcctcagactaccgagtagctgggattacaggtgcataccaacacgccatgttggccaggctggtcttgaaatctgtcccccttggccggccaaagtattgggattacaggtgtgagccactgtgcctggccccctgtcactctctcttgctcctgcttccaccatgtgagatggctcactcccactttgccttctgccatgattgtaactttcctgaggccaacccagaagctgaaaagatgtcagcatcatgcttcctgtacagcctgcagaacagtgaaccaattacatctctcttttttttttttttgaaataaattacccagtctcaggtatttttttttgtagcagtgtgagaatggactaatacagaggctaaaagaggacagtgcataataatatgatctaagtgatagggtaattgtacagattaaaagaaatacatgggtagagtgctcagcccaaagcctggcttttagttccctcgttctgattacctctgtattcacagcatcaacaaggtttttgacttgaatttctagttttagacaccttaataaagaaaaaacgactcaaaggcaatcagtgtgggggttggggggagaggatccatagaacagtggggaggaggaggctaagggagggaggagggtaaatagtctttaagttaggtaatcagcattaggatttttgggagttgatacaggtcaaatagtggtgaaaggtgggatgcctaacaggaagatatttaaggatggcacatgctatttacaagcatggtgttacttttgttgccagaacaatttttgtctttatcaacatgtttcctttcatcataattatagactatagctaagtggagaaataaataatgagatacactaattggggttacacaataccaaggctgtgtagcactgctgtctcaacacagaaatctcgaattcctaactgtcatgtttcggccttggccatagtgacttcctaccttatcttttcccacttgacttggcagcctgtttatatagttatctttatccaatataagccataaggccctgtattcttgagcctcaaaatctttgtatcttttacccttctgggttttttttttttttttttttttttttttttttttttttgggaatagcagtatatagccactttagagactaggatataagttttcaagggttttttctttccccgacacgaatatgatagtttgcttttcttgattgtcacacaatttctctcccgaaaactgtggcttaactggtcactagcaagcataaaggggaaaaaaaaagcagaaaggggggttagtccaaatagtatccatctttctcaggggagagatttcgattatattacacatgtatgtggataccttcatcagttacagtttagtcattgactaacttggacaactgggtgcctacctcattgaatagttgtgaatattcaataaggtgatgagatgctacctgtagtaagggtgcagtagataccagctgctgctgctcaccttactgctgctcctcctcctgtactatgattattgctctctgcctactgctgttttgtgctactactggtgtcattgctactagaacttagaagtttgcataagaatggaagaaatggttaatcacagaaacatttctctgtgcaggtggtattgactctctcattgccttatcactgttgagtaaataagcaacagtttggttctctatcgctgaaaaaactctaaccacatagtcaattctcaaatccttggggtatatgtggcaagtttttttttttaagttctaggatacatgtgcagaatgtgcaggtttgttacataagtatacatgtgccatggtggtttgctgcacctatcaacccatcatctaggtttcaagccctacatgcattaggtgtttgtcctaatgctctccctccccttgccccacaacccccgacaggccctggtgtgtgatgttcccctccctgtgtccatgtgttctcattgttcaactcccacttatgagtgagaacatgcagtgtttggttttctgttcctgtgatagtttgctgggaatgatggtttccagctttatccatgtccctgcaaaggacatgaactcattttttttttatggctgcattgtattccatggtgtatatgtgctacattttctttatccaatctatcattgatgggcatttgggttggttccaagtcttcgctattgtaaatagtgctgcaataaacatacatgtacacgtgtctttatggtagaatgatttataatcctttgggtatatacccagtaatgggattgctgggtcaaatggtatttctggttctagatccttgaggaattgccacactgtcatccacaatggttgaactaacttgtacgcctaccaacagtgtaaagcgtccctgtttctccacagcctcaccagcatctcttgtttcctgactttttaatgattgctactctgactggtgtgagatggtatctcattgtggttttgatttgaatttctctaatgaccagtgatgatgatcttttttaaatatgtttgttggccgcataaatgtcttcttttgagaagtgtctgttgatatcctttgcccactttttggtggggttgttttttttcctgtaaatttgtataagttccttgtagaatctggatattagacctttgttagatggatagattgcaaaaattttctcccattctgtagattgtgtggcaagtttttaaacctatcatagcactgggttgcagcccaggagtcttccagaccacttcccccaactatcagctgttgtgtgcataggaatgagattaccaagtttgagtaccaattaaaggaatgcatattctatcagaatccatatatatatattcatacaaacatatgtaggattctcaaggcagtgtttttcaaaatattttcagactttctccagtattcttactaaccaaaacttgactcttggttaaacagttcccattcagagttttataagaaaagaggaaaaatgaaattctcctctttctgtgattgaaacaaaaagacaaacacactgaagaaactgacatagaagtaggtgctttagagtgagtggttatgtgttcagagaagctgtaagcacaggagagaagacagttggggaggtttggtcagaagtggaatggtgggatgagcttccgaactctgcattttagtgagagtacaggataaatctgctgtgtaggctggtgttgagagttaggacaccctgaacttggggaagagccagctatcagagatgaaaaaaaacagtttgggacattttcagaatagatatatttcttgagtatctaaatgggtggacggtaagagatccgacttttactcttgttttccaggagttatggtttgagaattatgtgtaggatcttcgggcaaattttcattgccttgtagtataaaaggattcttaataaatatttgttgagctgaggataatggggagcaggaagggtcaaacttgaaccagtgttgcctgtggaaaatgggtagctgttgagtgatggtgtggatcccagatcagaccctcaaaggccaggggaggtctttctgggagaggaaaagaacctggagttaccctagggcatgtgtgtgtgtgtgtgtgtgtgtgtgtgtgtgtgtgtgtgtgtgtctatatatataatactctcttccaccactcataaagtatatatataaatatatatatatataaatatatcatatgcacacacacacacacacacacacactttcccagcactcagaaatatatttcattttatttacttttttttaagacagggtctcactccatctcccagattagagtgcggggatgcaatcatagcttcctatagcctcaaactcctgggctcaagcaattcccctgcctcagcctctcaggtagctgggactacaggtgtacaccaccatgcctggctaattaaattttttttttctaaggttgggatcttgctttgttgcccatgctggtcttgaattcttggcctcaagcaatcctcctgcctcagagtcccaaagcactgtgattacagatgtgagcctctgtgcccagcctggaaatatattttaactggtgttcactgaagatggcctttagctatcacttttttaaaaggctttatttttaaaataatgtatcttttaataaatcaaaagcttcttatgtatcaatagcccaatccggtaatacttattttattattggttagttcccatgggaacagggaatttgttagttcactggacatctcaaggttccaggatacagagtgtgtccaataatgtttgttgaataaagaatgacctagatggctgaagtgtttctggtgtgctagaaggggtcagtaaattttggaaactttgctaaaccctttcaggaaaatgtgtaagaaattatcttaccttttcttttgttagctatgagcccttgccatgtgtttctgagccttaatatctttacctataaaatggagctaatggcatgtccttcttgggataactgtgaggattatagaagataatatgtaaaatgactggcatatgtacattctcaatacaaagttagtaggggtgatgattgttactgctattggtgctaaagatacagactgctaaaaatacagtcaattctcattatttttgttttataaagctgctacaaataccgaattagcaaatactgaatgattactactagggaaatacaggataagttccttagagcctctggtcgcaacatttaatcaatctatcaatacataactttgttttatgtgtgtttctgtgtaaagacacattatttaatatatattgttgattcattaacgttgaacttgtggccagcagcactataacctgactgacttaggaacactagacagcactttcgcactaaactttggtgccatactgaatagaggagtcaccaacaaaaacacacaaaagtgcaaaaaatgtggcactacatagactgtgaaaaggacacttttttacaatatgatgtgagagctgaaatgagaaggcagaccaataccttatttaacctcaattggtaacgtgcatgttgggggactcaaacttcttgctgttctgtgcacgtgattgactgtaaaaactctgagaatgttgattttgggtttacaaatcagttttagtgagtaggtgaatttgaaagtggagaatccatgaataatgagggttgactatattaaaaactgttttcttgcatctgtatttctctagcagttcttcctctggactaaaaagcttacccactggggaaaacattttaaaacactatctgctcagatgttgtggattacagagggagccacattaataaagcttttccaggtacctgatcgctctcttttttttttgagacaaagtctcgctctgtcgtccaggctggagtgcagtggcacgatctcggctcactgcaagctccacctcctgggttcgtgccattctcctgcctcagcctcccaagtagctgggactacaggcacccgccaccacacctggctaatttttttgtatttttagtagagacggggtttcaccgtgttagccagggtggtctcgatctcctgacctcgtgatccacccgccttggcatcacaaagtgctgggattacaggcgtgagccactgcgcccagccctgatctctcatttttatcagtttgtttgccaataaaaatggcccatcacttccagatctttaaagttgactgaggcttcactgttcagatatggtagaattttgacagatttttaatcattctttaataaggtggagtgtgaggttggggacccaggaaaagaccacagagagattatggaccattgctgaaaaatccagcaaaaagcagtaggattgacagagggcaggtgagcccccagattggggcctagcctgggagggttcttggcattgctcaggaaagagttcaagaacgagctggtggtggaagaatgcaggtctagtgaagcaacagtgtacaacagagtacctgctccttgcagagcagggctaacccatagacatgcacccagagtagcagcgtatggactgtagactggcagtatttatacccacttggaattacatgcaaatcaaggtacaggttactcagaaatctctagaaaaagggtggtaacttttgggagttgccatggcatttgtaaagtgtcatggcactgctgggagtgtcttatactgatgagcagtgagggcacctagaggttgcctttggtgccatttgctagttctggtgggtttcttcatttcttcctgtggagaccaggaaataagcgctggtagtctctacttcaggatggcttagaaattctggtgtaggcagtttttgaggtaaccaggctcagcttactcagggcctagaggataaaggtgatgattttgacttttgcaagcattggaaattagcatattatagttatcagaatggtcattattgtaaacattaactgagtacttgttgggattgcttggaattcttttagaaagaaggagaaaaagaattggtttcagtaggttctgtactttcaagttacatagcagatagatcacacaatttagtgacaacagagcacaaagaacaataataataacagtagcatctagcatttttaaagccctctttacagatatgccttgtgttagtgctttagcctatcttttatatatttctatagtattcttacagattatactggagttaaggaaggtacctatgtaattaaaaaaaattctttctgtgttagaaaagtgaagaaacagaaacatcaggaattaataatttacatctaggtgaattataaacatagtaaggcacttactatctaccaggtacagtatttaagtgttttatataatataattctaatatgaggtagataggatcccattttataaatgaagaaacttgtgcttgtctgttttctgtcacttgtctatcttaagttactcaaataaggttgaaccgcgattcaaactgaggactgtctgacttcaaagctcactctcttattcaccatgctggcagtggtttccatgtattttggtgttcggaggtttggagggagaggcaggagtgatcaggagtgacaacttatgttgatttttgaatggaaaggagactaggtttcttatgaagtaaaggcagaagactcagggtgtggttgcacattcaaatccaaaacaaatagttatatctattaaaggtgctcacagcatgcctgtctgcatagtcctttgtttctaaagctgcttctgaaggaggaaaggaggtaggctgtgaatcctccaagaaaggtaggaaaagatgggatggtggatacttaatcattcacaagggtgtggtatataagtaagtggtagattttcctaatttcttattaataatcttcaaatgttgctacttgatgacatcaagttgtcttgtctacatacccatccttgtgttctactactgaacatgaacatgtagctcataacatctggatgtttttcactcatctctttttccctctctcttttttctgctaacctgacttgttgattgctatttttgtgtgtcttcataaatttatagccagtctgttccattctggactgtttatctttggcatgccagaggtctttaaacatcataatgttgtgtaatgagcataacttctgccttgacttgtgggtgttaagagcattagtcagtgcaaagtattgagttaaatattttcaataaaaggatataatgatctagcagagaagaagttataaaaaatcctagttaatggctttaatggtgagccatatatttagtgggttctatcagtgatgagttagagattcacagaatgaatgtaaaagcattcttacttttaattaatgagagaggagaaagaaaaacaataataagaaaaaaaggacttgattctcatccataccaagaaaagtgtaaacatccaagttcccagtgattctaaccctgattcattaccttgcatgtgtctttaactaccacaagaaatgtttaagatttccattgagatattatcgacagggactcctgggctgcatcataagcctgattgaaagcctttagccttgtaatgatctctttttggaggacaatcagggaattctttgcacctttatcagagagtcagggctttcctgagcaaacaaactaggtctttacctatggagctgattttatgaagagttttggtcagcattagtcattgtgaaaccatgggcctcctgccctggtttatctcgacagtcatctccctacagcagaagattgaatcctcatctctccatgagtctgagcatctaaagatgttagaggtacattggtttgattcttgctggggaatgtgtagtgggtactggtcttctgggaatagtgtctagatgaatgtttaataatcagtttaataggttgatgggctgtcttatttcctggggttggaggtttaaaccaggacaccctgtgctaactctgctctttaccttgccagcaatcctcagtcgtcctggtaaacaacctctgagttaaataccttttcttttctggagaggttaccaacaaaggaaaaggctttgatgtcagaacagggggcataaacagtgtttatggctgctgttaaaaatttctcatctgggtattttcaaaagaattccaagtcaaaatatatcacttatgggaagtatcttcttttccaatatgatatcttatgaagttgataattattttcatggtttaagtagtaattgatgacattttgggggttggaagatttgtgggaaggaggacatagattttcatcagatgtccttgcgtcctttccttgcgaggattattgatctctagtcttcatatgtaaggtgttgaatttatttaatgttattaactgaatctatagataaagaggtagttttggagccaagtaacctgttgatgtaaagtctattttaccttttatgattaccatctagcacctccctccttcctggctgaattccctgtcattttaagtaggcagcaattactggtttgctaaagaagccagctcctgctgccaaggatcctgttaattatcactctatctctaatttagccttcctagtgttgagagaaggtgcacgtaagcgtgtggcagaacgtctgcaatcgcatctttgtaataatctcctttctgagacggttcagtggactcaatgttccgccaaagggccaaggcagccctggtgagtgttttcagctctcttctgtagcttgtttggtcagtcgagtttggtgtgattgtcctctccttttgcttctgacctaagtaaaagctaatggttggcattaatcttgggaattcagacctattccgctccatctctgaagtcaaatgggacaccttgaaaatacttcagtggttttcccacgagctattttctctctctgtgaaaaggaaaccaggaaattgactctgtgcctgttttcaagaaggtaatacagatgataaccaaagtacctcagtttacaggttcttatatagcatgttttttaagggatgtcaatctttatatcgtatgaaatctttggttcttgttcataaatggctagattgctttctgtttgttttcggaaatgttcagttcacttgtttcagtgaacattttttcagaagttccactggatcatttgattaggtttggagtgcttatgcttccttttccactttttatgttatttttggcagtgttggtatttgaagctgtagaagtgattcactgcaaagtgcattaattttccacatttccaaatgcattttccagtggtccccaaatttcttttcctcttctcagatgattctgcagttgtccttctgtcattctgctggctcaaacataaatgctgatgtcactgaatttcttaaattacagctggtggggattaacagaaattgtaaaagaataccacttcctcattttgctattttcttgactaattattgtcttttcaagtactgtaggaacatagggatttgaaaatgaattctttgtcttgcagtttaaacagcaattttccttttcctttttctgttatacttcaaaaataatgtagcgcttaggatgcttttctgatgtgccctttaataaccccagacagaggagtctcactcctgattttgcactttggactgtcttctaccctgggtgaagggttttgaatacttcccttaagtaagtttccttatatagaatatttttactcaacagtttttctccgactcaaggccgttactggtattatgtgaaaggttgtgattaatttatttgtttgttcagagcctttgctcctttaaggaatgcttagctctgtcctcatcattttcttgtttaggatctgtgttatttgtgacaattttgattgctccagccctctacacattaatttttctggcttgcctctccttgttttaacagtgggagtctgggcctcaggctttcttatcacttggtttgtggtttgagtgatggttccatgaaccttttcctgggagttctctgggctcctgtgctggacgctggaagccatctggaagtgtgcacacaggatggctgggtgctgctgggtggtattgattgaactgcagtcccgtggaaacagaaatagaaagggttcagcattcccactttcctctggtggcatttttgcttattttgtgtatttagaaaaggtagccatatgcaaactgctgacttactattttccctggaatggaaaccatttggattatttcaatgagttttagcgaagatttgtttgttcacagtattagttttgttttctggtagcctgtttagaataagaccagaatgtgtctttttactttatggaaatgagtgcttacttggtgtttggaattttgcaaaccaacatgaatttgaaaagtcatatgtttattccagagtcaaaatagaaactctttagtgaaaattatagatatttccatcttggatcatttactttctgtgaaaaatttttttttgacaaaattgtttaagatttcagaggaacctcttttcctggttaattttcccacaaattaatttccctcatttttaaaaagaaaaataagattaaactgaagaattgcagaccaagctcatatgtgctggaatatttgctgtaagctggtgactgattctttgctgttatctttcataagagagtggatttagtttaactgttagtagttaaggtttggattaggaatacaaatatgattcccttaccataagaccttttaagcactgatttgcattgctgaggataagttatgattattcagtctcgggaaaatttgtattataagatccatatacacttagccaacattgccttctaacattgcaatgataagttcttttaattgagattttggaatggtatagctatctggaaaatatttcaaatgtcattgtggagcttttggttaaatgtgagttttaaaagtttgataaatagaataaagagcggaaaggaaaaatagttatgaatttgttgaattgtttgggctatgagttatctttttaaaaagaggttttatgtttgtgtagaaaatgccactaaatataagaaaatggaagtttaatagttgaacaaggtaagaattgcagatatcatgagattgtaatttaactggagtatgcattaaatgaattgtatatttcactagcttggtgaccatgaatggttttgtttgtcattttatctttcttttcttttctttcttttttttttgagatggagtctctttcacccagcagcacgatctcagctcactgcaacctctgcctcctgggttcaagtgattctcctgcctcagtctcctgagtagctgggattacaggtgtgcaccaccatgcccagctaattttttttttttttttttttttttttttttagtagagatggggtttcaccatgttggccaggctggtcttgaactcctgacctctagtgatctgcctacttcggcctcccaaagtgttgggattacaggcgtgagccaccgcacctagcctctttatcattttgtcttatcccagtaaataccatcatgctggaccttgtattaaaaaaatgttgaatcaatgaatgagtgaatgcacgttttgggaggcctggttgcagacctatctgtgctgctacctactcatatgaccctgtgggtctgtctcccgctatatacaatgaaggctaaagatgggatcagggataagtatgtgggattgtgttgctccctccttctgctgcagtacggtagatattgccaactgtcacttcactctttcctgtgaacccaggaggagccttgggcctttctgaatttagtgcatcaggctcccatgactcaccgtagatacaagagttaaaacttactgtaccttctccttttggatttggtccctgaagcccaattacaaataggcaatattctatgatgtttcttggtcagcagatgttcatttaaacaatagagacaacagcatgcaccattatccctccattcaataatttttctggtagatttagcagatatattaatagatagaacttaatgaatgggtctagacagtattcttccagtggagtaagatatgaagatataattagattagcagagtttttcacttttactctccaaagcacatgtctccatctggggcacagttatggagcacctcctgtatgccagcactatgctactgataaatggccagcctgtaattcatgggctctgccttcttgtaactcaaagtgacataagtatgatgctaggtctgtaattattcctttaaagacaaaagatggaggggcatgtaatcctggcactttgggagactgaggtgggtgggtcacttgaggtcaggagttcgagaccagcctgaccaacatgataaaactgcatctctactaaaaatacaaaaaattagctaggtgtggtggtgtgcacctgtaatcccagctacttgggaggctgaggcaggagagttgctggaacccgggaggtggaggttgcagtcagccgagattgcgccactgcactccagcctgggcaacagagcaagactccatctcaaacaaaacaaaacaaaacaacaaaaaaacaaaaataaaaaatgattgtcaaacagatgagaggaaagcattccaggtagaccgaggcatggaggtgcagcatagtgtggcactgagacagtctaagcacggagtgtggctggagcaccagggagtgcggccagcttcatacagaggaatagtgctctggctgccaaatgaagaatgggttggagggtggccagggctggtgtcacagaggccagttaggatggttccagctgaactgtctttgtgaggaacgatgatacacatgcatcgttcagccctgaagataggttgtgattgcaagagggtaaaaaccttgttaaagatttcaaggacagtgaggacaaaagtaaggctatatgtaaactgcttactgctgacaataaagtgactgcttgttcatttctttatcatgtaggtggatgcctgttctgtaccaagcacctggaaaatacaatcatgtgtaaagtagacatggtctctgcccacaatcaagcaaaaagaaaatgattgattactaagtagtctttataaggtgcatgagcaaaattcttagggtccatgctctccacagattcccctcctttcctgaagttaatttatagtctgacaacatgttctctgctttctataggaaattttggaggataaagttagataagaagataaacctcaaggtctgtgccttatatggagcatgcttgcatgtacacacacagacacatgctcacatacacaccttcctcccctaataaaagacacctgtcttcactccatagattgacaagcatctagaataaggcatatgaggattcccataagtaaatctgctccaagaaaagttctagatatcttctcatattttctgaacatgatattttacatggaagaatccgggctgttgagttcctgatccaagaagaaaagtcttccatacataatttggctttggtggctgcttcagattagccattctatctgtgttccaggttattaccggtgtttggaattcatgtgcagaagcaagaatttgccttgaggcagcaagactggtagacactagataagtggcttattttaaagtgatgttttggtacagaaatggcagtaacaacaaattcctccccctaatagaaatcttcctcacattccctatccaacccagaatcatttataataatgtggagtcaaaattcagctgaatgggtttgatacaaattcctaggaagccattgtaagttcaagcactgtgttttaaagatgaagcattcaaatttattaggatggtaattgcagctgatgtaggtggggagggcatgtgtcccattttgcatgatttggagaggcaatagcttgttgagactaaaactctggagtaggactgttctaggtttgaatctcagctgcactgattggtggctgtgtgagtttgggcaaatcactaagattctctcttcacctgtaaaatgaagtagtgggtaagcatgtaagtcctttgttaaatttgccaaggtttgagtctttgttgtactactgtatgacattgagcaacttgttctctttatatcttggatttcttatctgtaaaataataataacagtaataataacaataatgatgatgataataataattatggtccctacctcataaggatgtggcaagaattaaatgagattatgcacacatagggttttcatcttggtagtctggcacctagttagcactcatatcttactcaactatttttcctgccatcattatattgagctttctaaaaattattattttttgactacttattttgttctttctgaaagttagggcttcacaaagtgtagtcgttgctatgtgatttctttttttttcctttttgatacggggccttgctgtgatgcccaggctggagtacagtggctattcacaggtgcaatcctagtactaaccagcacgggagttttgacctgttccatttctaacctgggctggtttacccttctttatgcaccttggtggtcccctaggaggtcaccatattgatgccgaactcattgcactcaccagatcagcaaagtgcactacagcccggaactcctgggctcaactgatcctcctgcctcagactcctgaatagctgggaccacaggcatgtgccagtgccttttctttctttaaactggagactcaataatgcaatttctgaatttggggcagagttgccagataaaatccagaatgtccagttaaatttggatttctgatacagaataattgtttactataactttgttctagatatttcatgggatagcgagactaaaaaatattctttattcatctgaaattcaattcaactgggcattctgtatttgctaaatctagcaatgctagtttggtagtaaaacatactcctttgccctctcattcattttttcactcagatagatatttgtgtatgcttataaaaatgcagtgaacaacatccttggggcataagtatagaaatagtttcataaatttgaaaaaagatttcttagtatctctggtaaatctacctcctaattccttctccctgtgtaagccatgggaccatcaaattgagattatgttgatacttgagtatatagtatgatgttgcttgaaaattctgaaatgttctagtgttgcttttacctaaagggaatgattaatggtgacacattaatgggtatgcattccagagaatcctgaaagctttgtcatttttgaaggaaattacctcattacttttagagtcacctatccagggtaggttggtccctgtggttgacctggttttccaagtaggaaaataaacacttcaatggttaggttaataacttggagtgattttgttgtacttacaattcaagttaatttttaagtaggattggtctttaagctactagactagttggagactctgagagaattgcattctaagagtgagatcctttcaattcaatcagcatttactgtgtattgactgtgcaaaagcaactgcatatgaagagagaggaatttaaagtgttttgagttcctgctctcaaaaaccttagtgtttaatggagcacgaaagcaagaagcaattatgacaaaaggcaagataaataaggtcaaaattgaagtctagtaaagctaggtcccaggatggttgaatgtaggaagtggttaaatctggaggccaagtagagtaggaatggcttttattaggacaggtttctttgaaggtaatatgtgagagaactattcaaagataagaatgatttcatttgggaaatgaaatgttctaggtgtgggcttagcattaacaagtatccgaaggtggccacattttgaaatgcacgtgttacttagacatgacaaaaatatatacagcaccaccgtaactgacagcaaccgcttctctcatgtgtgactgtttatgatctagaatttccagatcagaaacttgattttatgtaggtggacctggattcattccatgttggtttcctaagtatttattgtgcacctgctgttgctatgtatgagacagccagagagacttgggcaacatttaggaattcttttaggtggtcacttaaaccaactgaaagttactccgtttaaacatgggtttttttttttttcctgaaatgaacacttccagtgagctctgatttaaattgggcaaaatcaacagcaaaagaattccatgagaagcatcttgtcaggcgctctgactttgagtatttgcttaaatgactttacaagccagcttaactcatttcctgttggatgacacttgtttattaaacttggcccaagtcagagttaatagccttaatggttttgaatggtcccaagtgattctccagcagtgtgtcattagtgaacggggaggattctacagataggatgcaacacacacatagctgcttcagccatcatagatttaagagaatacctatagccctcttaaatttagctaaggaaattgagaatactggaaagtaagtgttaccattgcagtaaatgctaaaatatttttcaacagttctagtagttttccttttttgtttttttgaaatacttccatgtgaaattaatgccatttaaaaatggcaccagcattcagaacttgaatcatcccaaattctctagcaaatgaattaaaatgtgacatggggttcatgttgattaacagatgtgtgtagagaattggactgggtagcctgccatcgcgatgcatgcttgatgcatgagagggattgctaagattgggaatggaaaacttttctacttttccatttatgtgtgtgttgggctataaagctctaaattagactggaaattggtgatgcatttggagatcgttggtttttaattttcatcaattaggattgatgtatgtcttttaagtttggacaagttgttctttgtggatgattttgctatttcaggtactggtggggtaagagtagcctggatgcaaacctttattgggttcttaaacatgaaagagcataaactgcttatgttagtttgggtctggttgaatgttattaattttttttccttgatggccaggccaaatattatgtagttttaatatctacccttggttcctactgccttatttttgggcactcttaatatcttcctttatatatctgtcattaagttataattgaagcttcatgttttatatttagaatggtgcatggaggctcagctgtgccagccattcaggcctaatggcaaatgttggttcatgccagaaagtttttggagtctagtctcttttttgggatgtccaatctaagcaaaccatccttttctgtcttaagctgaggggcacagggaagcaatttagaagtgatttccacttctgtgcatgtgacagcatcttgtttctgataaaaattatttacttgctagttcactctttaacccagagagtcatgcagccttaaaagggattgctttgacaagtctttatgtcacttcattccttagtttactgacttccatgcggagtatcagtgagtgtcagttaaaagtgggtacatagtgatagtagatgacacccatgccaccagctgcttcctatgggctgccagatgctagcaaacgtttcacagctcttgaattctctggatttgggccactcttgaactctatccatcaatccatacacccacttattgagctaatatttattgaggttttactatgtttcaggaagttgtctaggtatgaggaatacagcagggcaccaaactgttgaaaatctttgtattcatggaacttacatgggcaagcagatgtagaaataaatatgtgaatgagtaaaatgcataatatgctaaatgctggtaagtgttatagagaacgataaagcatggctgggtttggggtgacttgtaatttaaaactgagtggacaaggactgcctcactgagaaaatgacatttgagaaaagacccaaagaagatgagggagtcatgccagtatttgggggcaaagcacagcagacagaaggaagagtaagtacatagtatctggacaggagtgagtctacttcagtaacagcatcatggccacagcggctggaccaggctgagcaaagtggggagttccaggaatggcaggaggtggggtcagtgaaggaatgggattggggcagaggcagacactgtaagggtttgcaaagactttgccttttactcattaaaaattgggagccgttgcagatttctagctaaaggagtagcatgatctgattaattcaggtagcagcccagtgtggtgggggaaaacaggggtctgtgaatttggagatcatgtaaaccacggttttgtcactaggtaggggcaaataaattcagcatccttagcttcaattttattccttcttataaaacaatgcttgtgggttggatagtttttcatgaccttccaggttttgatactgttaccctggattagttgccttcctgtgagtatttcatgtgtatggctgattacatttctccttgagtatgcatagctggaccacagatttgtaaattatctttctgtgctttatttacttaaaaaattttccataaacatctcaaattgaaaactatgaagcattaatacttctatatattgatgttaaaggttgcttgaaggctaaatggtaagggtaaacacagattataagctttatcactagccttaatactattttttgttatagaaaatagaattgatttgtagagtattgcactgagctatcagttgggatacagtgataaataagacacagcgtcttaaggaattgagtaggaggagagattcctggataagacagtaactcataaagtgttgttaatggaggagacagtcctggttaagacagtaccctacaaaatggtgttaatggcagaaaagagggccagaagccatgactaggtgcaggcccatgggagcacaggcagactaatattcaggtatgtcttcataccaatatcctttaaaaatgtttaatattttcaacaaccagttagacctagtgccacacatgctaggaggtgccagaggcctggcaggctttcttctacagccctgagcaatttggctctgccccaaagttgcatcatgatgtttggcacaccaaggtctggtaagtaactcttattagaagatggtttagggaccgtcttttattattcaagaatgtcctttggacatcttaatcttctcccttccaccagaatatttcttctacttcctgtgatgttatagtgctccttctagactggtaccccaggtagcaggatggctagtcagtttctgtatttcctctgtggagaagtattgctttagtcttaccttgtcttcaggcctccagtatgaactctgttgggagtcacgtggagccctagtcattttatccactgacgcaatgtattccttgtgttctgttaactggcttcttgggcagcctaggagtattctaagtttccaggtcaaagattctggaagcaactttccaagaggtagaagggctgccactttcccagactttccccttcaactgaggctccctgtgtatgttggggtgtggggtgctagaggccttgctgctgaggaaagttgccatggttaccagcaccgtggctctcggaaggaggaggctagcatgttagcacctcagctgtcctgtggtaatgcttagggggcaaatgaccataccaatgagcactgttagagctggaggggaaactgaggttcagaagttgacgctggaaacaggaaccaagagcccttgactttcacattgcattgcttcctttcagttattttacacctcaggccttcacacacattcttcctgccatcttgaacattttcctgccattcttctgttttctttctactcatcctttagtctccacttaaaggttgcttcccaacccacctccttgcccctcatctgaattaggttaccatgcttttcttttatggtttcctaatcttatccttcatgctgtttacataattattctatatgcatccgtatgttcagtgtttgtttccctactccaaagggccaaggagcacagctgttttgttctccattttattctcagaggttaagccaggctgtaacacagataggcagtgtatgactccataagtgaaagggtaaatgactggaaagaagactggttttctctcacctatttatgtgaaatgtctctgcctgtctcagctgagggtaacaactgttattggttttgtgtattattgaggatacagaagatgtgattcttgtctctaacatcaccaagtctgtggccttctggaattttattaagggttgtctctgcaaaaaccaaaacccaatgatacacacaaatcagcattctttaattggtataggcttgacacgaggggctgtgatttgtcaatttattttacaatatttgcatttttatttcttaattctgtttccagaaatgagctttaatgccatttggatcccccattctttttattaaaaatgaatagagaaaataccacttttcattaataggattcataatccttttttggagggatttgttttggcttgtgtaatggaacttttaagagggtaggcatagaaaactgactgggactctttgtagaagaaagagcagagttacctactgtgtgtaaaaaagaaaagcaggaacagtggactttctttatttctaaaactaaactgccctaattgttcatatcaaaagatgggcttttcccaagctcggttggcatttttaatttacagagaaagcgtgcattgttttgcagtgtgcattgcggttacattggctcccagaagattagctcaaaggtatctatgaatagtcacaccctaaattatatgaactgaagagttttaaagaggtggaaaatctgatgcatgctatttcccagacattcatgccttaggaaaataactagggaagtgggagagtgaaacttagaagttgctactttatattcaccaatgtggcacttgtaaactgtgtgaccctgggccactgaattaacttctgtaagcctcagaattgtaaagtggagataaaaataccagctaccttcagaattattgtgaggatttcatgagataatatatgaaaagtgtcacaatgcccagcacattataaatgccttataggtaggggatagtacactacataggataatagttaagggcacagactctggagggcctggcttctgaatcctggacttgcactcaggggtggggccatcttgggctggttacttgacatttgcgtgtttgagtttcctcatatgcacaatggagatagtaataatacctgctacatagggttattatgaagattaactgagttagtatgtgtcaagtgttgataacaacttgtggttcatggtaagtgctatatatacgtttgttgcgatgaagaagtctgggtcttgcagacagttagtctgcaagttcttgaaccagacttcataatgtaccaagtatgttgagcttcaattttctctttttgtaatatgcggatgattctagttataatgtcaatttttatgagaaatcggtgagataatgcatatgtaaagtgctcagcataggatttggaacatggaaaatactcactactcatagcaaagacttttcttgtaattgctactaccattactatgattatttccattatttttagtcctactatgaatatgcctctggcttatatagaacttatattcgaagtgaattccacaaacactctgtggaaataaaaaggattaatatgtagaaaataatgttgagagtaatgttactgttggtgtatttctataaatggagctgtttcagcaaattgaaaaatatccagtaaaagtcttataatcatgcatttgcaattttgcagatcacaaaagatcagagttagtcagggtcagtgttgggtggacagttttatattcatggaaaatgactcataggaaacatcaggaactaaaatttccaaaataaaaaaaaattaaaaagtcatcatataaactgtgtttaagtcaagtctatttcctatcttaactgagattatgttcatggagtaaagttttgacatggtctaaatttcaatgttatatcttgtttgtggcatcactggaaatgaataagtcctgattccagtgatggtaacattttccactttagtcatttgggtcattgttgctacaatatccatatttaaacctgtgtgttgttttgcaatatatctttaagttcaacttccttttttgtttcaagtgactagggaagaaaaaacagtgattataatacagagtacaaatgatgtttgagaaaagcagggctttgagtagcattggtcctgaagtcctctgtgttttaatgaagggtgggagcttgcactgagaagtcaggtgtgcagagaagtgctaatggtcgcatcaaggcctggatgtcagatcctttcaagtcaaaatatggaagtgctgatgaaattcctagattatatgatctagaaggacaagtcaagttatcccatcaaaaatatatgggggaacttccgctaggcatgtgcatatctctgataacagtatgccatggttggaaggcgggaacctggaagggaagataaattcaagttcagtatcactggggccatagaatgaagtactttttaagccatggtaagaagggtgggctttattagaaggccaatagagaggaatggaaaggttttaagtgggagggagggcattctattcgtgttactgaaagatcactctggcggtgccacagagaatgtattgtaggagatggtgacaaagaaaaccaataaggagcagtgtaggcaagagctggggtcactcgggacttgcctgtggagatggagaggaggtggagctgagagatatcagggaaggagaatcgtagggtgggtgattcgttggacttaagtggtaagagagagcaaggagggaaggatgtcttttagatttctcacatgggcaggtggttagaacaatggtgctgttcatggagatgaggctcttggtagacaaaacagattggggaggatgaatattaattcttcctcctatatgtggtagagtagatggatgtttatggggtataatagatgagtatagtcatttgactgttttagaacgagtctggttcttggggtagaacctgtgtttcagtcaggtttgcattttcaagcatgaaattaaattgccaattaacagttgtgtaaacaaatagggatttatttatctccatacaagaagcccagggctctgtaatcactgccgttgtttagtggctccatgatgtcagaaccagcatctcagtgatttgtcttgacttttttctaatatttgtcacctcatggttgcaagatggctgccgctcctctgggcatcacaactgctttacactttaagaagagtgtaaatcaagaagggagaacaagctatgatttcttattaacatatacagtatgaagtgtgcttaaagtttgactatatttttcttagataccttctaacacatatagctctgagtagtctttaaagtatgttaaatacatttttccctgattaaaattctcaacttgcaaaaaccatttttttttctctcagatttattccaaatcttccttattactaaattctcagtggacctctctgggtttcgagcaagtgcggaaaattccatttggtgttcgccggctgatgtgcaagtaaaagcagggaatgtatgatggaaaatgtcataccctttatgatgacttttgatctgtgaagaatataattattctgtgtttaaaactacagaagggaaatgtttattcactctttttgaaggtaacattattcggggtatcatgaagtgcaaatatttgtcctttgctgcagtttaattcaagatagtctcaccacctaatgtttgcagaattctgttggtgactgttttagctaacagtcattctgaggcatagcagaaggtgcagagatttttggaaagagacatctcaaggtgtaccccgatgctgtgtgattttctttaacttctctgaactggtttgttctgtgaaattgggtgaaattgggataagagcaggagacagtctttacatccttactacaaacatacacaaaaatgcctctgaaacaagggtggctatgacacactgaaggtgcaagttaaatatgatggggtgtggaatagggaaagattaatttctgctgggagatattgtgaactccatgttggagaatgcagaagatttacaggataatggaggatggccccaggcttatcacacacatgtagtgtgcaaagtacattagaagttttcaggatttactgtttctgataagggtcaaaatgaggagacccttgaaattctggctgagcgagcttgaactttgttctgtatgtgatggggagcaactgaagacttaaaaattcacggaaacttaatgtcgatagaagtgaaattgggggtcaaaaaatatatataattaaaattaaaattaaaattttcattttgatataattatagattaacacacagttgtgagaagtactgagatatccatgtatcttttatccagtgtcacccagtagtaacatttagtataattcacaaccggtaaatcaactgaagtcttttaaagggaaatccatgatatgctgaagtctgtgttaagtgggttgtcctagtagctgtggactagaatggattggaaaaagaacatggaagctaggacacctttgggaggctcttgcaataatctgagagtaggggcataacaataggattgggaagaagggatatttggcaatatggggctgataagagaagctgatgctctgtgtagttgctcaacaaagaggtattgagggtcagctgtgtgccatgcagtctggtaagtactataggggttaaaagatgatctaatagagacagggcaatgcaactgaaggaaaatgggccacgtggaaacgatgttaggctggacgagacagtgagttctgtctagagggataactactattctaccactggttgttaccatttgtgactataggtccggtgtggctggtgttttgatttcttagatgccagaaatctaaatttctttgtgaaatctctcaatttttaaatgttacctaatataaaattacaaagaagatgcatgccaatgagcagtcatctgtgagctagattcaccctgtgggttctttgttttcttgatggaatgtttagagcttatttcagttatctattactgggtaaattgagtggcttaaagagataactgttttatctcacatagttctgataattgactggggagcagttttcctggtctagcttggggtctctcatggaattgccattagatgatggctggatttggagacatcttgaagcctgccttgggctctaagatggctataactttctctttctccgttggtttcaggacctcttgtggcctctccatgtggcctttctagcagggtaaccagactaattagatgttagctcagaactccttatagattgtttcaacagggaataaatagaagctactagtctccttaaggctaggtccagagttgctagcacatcactcttgccactttctgttagttaatgcaagttgctccagaccagattcactgtgggaagggactgcacaaagcatgaatgatgggaggccttgtccattggtgaccatctttggagacaacctaccactgaaatcaagatgtctagatattggtgacactgtttatcaaaggtaaatgagggacatagcaaattctcctgtttagcattcatgttactttgaagtttttagaaaaccacataatagtgagttttgtttttttttttagtagtaactgtgattctggagaaacctggttgttaatacagtggcttcctttggaagcataattcatttgtagctatttggtgtccagttcattaaaaaataatactattaagtgataagacagatcttttctgctttgggtgagcatgttcttttcaaatacgtgaccaggttgttaatgttgggtccataatcatgtatcttttcagaaaagagcccctcagataaagtctgttacataagacttccaaatgtttattagcctgaatacatgcaactaaaatgtactttatcatggcgctttttgttctccttagactcagaactggctgcaaaatttgcaggtcccagtgcaaaatgaacatgtggagccccttgttatgattgtaaagacgacaccagcgagcattaaaccaagcccagggccctgtgcacctgcatagatctcatgcctatgaagtcatccctgcttagatttttgaaaacgtgtacaaaatgtgggagtatactgtatttttccgataaagggccattaactctgatcaaattctcattagattttgacacccccaaaggttggtcctactgcttatgcaaataagaaaagggtgaaagctctatgtttaacaagatctctgttcccaagcagtccctgtacctcctagccacagcagcaggtgttggcaggcgttagtctgagctccctgctgttcaggctttctgaatttgagtgattccaacacagttaggaacagcatatctcttgtcgaaggcttggcatgcttttttctaaatgtactttctacccctttactgagctctgttcctgaaggatccagaatagattgcctgtctcgttgatgagttcctaagttcatttggaacagacactaacacagttcattgcactaaagatttagggttcaacatctccagaaggtagttgatagactccagacaggtttgcaacattgtacaactgcagagagcatgctcagatcatggcctaggaatggcagcccctggcattgtgcagtgcacagcctgagtggctgtacacagaggccctgccctataagaatctcagtctgctataataatttagagaggttgttgtacagctgactttttaaataaggcatgagccattttgaattacttgtttggccccctgacctgtggcttcataagctcttaatttttgtttatcatctctatcaatcagtggatgccaaggccaaattagccctatacccatacacctgacccttataatagaataatagtagctaacatttattgaatgcttattatgtgctagcgactctgcatgcattatctaatttcatcttcacaacaagtctattagttgctgttattcttccatttaattgatgagaacactgagattaagtgtggttgtgtgagttactcaaagtcacaaagctaattaagtgataagctgtgactcgaacccagtcctgtctgatttctaaacccaagcagcattacagagggtgtgtttttagggcaatgtttgcacatggcagtattctctatttgaagcttgttttattgtaggccatttcttgcttctggagcattccctgattaaatattctctacctatacttatttctcaggatttttagttctttcaaagtaaccatcagacctttcataaattttgaatatcctttattactatctacttcagtaaatctaggaatatttaatctcttaattggagttacaaatggcaaatgctgaggggattatgttctaggtgagtgtttttgttttgcacatgcctcagagaacataaaaattaacacatttccttaacagagatgagaatagagtcctaaacatcaccagataatttcctactagtgataagaaaaattattctcatctaatttttactgctttcagtataatgtactgtaggatgagaggaacagaccagttcccttgataaacaccttttgaccttattccatcctttccaggaggtggaaattctgattttcccttggagtgatattccagttcatttaatgcatgtgaacagacaggttcttttccaggtgtgagaacaatactggtttggaagtagagacctaggtatcctctgacagattgtggggaagttgagatacctgaaattaccttttgcttggatgctccttgtctctcttgcccatctgtacagtattagatttctaacaatgtgatagactcttctaatattcctagttattcttgactgatagtttttgttgaacaaatagaaaagaaaggtaaggggctttatctgaatacagaatacttagtcaagtgtttgtatgtgtgtgtgtgcacgtattcaaaggagatatttatatatgatatgtaggatatatatatatatataatttatatatttaataaaggagattatttctcttttattaaatgccaagttgggttatgttgctttctgcaccacagataatgactaaggacctacttactctaatcgaatgatctgcccaaagactaatggtatactttattatacttatttgcaaggttctgatagaggatgttttaaattatccagaatatgtttttttttgttcgtgtatgtgtatttctaaaagtggtgtttcacaaagtgtagtttaagagttacctgtgtcagggtcacctggggatgtgttaaaaataggaattcctgggtctttggactccagctgtctctactgatttgaggttttcaggaatctgcatgtcgctcagcttctttgtgatttttgtcccactatagtttgagaaccatggtctgaaatgtgtcagcatagggataaagattcaacttaattttgtctttttttgttcccttcctctttcctgtctctctttcttctcccctttcaaatatattagagacaactattttaaggggtattttaatggcttgtgttttttatttgcgatgaaaggcttttgttaatgttagcaatatcacaattccatcttttcctttgtggtctgtataaaaggagccattggggaagagttgctttttgttttgttgttgttgttgttgttgttgttgtttaaatacccactattttccatagcaaatctccaggaaggaacaacatactgtttgttcttttttcaggataactctggctttctttgctagtgggtgttgtaatcaatgcttttcagaagcaacttaatactcctccttactataaatcccagaatttaatgcaaacatttctaacgtttatagaggctactttttggggtaagagaagggaggaatgaaaatcctttgagaagacattttgaggattctctgtgatctcagaataggtagtaatgactccctgagttttagtgtcaaagattttgagatctcttagtatagaaaacagttacaaagctagaagctttaatggatttttaaaaacacaaagtttttaactgaagatattcctgaaaggtaaattccctccctccttccccctcccccatattagagaaattacttttttgaggaagctgaactagccagctagtctccactctaatccatggtagataactagttggattattagagattggaacttttccaggtgacttggatagagactccctgaagatatattaagccaggcaatgaatttagaggcagattcttctttataaaggacttcttaaaataggaaaatgatgatctaagtgtcataaagttaagaaactattgtggtgatttcttctgaaggtcagatccaaggtttgtgtttcattgaagatccccagggaaatctcaagggtcctgtgtcccattctggagagactggcgtggactgtgggcccctgcagccagctgcttgccttttgtttattttccttgttatctttgtcaaagtgctgcagttggattttttttttttttttaaatagcacaagatgattgtctttctgctgtgtcttccacgaaagctttgtattagtggagaacttttggctgcagagctgggctgatctgtgtggcactgagcataattcaggttctcctgcgggcacttgaacattcttcatgagggctgaggcaggcaagctgagtggagcagtgagtcacggcgtgctgcggcagtggtgtcctgaaataacagcaagcagcagcagcagcagcagcagtaatttaacagcagtagtgagcatttactgatgcttcccatgtgccaggcactctgctcagtaccttctgtgcactatctcatttaaatcagaacaatcccatgagctcggtaccatctttcatgtcagttttacagatactcatctgcaggtcacatgaccagtaagcaatccaagtggggcttgaatgctgattgcttgggtgcccaaattcatgcatttaaccatagtaccatactctttgacagaaatgcacgttgttactgccttttttgctttgctttttccttaaatcacatcagaactggtttttgctttttccttaaatcacatcagaactggtttttgcttagtaatttaggctccatgacctgaagattgtcttttcttatttttatgagttgaggttttgagtgagagggaaatacaacctgagaaagttcatccttgggaaattgagcatggccttttgcctgagaccatgtccatctactgaatggtcaagggagcaaaaaaggaatcgtgggaggtgaaaggtagaaagattgggctagagaaaaagagatggacaggtagacacatccagggtgatctgtaccgtggatgaaggaggaagagggatatgaaacatagttcaagaactagagttcaaaggtcacctgggtaataatgccatatagggcttaatgggggaaaaggaaggttcagtgatcaaataaattggaaattgtacattctaacatctgtttggagaacaaaaaaagcagtgcagcacctaacacttcttgagtgcttcctgcgtatgctttaagtagcacattccactcttagattctaaggtggagtgagctttgccaaaggaggtttgactcctagagggaaatcagggtagtttccaaagtaaatgagaatggatgcagatttaaatagttgggactcatgccacaatttacctgatgtttttctcattctgcaactgcctggtgcctggtgacctttgtcagtggcttcctcttgttgcctctagggcatgaatccctgcttctgtctgctttacgggattgttgacagtaaatgagtatgaagtcctttgcgctctgtagaggtaagacgcttttgaagttcaaggtcttcataatgttcatatcaaatatctagagttccttcaatttagttaacatcgtaaaatgaatgtatatccttttaggacagattaaatacccttagcttactcaggagaggaaaggaaatgcatctaaaaagtgtttactgctctcaggagacatatcttcaagttcttatgggttgcaccgagatgactggtgacaatcctcgagtaacattgttatggattttatataagactgtggaaaatgagacgtgtttgcttgtatgggcttatccttttgaagcccagttatctggggcatacatccgtggaaataccgtcatttaaaaacaatttctttaaaattagggttggaggagcatattaggtaaaaatccattcagttggaaatgaccgaaagtccaactacagcaacaaaggagatttattcattcatttaggtgaagagtccacatccttttggacttgctttgagtatcatggttggattgaccataggcctggagttatcatcatgtacctggtttctcatccaatccactctgccttcatggtgttatgtcacttttagagtgttgctggttccacttcgtgatgataagatgtctgccaaatactcctggggctgcttattctctcccgcatgtggtgagagagagagagattgatttctgggagctcttccacgatagcaaaggagaagctcaaaccgttcttattggccacacttaagtcatgttccattcatgagccagtgcatgtgatgaaggaatgggttttaggctggttagtatagacaccagaaccatgttccactcctgaattctaagggggactgaacttcaccaaaggaagtgtgaaacctagaggaaaatcagggtagtttccaaagtgagaatggatgcagatttaaatagttgagactcatgacacaattgacctgatagttttcttgtattctcatgttagcagttatgtgtgaaactggctttttaatgaataaacgactagatcaaggtttaacttgtaaaggatcttgttccaagttcctctctgtttcttagtagtacaggctagactagaccaaattgaaggattctctttctttccactttttgaaaagtcttggtgtttggtttttgaatttgtaaagcattaagttgaatctgtatctggccgtggttttctattccaaatgccttttggatgagtcagtgtgaggtttcattagggcagtataaattaccctcactttttttctttttttctcttcttgatctcagtatgactgctccttatttctgacattgagcctcatgttttaatacataaaagattcctgttttcacatggatctcctacgtgtccaacattacattttatcctacaaaaattacaccactgataaaaataaaatagttattattgaaaggcataaataacaagaatggtggtggtagccagaagttactgagtgctgactgtgtgctgggtaagcgctgtgctaagtgctttatttgcattgttctgtttattcatcacagcaaccctgtgaaggagatgctgtcattatctctgttttgaagatgagaaaactgaggttaaataaggttcacaaggctgcatagacaggcagtggtggagccaaaacttgagcccagatctctttcattctgggacctgtcttcttaaccactattttctttttctttttttttttaattattatactttaagttttagggtacatgtgcacaatatgcaggtttgttacatatgtatacatgtgccatgttggtgtgctgcacccattaacttgtcatttagcattaggtatatctcctgatgctatccctcccccctcccccgaccccacaacagtccctggtgtgtgatgttccccttcctgtgtccatgtgttctcattgttcaattcccacctatgagtgagaacatgcggtgtttggttttttgtccttgtgataaccactattttctctctcagagaagccacgatactttgagtatgctatatacctaatgctaagtttaaaatttctggaaagttgcattatgtctgtaaattcttctgcagttagtgcttctgtatactactagtggtagaagattgaaagagaacccttaacatcttggaccttggaaaaacttgacccagaagtctttcaccaaaaatttgcatttacctgaagagccaaagcaattttgagaaagaagaacaaatttgaaggactcacactttctggtttcaaaacacattacaaaactacaataatcacaacagtgtggtattgacataaagacacacaaatagaccaatgtaatagaatagagagctcagaagtgaacccttgcatatacggtcaaatgatctttgacaagggtgccaagatgattcaatgaagtaaggacagtctcttcatcaaatggggttgggaaaactagatagatgcaatggaatgaagttggacccttatcttacacaaagtacaaatattaactcaagatggattcaagacctaaatgtaagacccaaaactataaaactcctagaagaagatgtatggaaaaaacatagtgatattgaacttagcaatgatttattgtatgtaacaccaaaagcacaggcaacaaaataaaaaattgacataggacagtcttctaggtgctagaaaaaaaaagaaaacagatgaatgctactccattaaacttaaaatcttttgtgcatcaaatgacacaatcatcagactgcagagacaaactgcagaatggtaaaaagtatttgcaaatcatatatctaataattggttaatatccagaatgcataaagaactcccacaactcaatcacaaaaaataaaataacctgattaaataattggcaaaggactttaagagacatttctccagaagtggtatacagatgaccaacaagcacgtgaaaaagtgctcaatgtcactcatcatctaagaaatgcaaatcggaaccacagagaagtatcacctcatactcattaggatggctactattaaagaaaaataatgactcttgttgagaatgtaaagaaagtggaactcttgtgcactgttggtgggattgtaaaatgatacagctgctacggaaaggagcatagaggttcataaaaaattaaaaatagtaatcccagcactttgggaggccaactcaggtggatcacttgaggccaggagttcgagacaaccctgggcagcatggcaaaaccctatctctactaaaaataaaaaatttagctgggcgtggtggcacacacctgtagtcccacatacttgggaggctgaggcgtgcgaattgcttgaacccaggaggcagaggctgcaatgaatggagatcgcaccactgcactgcagcctgggcaacagagtgagactgtgtctcagaaaaacaaacaaacaaacctctcatgtgatccagtaatcccagttttgtgtgcatgtatatatatatatatatccaaaagaattgaaagcagggtcctatagataattgcacatccatgttcatagcagtgctagtcacaatagccaagagtggaagcaacccaaatgtccatcagcaggtgaatggataaacagaatgtgctgcatacatacaatggagtattattcagccttaaaaagggaggaaatcctgtcatatgccatgctacaacatagatgaatctttaggacattatagtaagttaagtaagccagtgacaagaaggtaaatactgtatgaatccacttatagtaagttaagtaagccagtgacaagaaggtaaatactgtatgaatccacttacatgaggtatgtagaggagtcaaactcatagagacagaaagtacaatggtggttgctagggggagggggtagtgggaaaaggggagttggtatttaatgggtatagagcttcagttttgcgagatgaaaaagttctggagatctcttgcacaacaatgtgaatgtaattaacatcaatgaactgtatatttagaaatggttaaaatggtaaattttatgtaacatgtttgtttatttgttttttaccacaattttaaaaatttcacatttatcacctggcactaattttactacttcattgagtatttcaacatcttacttgaagttgcaaaccccaaggccacaggctgaatgtggcccatggacaatcagtttttgacaaatgtgaaatagtggtcaatattttttaaaaattaggaactttcacatcaaaacccctatatctcgcttctcttggaaaactggagaatctggaaattccaagtccctagtctgtccaatcaacaaatggctgtagctgaggagcagcaccccactttcagtcctaggcatgaaattcagattcatttctctcactctcgaatttcttatacaagacccaagtcctcgtgcagatatactaacttcctggccacagtatttgtaggtttaagatattaaacttcttaattccaaatgcatccaataataatagaccgtagatggtggatgctctgcgagctcccacactaacttctttttagagacactaatttctaggtttctgcttctgtttgaggtcctagagttatcatctctgtatttctatatgaacaaatatagtcccaatgcccttttttcttttgccattttgcgtacagcaaatgtcctgcaagtcatgttctaaatatagatgtgttaaatttcaaatgtgaaagtttttgaagggtctaaagccagtttgctaatcagggaaatgctgtgattggcgccagcacttgcagtccctgagggggattgtgaaatccggcctccgcaactgtgattcaagtctgggatgaaagaaaactccatgatcgctgaagagctctccaagttgttttcttcttaacagcgtggtggtggtggtggtggtttgagtgtcataacagagaaaagacaaatacatgttcctgagttcattttactagtactggattaatagtatggtaacaaatcattattttgcaagcaaaaacaaccatgttttgcaattctttatgtgcaagttgtaagaaaatgcctgtcaatagaaaggaatctagagacccaagaggctcaagacctcttcatggcaagttaagaagaatggctacttatgcaaaatataaaaaccttgggtatttgaaagttcaaactggcacagttttttctcttttaaatcttattattctgttgtttttcaagatagggctggtggcatctaatggcaagtagaggcaaaatactggaatgcagcagttgtgcgtttttcaaagctatgcactgcatgacatccctgtgtgtgcatttaagtgtgtatgcaagaggcattattagaactgcctatatgtttcatgctgggtctatttcattggtgcagtagaacttggaaaatgcagtttcatgctttgaataatagtgaacaacagtagaggaggccttagtttccaagactggtggagcagaggtattcggggaactttctgggaatgagacttggataattaagttgctgtgccctgagagttgctccttgaagtagagacggatgtgctgaatcctcatctgtacttgccagaagtgaagctgtcatctagcacagttgctgcctctgtttttgaaaagagatatgactagttgattccatcactatctgatgcagaattttcaaagatgagtagtggatcagagaaacgaaacaaaacaaagccaactgaactaaactgtgttgctagctgaaagggtctgatagtgagcaaagggccagatgtttggagttgctttcttcaattttatttcactgcttttatccattaaattggtcaacagcagcactcactggtaaaaataggaacaacagattcaagttttcctatgtgctgttacagtgatgccctttttttctttcctctctcatctccttgctttttccttccctcccttcttaagctcaagctttcattatatgattttttttttaaattccaaaagaataacgatagtgtatagataaaatgtggttaatttccctactcaccatccctaatcctactcttctaaagaaatcaatattaagagtttggtttatatcaacaatccttccccaacccatgcaaataagatatgtatctagagaaatttgtttttctaatttttacaaaagtggactcgttctgggtacagaatcttgtaacttgacttccctggcattattttattggcatctctccaaatcagtacatttagctcaaaatcgctacttttaatggctaatttttttaatagtatagttttatcacaatttattcataaaattccttattgattgattcctctgccccactaaaaatttcctctcctccactaaaaagatagcattgcatattttaattacacatacatatttttaaagctttaccctgtataatatttgaagaggaaaattaaagggtttctaaatgtttcatttgctttattactttaaattttttcttgttttatgggctaaagtctttagctttttttttttttttttttttttttttttttttaaacagggtctccctctgccacccatgctgaagtacagtggtgcaatcaccgttcctgggcaacctcgatttcctgggccgaagtgatcttcccacttcagcctcctgagtagctggaactataggcgcttgccaccacacctggctaatttttttgtattttttgtagagatggggtttcgccatgttgcccaggctggtcttgaactactaggctcaagcagtctgcctgcttcggcctcccaaagtgttgggattacaggcgtaagccactgcacccagccagattttctaatttgctgatttacctctttgaatttttgcattatagctatctatgctgtatagtgaaggatttctcaagctcggcattttagtcattttaggtcatatagctctttggtgtgagtagctgtgctgtgtgttgtggaacacgtagcgtccctggcttctacccattagatgctcatagcatgcaccctctcccaatgctcatagcatgcaccctctcccaatgctcaagttatgatgaccaaaaatgtctctagtcactgccagatgttccttgggtggaaaaattgctcctgttgagaaccactcctataatgtatataaggtatatatttaaaaacccagttatgtggaagaacactacttttctttatgtattcaccaacacttggcaacatgaatgtaatgtcacatgcattagaagtgaatctcagtattgggccccagatagtgagcttcacttagttcctgtgtacaagccagcactggaatgatcttcagtttatgccattttggtatccataatggcacatagacaacagtgtcctcatttataagttgtgctatctcaatcagacagtttgaatattttctggctgtggtggggcaacacctactcaaatgaggcaggaatgccatttgcgtctgacatcattttcttcgactgggatttgagcagttcacgaggcacccattgtcccacccatgtcaccccagctatatgaagtgtataggaggcagtggcatccaggtagccaacgacctctttcctctcctagtatcttttctacagagtctcccccaacttctggccttgagcaaaatagccccattgggaagatcactgagggaaactgctgtttccacatattctataatctttttctgtgaaaaggtgagctatatatataattatttaagtttcttcacatttgcaggtggctattgtggttggtctgcttaacgaaatagggtgtggtgttatgtatgtgaacaaagctgggcatcaggcccttcatcagaaatgtgaccccttattaaagcattgttttttgtttttacagaaagtcagatggctttgtgttgtttgacgtggttccttttccaaatagatgactgtaaagatgacctgatgatcctatggactgggctataaactttgtgcatctcccttcttgtgccttaatggcaaggtaagatgctggagaaccaattctcatgtccttggttggcattttaatcgtggtagcttggtcatcagggtaatggcaacacgttaaaattcacatgcattaaaaaaatagcagtgtcatccaggctgctttgcatttgttatttgtttatttatttatacatagatacacatccatgtagctactgcccaggtcaagaattaggacatttccagcacagtagaagattcccttttccccatcttagccagtaagcacttcccgaaagaatccattagtctgacctcaatcactctgacttagttttgtctattcttgaactccacggaaatggaatcaaatagtatttgttctttggtgactagcttttttagtctaacagtatagctgaagtacattcgtactgggacatgtaacagtagtttgtactttttgatgctgtgtgagtagtaggctctgtatgaataatttattcaatctttctactcattatggtgggcatttgggttctttcctaggtgaggatatgaggaacaaagctgccctgaatatccctgtacatgtcttcagtggatgatgtattttcttttgggtaaatacctgggagtggaatggttagctcatcttttgatagatttattcttagttatttaaatgttttgatgctgttgtaaatagattttcttttaaaatcttaattttctcccaagcgatgtattatgttttcatttgcaaactagtatattttaatagatgccatgaaacatgcattaaaattaatatttgcctctttttaagagagcctgatatacgacacttctaatttttaaaaaacatatagaaaattacgtgataactcttgatataaatattgcatttggtttttaaaaaacaatgaactgtcttacattatttaaaaataaatctaggctgggcatagcggcttattcctataatcttagcactttgggaggccgaggtgggaggatctcctgagcccaggagtttgagaccagcctggacaacatgacaagacctcatctctacaaaaattttaaaaattggctgagcatggtggtgtgtacctgtggtcccagctacttgggaggctgaggtgggaggattgcttgagcctgggaggttgaggctgcagtgagccctctttgcaccattgcactcctgcctgggtgacagagtgaaaccgtgtttcagaaaataaaaggtaaaaaataaatctaattacaacatgcaaatattttcaaaatatttctcatacaaagctaatatattaaatcaatctaatttcaaaggcacgtatttaaaaaatataagtatataatacacatttttagattatctgtgatttatttttgttcatatgtataccacaacattttatataggggtcttttacatcataaatcaaatccactgttatgaagcaaaattttaatcttttgttgctatttttgtttttgttttttgagacggagttgcgctcagtcgcccaggctggagagcagtggcacaatcttgactcactgcagccgccgtctcctgggttcaaatgattctcctgtctcagactcccgagtagtagggattacaggcatgtgccaccacaccagctaatttttgtatttttagtaaagacagggtttcttcatgttggccaggctggtcttgaattcctgacctcaggtgatctgcctgcctcggcctcctaaagtgctgggattacaggcatgagccactgcgcctggcctctgttgctatttttgaagattgtgtttagtttgtattcattttagaaatatggcaaagcattctttcttatttagaaaagggaatctaatctgaaaggatttttttttcttttagtgcctatgaggaatttcctaaatacttttgcaggtagtaaaacatttaaagctgcttgaatgcacagcagtttgtgaagcttacaaacaccgtctttctttttttttttttttttttttttgagacggagtctcgctctgtcgcccaggccggactgcggactgcagtggcgcaatctcggctcactgcaagctccgcttcccgggttcacgccattctgctgcctcagcctcccaagtagctgggactacaggcgcccgccaccgcgcccggctaattttttgtatttttggtagagacggggtttcaccttgttagccaggatggtctcgatctcctgacctcatgatccacccgcctcggcctcccaaagtgcaaacaccgtctttctaagatagtcatgaaacataacctgggacagagtgatttgttaggccatatctattgccttgacaacaaactaaacatttcaaaatacttgagcaaatgccaccaacaagtgatgtgtaggggttaagtggttaaagcagaagcaccaagaccatgtttgtgtgataaaggttgcagaaactgtacccattttataggagacttttattgcaggttttctgactctaacataagctaaatacattagcaaggagaacatctactattctaagtttataaattatttttaatgggagtatgcagggatttgtatcataatttagtccagagggtatacctctaattcgctcccttcaagccaatttaatgccacatgtgaatggaaaattgtattacacctatcccaggtgctgaaggtcagagtgatacaggaaatctaaaataccaatctttgtgctcaaggagtttgtttgagttttttaacctgtgttctcagattgtacatattcagagaggtattttattttttgtctcgatggaaatttctacaaatcatataaatgaagacttattatagcatctactgttatactaaagatcatttattaaatattttctgggaatgaatggactacagaaaagaaatggattcttttggccagacaggaaagattttctattttggtggactaaaaaaataaataaataatacaatattatttttgccttagattttgaaggggtataggtgtgatggtggagtaattaagaatttagagagcccatttcactcttttctgttttcttgaattctcatagtttaatattgtcctctttggttgaaagcaacatctactttcagtcttgattttaaaatgctgacactttcactgtacattttgtgaagaataatacgattccccaaggtgacttgattgtcaaagtcatttcttccacccatgttggtggaaatacccaacatttttcatctataaccaaggttatctttatctttttgcagtcagtgccatggtaacaggtagtgatacaaatctgggacccctgagtgctgtgggtcagagattacaataaaaatataaatgttggttgcagaagcaacgtacattttagatgtttatggagggctttaaactgatcacagataaagtggtgactcatagttttcatttttaattaatcagcattcaaattgaagaggaaaatccatccagaactttttgttggcttcagtggatctgaatcccagtactgtgactctgagctgggatatgtgtacccaccttaggcctgtaactgatctggttctgcctcagtctccccatgtgtaaagtggggataatgctacctacatcatgcagttgggaggattaaaagcccagttgatagaaatgtgcctagcacagttcctggctctatagtagctgatgttcttattatttttatagtgaggaaaccatgttgtattagtggaagccaggcagatcgactttattgaattccttctatatgtttttgtcagctgcacagtcttggccaagtaatttaagtcacttagtccccttggagtcttggtttggtcacatgcaaaatggggttcatactatttatcattcagagttgttgtgaggaaaacacaatatatttaaagcgcatagcatggttcctggcacctaataagcattcagcaagtgatagctgctactattattatgattgtggttgttattgtcattttcatgattagactgtgtgtccacatctcagtatttttgctgctatttttatagcccagctactatcatctctctgtagattattgcaacagccctctaacccttccccctctgtttctataaagacccaaatggtctggcctttgccaacctccctggtctcccacattgcctccccatagtgctttagcaacagtggacttcatttattcctgaaaatgcattatactccttccctgcacagggcctttgcatatgctgctttttcttcttggaatagtctgacctctttctacctctccttccaccctttcactctcctactcatccccttgttaatacactcataggtcctgatacatcaccttcattttgccttgtacttaattacttaatttgcttgtccttttacatttatttgtgtgatcatttgatgaattctgtgtctcatcctagactctgatgccctaggttctgatacagcagagagagcgtcagacttggattaccatggtatgtttctttagttccccaacacactcatttgttgagggagtgagtgaataaatgaatgaatgattatgatgataatctgatgataatataaaatatctgggcaacaattgaggagatagaggaggttttaggatgtgaggttcatccttgggagaatgcatagtgagaaggcagatttgctaatgatttgggacaccagtgaggaaaaatggtgtgtctgtgcaggaggacgaatggttaaatgaagaaatgcagggagggaggaagaagctgagcaggaaatagttgtggagtgttggaaagaggaaataactgggaagtgacctgacagaaaattgggcatgtatttcctttgctacagtttttatttctctgatttaagcattgtcacattggctctttttgttgttgttgtttttaagtctgatttacaatattctttttacctgtaggatgccacgtctatctgtttacatggacaaagttatacacccaaaacgggcaaagacacagtagcagtttagcctttgttttgtcttcctttcctaggacaaatgccccctccctttaaaacagtttctttcacactgtcttatttctttggtcaaaaatctactgttttttgtttgtttgtttgtttttgtagttctctactctgatgtaatctccttagtatgctcttagggtaaactgtttctcattgtttaaagtttccagcattggtttctcatttttgttgttcgtgtcactgaagagagcaggggggttttcacaaagaaacctatactgggaccactatcaggtgctgtgtggttataaggggtgaggaactaaatagacatctataaatttagtgtttttcagtctctatgtttttcttttagcataattttaaattgagatgtaattcacataaatgaaatttatcattttaacatgtacacttcagtagttttaaatatattcactatgttgtgtagctgtcaccattatctaattccaaaacatttccatcaccccaataagaagcttcgtacctattagcagttagtcccaactcccctgctcctatcccatggcaaccattaatctactttgtcttcatggatttgcctactggacatttcatataaatgggattatacattatgtggcctttcatgtctagcttctttcacttagcatattttcaagattcagccttgaaaggaatgacctttttatggtcattcctttttatggacaagtaatattccagtgtagggatataccacattttgtttattcatttttcagctgatggacatttgaattgcttccacttttgcctgctatgaactttcttgtacaagtttttgtgtgaacatatgttttcagttctcttgagtatttacctaagagcggaatggctgggtcacatgattaaacataccatagatcatcacatggtatgtttaatcttttaaggagctgccatgctgttcttacagcaggcaaaccactttgcattcccaccagcaatgtgtcagggtgccagtttttccacatctttgccaacacttgttattttcagttaaaaaaaaattatagccatcctagtgttgtgaagtggtcattgtgtctcttttattcttttgtggtgactcttcgtggccttaattagttcctccccccttttcatttaaaaaaaaattggatattgttcttgtcatttttattagctctaaattttgaatgggccctctgtagcacaggggaaatataaaatagaatttgaaatactactttataactgggaaacagcatgcttagagaaagtgactgaaccagaaaaaggcagttatggcctacaaattaggatttattctaccaaaggagacctcaagtaaatattcttatgtataaattatagaaacctctcattataggaataaaagtcagaaaatgaaattggggtaataacaattcctctttatggtttgttgttttccttgtgtaacttttttttttttttttaccttgaaatgctattccttatatgctgttaccgtgaaggttgttcatttgtacactaatcttggaagatctttgaaatcctgtagaaaaagctcggctgacgttagccaagctcattttgtattccattgtttcgagtggctaaaatatcaggactaaaggcctggaattaagaagcttaaataattatagattccctctcctcccattcattagatgtaatttagtactgaaaaaaataaaattactcaacttggattgaagttcagcggtcttaaatccttctaaaattctgaatatgaatttttcattgtaaactgtgacaatgtcaaatcaataacagtatagttttcttatatccagggtcaccatcatcacctagaaatgcgtaatgaatactttatttgtggtctctgatttctaggaacttaacagtggaatatagaccgcattgatgccaagagatatcaagggttgtgaagcattgctgcatataccaggcagcaggaagtcattaattataaggttggaagaggcaactgtgatatattttacatgagtactttaagggaccattttagattccatgcagtaggaaggcataccaaactgtgattattctaagaaaagaaaattaagaaaaatgtttgaaggagacaagtatttgttgagggcctactgggtgacaaactgcattggaaaatgggctatagagtatggtggagagctcagggccttggagtcagatgacttcaatttgaattttggctatgacaactgctatttgggtgcttatgggagtaagagaactgcaatctatatgattgtagtgaggattggagggaatcaagtgatttgtctctattctgtgcctggcatgtaataggccctcaataaacatgggtcttattattgttagtattgtcattattattatttttgtaatttaattattacaaccattacttgaggaaagtggtattgtacacattttcatatgagaaaacaaggcttaagtaaccaagagatttgcctagagcagtggctctcacctgaggatgattttagctcccagaagacattgggcaatgtctggagagctgtttttggtggtcccaactggcagcgcagggtgttactggcatctcctgggtataggccaggggtgctgccgaacattctggaatgcataggacagcctctgcaacaatgatccagccccaaatgtcaatcgtgccaaggctgagaaagtctggcctagagtcatggacctgccagatcaaggagcagaattcgaattcttttctgattcgtgcgtttagatgttctccctgaagctattccattccttcatgaaaatccagggagtgaaataaagttagtttttggcaagtccctttaacttttcagataatattctgatggcttgagactcaaatatggtgtcatggggtgggtgacaggccaagtacagggaaactgaggtgatgtgtgagggaaccgccatccattcatttttcaccattcatttgtgtattgaatcattattgatcattgacttcccaaacacttagtgagcacctactgtgtgctagtccacagtccatattcttttttttttttttttttttttttttagaggatgtttggctcttattgcccaggctggagtgcaatggtgtgatctcggcttactgcaatctccgcctcctaggttccagtgattctcctgcctcagcctccctagtagctgggattacaggcatgtgccaccatgcctagctaattttgtatttttagtagagacggagtttctcccctcagcctccctagtagctgggattacaggcatgtgccaccatgcctagctaattttgtatttttagtagggacggggtttctccatgttggtcaggctggtctcgaactcccgacctcaggcgatctgcccgcctcagcctcccaaagtgctgggattacaggggtgagccaccgctcccagcccacagtccatattcttatgcagcttctgttttgccagccaaaccttactgagaaatgaaagataacatttctgacatgaaacataagaaatgaaaaatatgcttcagtatacaaaagtccagtttatgaagctgtgtgtttggaggcctcacactgatatttgttcatttattcattgactattcaaaatacatttgtacactgccgtcttcttgggtatataccccctaagaaactctgttgtctgtcttttcataaaccctatgtttaatggcagttttatcatttcattgcaagtaaaaatcctttcagaaacaggggctgtatttttctgtgtctctgaggacttttggaggttaatgcttggagaaggaactcttccttggacatttcctgagccctgtggtttacttttaataattattttggtatgaaatagtttgctgggttttgtggttagtgtcataaagtacctaatttccctaaagaaaaataaagccttgacatattaaaaaaaggttgaattgaataaaagtaaatctaattttttaaaataagtgtctgttattgtagaaatttctttaatgacagaaaacaggcacatgtgtgtgcacacacatatacatctcaaaacgatacatctaaggccttgcttctcaacagtttgtaatttcctcctaggaaaaaacaagaattgctgctgctgttattattcttatgaactccattgatctaataactcatgtttttttttttttttaaattaaccacaaattttcctgtagtgaggaagaggtaaacagtttccttgatgttgggaagtcccttttttagaagtgtatagtcaccgcaaattagctaggctgttaatttttttttcttcttttctgttcttgtctaaatagaagaatccatgaagcaaatgtatcctgtgctgggcttatggaagaacttgcggttgaacaccacaaaacacagtttccttggtcactcctttgtagtctgaaatgtttgaacagtttaattgtatatgaaatgtctaaatagtttaattctttgactcatgggacagccaactctgtgatctttctgaagtactaaaaatacatgaacagttgttacgacagacaatgtaagattttgtttcttgatcaagttttgttagatttctcttctcttcttccctctcctttgttcccctcccatctcttctctcccatttccctccccttcctctcccctaccccctttcccctttactccctctcttctctcctctcccttctccaccttttcctcaacagttaatctctttgaaccctttgcaccctttcggggttgaggctccctcttttattctggcgtttccctctttttccacattctttaacacttaaccttttctctctataattcttccatgcccaacatttactacatttttgtgaataaatctcttaaaatatacacttgatattaggatgtttatttttttacttgaattttggaaagtttatgtacgaaagtgcagttaagaattggtagtttcaagatgtggtttgcttttgtgatatgagagcaagtgtttttatttgactctaacatgtatcatttcaatttctttttgttctgctttcgagggtctctgcagggtctcagagtcctggaggggcagagaccatcttcagtgagggagctctgagtgaaggaagatctgggagttggctgtcttgtggaaggtcagcgtgatgacgtctctagacttaatcatgctgaatcctgtcccttgaatttgaaaggctatacaataattttgtcctgcttatcagagccataaaaccacattaaggtatagatagagggcacagctctttcacacatgtgtattgctaatggttctgaatctagtttttaaataaagcttgtcattttctgggtgtattgtggagacatgttataggaatcatttgctgactcttcatgttcattctatttaaacaaacaagaaccaagtctacaatatgacataattttgccttgtaactttttttctgatcttgcaatttccctttgtcttcttagctaaccaatttaagttaggaagataattgatctattgccacgtgtttcttaacctcctctccatttgtaatcctttcttctcggttggaaggaaactagaatttaaaaataactaatattttgatgaccatttataattttatctaaaattttaatggtaactttgatgttttaaaggtattccacacctcagaatccccctctaataatttttaaggatttcttccttgggtggagcaaaaaagaatgaggccttccctgaccatctcatgttatggtaaatgacagctacctgctggtttcttgggtttttttgcagtgattaagaacatttgttatcatgtattttaatcatctgtgtatttgcttatttgttgttatcttttccgctgtatattacaagggcaggaagaatgttagttttgttcacaatcctctaatatttaatatgtgcatggtatgcaacagacactcgataaatatttggtgagtgaaaaaatgcatctttctttttttaaatgacgaggtcgttctctgtcacctaggctggagtgcagtggcatgatcatagcttactgtaacctccaacccctggcctcaagcaatcctcctgcctcagcctaccaaatagctaggactacaggcatatgccaccatgtctggctaattttttaaatttttttgtggagacaagatctttctatgttttccagactggtctcaaactcctagccttaggtgatcctcctgccttgttcttccaaagtactgggattataggtatgagccaccatgcatggccaaaaatgcatttttagaagaatggatatagagctgttatgacttagtccatttaatatagactaattatgtgaaaatctactttgcaaagcggatttggggtccacggtatctgttagcagagccaatttttttttttttttgagacagaatctcactctgtcgcccaggctggagtgcaatggcatgatctcggctcactgcaacttctgcctcccgggttcaagtgattctcctgcctcagcctcctgagtagctgggattacaggtacccaccactatgcctggctaatttttgtatttttttggtagagacagggttttaccatgttggccaggctggtcttgaactcctgacctcaagtgatcacctgccttggcctcccaaagtgctgggattacaggtgtgagccactgcacccggcccattttactaatttttaactgaagagttggttttcaaatgaggaattcatttgataatgagaaaggttttttttaactttgggggtcaagagccaatgtataatttgaagataaaggtcctttccccagaaaaatgtagttagaccattacaaatttttgcatataatcataagatttatggatctttagaggtgggtccttgaactccagtactaagaactcaggctaagaactcatatgtaacagttccacttaatttttaggttgggtttgcagcaatttatgaggataataattcgtgctgaagatgaaagacaaaagtgtcagatgcccggcgaggacagtgctatccactaaggggtttaattcttgcctccattctctctgaggcttttaaaataaataacaggattctgataaagattgagctgtttcacttgagactctgtgggcctatggacttgtaatgaaaaccacagttattgttagtttatttccatgtgtaattaaagacaggaaaaaaatacaagccagtaaaatgagtaatgcaaggaaattctgatgcacagcttccttttgaagatggttttacacattcattcctgtctagttccctgttgaagattcttatcttggctgcgtagattgttcagaattttcaccccataggaaaacaactaaactggtttgcctcttcttggctgggggagccctccaagcaggtattctggctgagctaggccatattctctcttaagttacatgatttcacctatcatgttggttggtggtcttattgcctgacttctcttttatttacaattcctgtggtacattatagctttctggagccaggttaagaatgagatagtctgcccccaaccccaggaatgcttggatgttattttctggtcttggcaacctaaggatctcttaacttctttaatctgattaatggggaattcagaactatagttacaaaatagtttgcctaagctattactgctttgatggaattaatgatcaaatattggctaatgcccaaagcagattcgtgaactgtgcttaattttacatttcccttctcaaaggcaattgtggaacaaagaccttttatgttggttgaacccaattaatgaatggaaatgtaatttcatttcttctacaactatggttgaatttgatgagtcttgcttgtctacaacaacatgcatacgaatatcactttgtttttactaagtgaagttattaaggcaaaacactttttgttgaacttctatggtggataagccactttgatacctttatttgggtcaaaatgttctttaaacagcctttgaggcattgacctcatcaaagcagttaattttccaatgacccattttggagtaacatggacacaatggcagcttctctagacttgatctaaagtgtagcatagttggtaactaagcttcgtgattgcaaatgccagagactgttaagagctggttgtatatttgatgactctgtttgtttagcagtttgttagaagctacttggttgatcttggctttttgcctgatgtacatatgtatatatataaatataatatgtaaataatatatagacttaacaggtcagcctgttttataaataaaaatgggagcattgctcagaaaatggcaaaagaatgagacatagtatgtatttatatatacagatataaaatataaaaatatagatagtataatatataatataaaaatatataaatatatatataaaattagagtgttctgttacaagatttgtactcattaataagtcaatcaattttaatgactacttgatataattgtaaaagtatttacaggggattcaatgatgaactgaaaccagaataaccgtacaagttttagttcagttatatgcctttgagagtcaaggggggcacttttaagtactctagggcagcaggtataaactggaactatctcaggaaagttgagatgaatggtcactgtaattaaagcatacatattctctgtcatggggcttgcaggcaacgggggagacatagacaaatccaataatcagatagtgaataccaatttatagctgtaaaaaaatgataaagtgcatatagtaagaggagttgatctggtcatgggttagggaaggcctccctagggaggtaaagtgtttgctgagctctggaagaagagtaggagtggagtaggggagaagggagtacggtgtgaccaaggaattgccagaagaccagggagactcactcatggacatcagagcagagcctggtgagggaagaggctaggaagctgggtagggttcacaccatgcaggaccttgacctccctgggaagggtttagatctttaccctaactgccatgggaagccattacagattttagtggaggaggtgagggggagggatttttagatgggtgaatcacatgatcagatgtgctttgggaaaagatcatttgggctgtaatgtggagaagagattgaacagggatgggtagggtgaagtggggctggggacaaaagtaagtttggggagagtggttcagtggctttgcattaatccaagtgggagactatgatgactttagagtagtaacagtggggtggagcatatggataaatttaagagatattttggagcaaactcaacaggactcttccaaacttaagagtttggaaacagactcttatggtgaaggaagggtatttaaaattattttgtgcctcctataataatattacagttttgttgtgtctggtcagcctgttttataaataaaaatggaagcattgctcagaaaataggataaggaatggggtgaatgtgggggagagtacagagttttaagttgttaggcaagagttgaactgtagcatgatctcaaccagtattgctgtgtcactgatttcttaccctgatctctgctcaattagccttttggacagcaggtccaagatatcatttaggatgccagaacaataatcttctaaataataccctggtgccttgaaggagttaaggtatggattcccagatgctttatctataaccagcctgcatcttagactttgggcccaactggtagatcacataattcttttataaggctgttgctcatattaaagtatgatgtaataaaggttatgaattaaaaacaaaaacctacagggtcacatgaatgtgtataaacatcaatgaactaagtacatttttttttttttttttggcagaagacttgctattgcgtataacatagcatcaggctgacaatggtatttaaatgtaaatgttagccaagtaatgagatgttgttgtttgcttcttttgtgggctttggattcttgtgtcattcattctgcctttattgatctacatggcttttagcattatggcattctaaatttctgaagataataccatgaacattcttccaaaaatattctcagttaaacaagaagcggagactctcttatgcgtctctcttcttttgcttctctcttgaatcttgacaaattatgaaatttcaactctagtttatacttagagattctgttttcattagcagtctcttttgcttgagttgaggtgaggaaggatgttgttagaaattctcattttcacctactggctctttctttttcagttttcttgtatgtgccctaagctgagtattcattttaagcacgctcatctacccttggtcctctgtcctgagcctcatactgactggccagaaaaactggatgttatttttcaaaagcttagtacagattttgatatcttgttgcagcatttgatactaagaatgactgaggccggtgttcagggatgctgcaggtggttttgattactgattgccaattcatgtctttacaaagcgttgtgtcatattttatcttaaatgtggttaattttttttccattcatttcttaaatctttcacactgaattggataggtttttgaagttcaaactgcgtttgctgtaagctgggttcttggattgctgtccagtgtgagcttgggcagtccagggatttatttgatggcggtgtgctcagcttttgaaattaagtaatagaagtaggatttaaaataacttttttaacatactagttttgatcttttatcaaaagatcagttttgattaactccctgaaaagacatgtaatttcaacattatctgtgtgataggtggaacacatatattgctttaagtctactagtcttagcttaaaaatccttatcagtgacaaggaaataataatgcctaccttcagaggccactgtgagggataaatgaggccattcatgcagttgttcatttgacagatatttacgaagcatctgcagtgtacatgggactggtgcttaacactggaaatgacagagaacaaaatcaaatctttggccttcatggagcttatattttacctaatatttgtaaaatgcatgatagatgatcaataaatcatagctctaattgtcactacctaaaatttggataaaactttgagatctaaaatatattgttaaatgatttcaggtcttcccttattttaacttcaaattaaattagagatgttgaagaagttctgtagatatattctgcacattaattttaaggttctaaagcagtggttctgaactctgacaacacattagaatgaccctggaggcttttcaaatactgaaataccagcgttgggaagcttctctcagagattctgatggtggtctaaggtgggcactggtatttgttttaaaagctcctaaggtaattctattgggcagctagggttgagactctctgaaatactttacgagtatttacatgttatggctatttatgtatcaaggtacatagcttgatatgagagaagggctatggcatttgctatggattggacaagtttgatgataggtttccgagcaaaatatatggcttctgagaacccaggtgcatggactgtaggcatgactgccacagtgcatctctgtcccctggatcaatcactgtaccacaaagccctcagtattctcatccataaagtctggttaaatgcagtgaggatgcctgccaatactagcagtttgctgctctacagggtattgatttaataccccagtatatgaattatctgtttcccagaatggtttccagcctgctgcctcgttcccttcctttgccacagctaatcaagccagtggtgaacattcagtcaaagcctgccagatcttcagctggcaaacacacagctaactcattctggagagactttgagtaatgatgcaaatgtcattatcatctgggaagcatagaatgacaaggaaggtatgggagagcttgattaccaccttggtctttgtgtgatttgaggaagactgtgtacacagagagaatcctagagtaggtgtgtgaggcaaggtgcatgcacattccacagggctgcaactcgatggcccatgagacagagagacggacaggagagctttgtccctggcctggttccagttccagtcctcagggccccacctgtatttaattctgtccttgggcaactgaaatttcttgctgtttccttatcattcctccttccttgtacttccttcagtgggtttctgtccttatgcaaccccagatgctttgagtagaacattagattagtagaaacttttcagtaaccagtggggcagtactaaaaatagaaatggggtaaggagaataagcaaaagagtgtgatgttgtggaaagaatgaagacagtaagttatagtcttagctctgtcccaaaatagctcaatgaccttccccaaggtgcttgactctcccaggtttgtctaaaatggaaatggtgcagtctcatagggctggggtaatgaaaaaaaaatagattatagttgtagaaatgccttgaaaaggtaaaatggcacaccagtaaggagatcatctcgtatcccctcagacatttagacaatgtgagatttgagttgtttgctttcagagacagagctaggagagaagagaaactgagtcataataaaatatgcctgaggggcaaagtttttaagtgttcattgaattctaaatggaatacttctttacttctgtcaacttttaattttcacagctttattattctcccaatggctattatttctttctcagaatttctgattatttgctgcctcagttgtctcagtttttcaaatatatatttttagatagagttcaattttttcatgaggttctgctcacaatgcgggtgacatagttctttgtgttatgaattcgtgataaagttactgattttctttctttgcattcagcaaagaacaagaattagggcatgcatgtaaacgatttggttggttggccttcttgtcctcacttggcatatcctaaaatcattttattgtctcctacatagtggattgggcaatgggaaaggtttacaattggaaaggaaagttggtgtaggtctttccagcagtaaaatctattaaagatccttttacttttgcctctcacataaaacgaatgtgtaagtggctctgagaaaggtaatgatattaatgcccaaatgtacacttaaatgtactattataagtgtacttactatgagccacttacaatgtactattccaattatacaattggaatagaaagggtgtcaagcattcaggactgaggaaaattggcctggcagtgaacaggcttacttttggacactgacattaaacctgactcagaagattttctcattccttaatgttactcttcaagataacttttcattgacacagttaggtagctaagggaagataaagtaaaatcaaagaaagattggatctgtcagtaggttgaatgtgcacaaaagctttccgctcttttgcttccattatgcatttacaccaagtggaataagtctccctctgggaagcgctgttgcaattctcagtacctttgggcattaatatcattccctttctcagagtcacttacaaattcagcttatgtgataggcaaaagtttaaggatttttggtagagtttactgctggaaagacctaggccaactttccttgcattccaaactgtttcatattgctttagtggaaaaggaagatcactgctacttgtagatctgacattggaacacaagtctcttgaatcattagcttttctggagttacgcagcttttgtatatttgagatttctttaaaaggtgtaaagttcattttcagtgaagtatgaatggagtatacaataccgttctttttaacaactgacaaattgattagcatttattgaattaaatctagttgaaagtcagtaatttttaaagagtgccttttaaaaaattggtgttatgaacaaaaagtgagaatacttaaggatcttagataaaattgtgaaatggacttaactaggcaatgaaagattgcgaatccattactttctggagaccccttaaaatctatgggaacttaatggagggccactaggtgtttagatgtccctggaagatattagatgcctatcaacaatatggttcatcattgtttcatatgcccttcagtccatgaggtaaatggtggtatggctggctcatgggaactagggaaaacattatatgctattggtcaggtcactgtgtcactgggcagcttcttgatttccttttcgacctatttcctgtttataaaaaaaaaaaagtgcaactctctgccactgcggtattctcaggtcaaataggaaacaggttaaataatcaattctccatatacttttggccatcttcccaaatgtaatgagttcacagtgtctgatgacccaaccttgtggtatagtttataaggaacaacttaagtattgactcattcattcattcatttaataagtcttctcccattctatatatttttgttattttgatctcattctgtcacctaggacggcgtgcagtggtgtaatcatggctcactgctgccttaatttcccaggctcaagcgatcctcctgcctcatcctctcaagtagctcgaactacagatgcccaccattatgcctggctaattttttaatgttttgtagaaacggagtctccctgtgttgcccaggctggtctcaaactcctgggctcaagcaatcctcctacctcggcctcccaaattgttgggatgaaccagtgtgcccggccccattctatcttttttaacttgccagctttactgccatttgtgtgtgtgtgtgtctgtgtgtgtagtctgaaattttggtatctttgtataccaaagaggcatgccagttattaatctactgcggcatgtaaaaagaaggtgcaagcttccaggtgtcccctcccagtggagtcacatggagatttgcttgattctcccggcaacaaaggctaagtattaccagccaggaaagctcactggcactttgatgttcagggattttactggagatcatatagtgtctgtgtaactgacctcaactacttaagacttcggctcttcttttctccctgggcaaaaacaggtgtttgccctaaatcgcactgtaaggataaacttttctggtaaactggtacaggatggctcggggcctcaggtttataaaaacagatgctaaccataaatacagtggggcccagggcctcaggcatacaaaaacaaatgtttaccataaatacaatatgacccaagacctcagacatacaaaaacactgaacgaagcagaatattccaagggttcagaggttatctcctaggagttaacaaggtccagtcctgaagataggcctttctttggtatgtgcagagttctagcaacccaggcctaccaagttaaccgtttcctgctcacattgtctagtaataaggttgactctggacaacacaggtctgaactgcttgggtccacctgtacgtgatgtttcttctgcttctgccacttcggagtctgcaagaccaaactccctcttccttctccccctcagcctactcaacatgaagatgatgaggatgaagacctttttgatgatccactttcacttaatgattagtaaatatcttttctttcttgtgattttcttaataacattttcttttctccggcttactttattgtaagaatacagtgcacaataaatgtaatatacaaaatatgtgttaattgactatttatattattggtaagccttctgatcaacagaaggctattccccgttgagtaagttttggagagagtcaaaagttatatgtggatttttgactgtgtgtgtggggtaggggagttggcatccctaacccctacattgttcaagggtcaactgtattttattgaatgctagtcattgtgaatgttatgctgtgtgtctctggattttatcattttgtaaggagtgttgaattttgttctggaaagtggatcatttccttgggatcagcttgattctttcaagggctgtctttaaattttctgagagtggatctaaagtcgtcttattgtaggcttagtttagccctatacccaagtgtggtctttctgggatctctacagaacactcctggtgtttaaagaagtctctccacttctgcaggttggaacttgaatgtttcccagcccttgatgagctctgaaagttgttcagtttataactttattacagatgctctcttcctggtagtcattctttctctagtagttgctgtttgcccaggacagtgacatctcaccctctgcatatacacattactattcagccaaagactcagggacacacctagaaagacttctaggtctcttcctttgttgtactgtggcctgcatattccagccatctcattctccccaaatgtaaaccgtttctttccatgtcattgagactcctctgtgctgctcaggttccttctctctgctgcaccatctggaaagtatttctagacagaaagcataggtgatcacactgctcatctcatttgtttttcttcctttgggaaccacagtcgtgaactgttgtttaataactgaaaactcttgtttcatatatttttgtctgattttctagttgattgtagtgggagaaataatctggtaccagctgcttttcatggctgaagtgtaatttactctaacaatttttatgtaagaccaggggtttgagaatcagacatgtggacttcggatttggttcccagcatttgctaagttttgatctttggcaattagttaacatctctctgacttagctgctttattgtaaaatgggcatggtagtacctaattcataggggtttatgagcattatttgtgatagtgcaagtaaaatgcttagtatagttccttacacatattaaggctcattcattgatgatgatgatgatgttgataatggtggtggtggtcgtggtattcagctgtctgtattttcactataagtgaggatgttacatagaaaaaaatgcttttgttatgttacaaagtgaaagtgctgcaagtcttgtggcagttaattgtcacaaatgtgataggatcaaggagagcttagacactcttccttttcactgcttgcagaacagtcacagaagttacagaaaaattcattgatgacttctgggtgtggtagccagaagagttgatgctttttctgaaaatactcatataagtttagggatacaaagctcctgaagactgtatttaaaatgcctttaaaagtgaacctgattatatctttaatgttttgctttttaagctgtgtggtgcaaacataggtgtgtttattattattttttattctatttgatattttgatatacctgaaatggttcataattttccaaacctgtctcaccccctcaaaagcaggcctttttccagagtcagtctgtgctataagtctaatctgttaacatttgagtggatcaaatcttaaaaccatgagatagcttctcattagtactagtgtacgtatttgagaaattgttgaattaaacatgcaagttgcagtatgatgtgtacaatggtactactcaggtaaaattttaaaatatgtagaacattactgtatactctggatggatgtgtgtgtggtgtgtgtgtgtgtgcatgaaaaacttggtttggaaagaaacatgaagtttaggaaaacaattattttctgagaaaagagatgggagggagagcaggcaagaattcaaaatagtcttaaattgaatccatcatatattatttctgaaaaaaaatgaatcaaatattccagataacattttagaatctgaatggtgcatgtatgggtatgttatattcttctttgtatttttctatatgtttgatacttgtcttaaaaataaatgtaataacaataatgtacaagttggtaatggaattaaaacttttggctctaggggcttggttcatgtttgatcaatatcaagccttttggggttatcttcaggaatgtgattgtaatatcctgcattgtgtcttactctgggacaacctcagaatgtaaagttatacttaggagtccagaacaccttccttttgtaaacacatatgcattagatattgttaggataaaacttcgctgatggttttatcagcgataaacttcatacttaggtatgaagtatgaatatttaatgcagtatgaagtttgaatattgtaatgcagggactttttcctgggccagtctatactcttaagtctaatctgttcccctttgagtggatcaactcttaaaacccttaaatagcttctcatcagtaggacaaagttcatgcaacttaaggggacctaggaagcctgcttccccttttcccctgttgctcctcccaccatccttttttctttctttctgttatccaactatactagactttttatccttcttctgtttcctcttaggtgtcctgttcattctcttgaggaggcattgatttcccctttcctctttaactccgtccctatccctcagtttttctagtggaccgctctacatcagtcaaatcttagcttcagtatcccagtgtaaccacgtaagttccactactgtatgctttctacaattttccaatattaatgctcatatcctcactgttattactcacatgcccacctttccagtcttcaatttaagccctattaggaagaaaccatgtttatctccatttctctagcacctatgtagcatttataatataagcactaaataaatatttgttgaatgaaaacatgaattaagtacagtttgggcttctgatgaatatatactcactagatacttaaaatttttaatggaaaatactggatttaaagaaaacttttatgaatattttaatgaacattttcataaaatattgagaggatttatggtcaaagatatatttttaaattggagaagtaaagtgtttactcacaaggaaagcaatgctagagtcccatgggcattaacaggttaattttcttctttaaataaattaattaaaatttttattactaatacacgtgtatggaaacaatcaaagaggactgaagtgtttaaaatgaaaagcagtaatcatatgcttcagtgttcctcagttctatctgattaataagttaaaactttaataagattcaccttcaagaagaaaaatgtgcatgaacaaaaacaactatagttgttgagttgaaggtagaatgggaataaagcctcacactaaaggggctttttaagtcatgatttgtttttaaaaatgccatctgaagggcacagtgattcctccagtgttagcttgtgttttctataaccttcttcctcaaaggcccatcctaaaaaagattcagctttgcttttttgcccctctttccaaagacaggatctcaaaaaatggtaactaatttaagccctgctaaatgtccagatgcagcacctgggaaaaatgaagttcagaagttcagaatttggaagcgcttaagctagaagaatcttcttgctgtggttgcatgtctggttctggaagctagtaacttctttcaggcaggcattgttccattagaacagatggcccgaagtgtggctgtgccagagagcagagaccaagtgtgaacttgtccaggaagttgaaacacttctcagaatatcttcttctcctggtaatagccgtgccattgcaactagaactttctgggttggaagagtgaactcaacaaaacaaaacaaaacaaaacaaacaaacaaacaaaaactacaaaaaaaccatgagactgggtgccatggctcatgcctgtaacctgtaatcccagcactttgggaggctgaggcaggtggatcacttgaggtcaggagttccagaccagcctggccaacatggtgaaacctcgtctctactaaaaaaaagtacaaaaaaagctgggagtgatggtgcatgcctgtattcccagctacctgggaggctaaggcaggggaatcgcttgaacccgggaggtggaggttgcagttagccaaagttgcaccattgcactccagcctgggtgacaagtgagactctgtctcaaaaaacaaacaaacaaacaaaaacataaaagctagagttagagcattgatgtccaatgtggtagctattgaacccttgaaatgtggctagcccaaattgagacgtactgtatgtgtgaaatgcacaccagacctcatagatttcatatgaaaaaggaaagtaaaatatcttgttaacaatttttaatatagattcgttttgaattatgttttgggtaaataaggtagtaaaattgacttcacgtgcttcattttgtttttctttttaatgtggctactagaaaattgaaatatacatgtgtggctcattttgtatttctattagacggtgctgcttttgagagaaactttaccagggatgttcatggaactctgtccaagttacactttgatgtgactctttactctggagtagatcagatatggaatccaaaccttggaatttctaagttagcttcttagtaacttacagtttaaatgtagcaatgaaaacaagagtaggatttttttttttcagttgtaaaagaaatttctagaaactaagagctttacagagcttaaaatttattctcattgttttatttttaaactctaagtttctgccaggacaaaaatgttcagttctttttggattctgatggcctggtaaaacttctttgtaaacctaggggatgtgatagaattggcacaggagaaaattaatttggttgggatccatgaatggaatggaggtgatgtgcaggccttgcagtctgttgtaatcaatcattatagaagttttgctgcgatgctggcctgcccaacactctgcactttgggcaacatcgtgaaaagatatcttcctgtagatccctgctctggtgcaatacaagtgtcaacatagaaatagaatgtgtgttattataggccacatatatacacattcaataaaatgtctcagcatttactcgtgtgtgtgtgtgtgtgtatgtgtctgtgtgtgtgttctggaaaaaagttaaatgagattttccacaactttttaaaaaaatttcagcctcgttgtaggatattttccaaacccacattttccagcaatttgagccccaaacttatagcaatgaggcactttcttgacaaaggtgagtcaaaaacaggaaccctttgattctgtttgtcacatgatgctggatgttataaaataataatagcaaggagttcatttctttccctttgatcgtcagacttttagctgcttcacttccattgctaaagccaggaattcagaagtgtaggtcagatgctgtgcgtagaaaatgcatttgggagcatacacattaaatgggttataaatagtatctgccctgacaatgctggaattttctcagcttttagagacattgaagtctttgttttgtgggttgctgccctccacccccaaccccctaagcttgagtcataaagcctgaaaaactaatgaggttgctgaaacttaaaatctaattggtaggatgtatggaaaacaatgagagatggcagaaaccgtacacttcgattcaagttggcttctctgttgcagcattgcaacttgctcactttgcattttattgttccaggtccttgaattaattttttccttcaataggatcaaattagacctagatttaaaaaaaactcataagtagataaccatcaaggctaatattaggatcctaaagtcttcatttagaaaaggaaaaaaaaaaactaaaaaaaaaaaaaaaagcaaaagttcaaacgggattttctttttaattttaaaattttattttattatgctttttgagactgagtctcacttactctgttgcccagactggagtgcagcgacgtgatctcggctcactgcaacctctgtctcaggggttcttgtgcctcagcctcccgagtagctgggattacaggcacatgccactatgcctggctaatttctgtatttttagtagagatggggtttcgccatgttggccaggctggtctagaacgcctgggctcaagtgttccacccgccttggcctctcaaagtggtgggattacaggcatgagccaccatgcccagcccaaactggattttcttgatagtctctctctctcagaaatattttgctcttatcttctgagtttatagatgatattttacaacaaaggtctacaaactataaaccacacctggcctgtcagcatcttcatggatgcccctacaattaagaatgattttcacattgaatgtttttccccccagccgtttaatgttgaaaaaacaaacagagaaagaacatgtggtagacatcatacctggcccaccaaccctgcaatatttgctatctggccctttacctacaaagcttgctggcccctggtttagaatgtgcttgctgtgtcacccttgctattagatatgtaatcagataaaaagtttctttcttggattttgttaattcacccattgaatatttctggagtatttattccattcctggcactgtcataggcactggggaaatgaagtgtaaaaagtcacaccaaaacacagactaaagggcatatttcaaaagtgacagagcttgcattcctgtcgagagaaaaagaccaaacctaaccaacccgaacagaaacaagaaatgaaaaacttaattaccaggaaaataaaccagctgagtatgagatagataataacagcaatttctgtgcttccccccttgaactgcactatggaatggtgactaagttatttcccacattttgaattcacccacccacatacaaacaccaaatacttgcttgctttccccaagtcatttcctcatttttaattttatttttttcctaaagtctttttgccccagctgaaattcattactcaaccccgtcttattgagtactttagtttggtgtttccaaggtttatttatttggtgtttgtttttttttttttcttgaaagagtctcactctgtcacccagggtgagtacagtggtgcaatctcggctcactgcaagcaattttcctgcttcagccttctgagtagctgggattacaggtgcatgccaccacgcctggctaattttggtatttttagtaaagatggggttttgccatgttggccaggctggtctcgaactcctgacctcaggtgatctgcccacctctgcctcccaaagtgctgggattatggacatgaaccgctgcactcggcctcatcctttttttaaattagcttttctgtgtctttagacttaaggcttgttgcttgtatgcagcatatagttggattttgatccttactctttgtcttagcagctcaggctgctatcatgaaataccatagactggtagcttacacaacatatttatttttcacggttctgaaggctaggaagttcagatcaaggtgctggcagatttgattcctgataagaaggtctctttctgtctggcagatggctgctttctcactgtatccccagagagccaaagaagctctctggtgtctcttctaataagggcactaatgccatcctgggggccccattctcatgacctcatctaaactcaattacctcccaaaggccccaccaccgaatatcatcatattaagattagggcttcaacatatgaagacaacagtcttttatgctttttcccccttttttggtaaatatgtattatggattatagttattttatttattttagtatcagaatctttcctcagatctgacattctctaaaacttttgtgatctgcaccaaagtaagttacagacaaatgtttgcttgtttcctttattttggatcttttctgtaagaattctttgtgatactaccagattagtaatcctgctctcctaagcatactgagtggtagcctatgatttcttttgtggttcaaaatatgccctgtagcctgtgttttggttagcagaatggccagagcttagactaaaggccacgactcacacattccaaatacatataggcttgaagttatcctattataaaacagttaccacattcatgtaaatggccaggcaaaggtcaaaatatgagcaacattatttgtagctcagtgagagatttgatgttcaaagtctgtcagcatttgtcagaagactgatattgtcaatggctgtttcagattaagaccaactaaaaagtgatttggtgtgaactcagaatatagggaaaataagacaatttgaatgtaccccaggaaacaagagccctgcacttgactccaaaaggagttctattattctggctgtttccagactttattgtatcttgagaagagaactgttttccctctaaatcagtttcatcatctgtatccagggtagtactcacaagaacatgtcaatatcaatagcatgcatatggggtgttggattcttagaacttattgcaattgcttcctctaggttctatgatgattatcaatttattgcctctcaggtccaaattcaccctttattgtctgctctgtgaaaatggacctgaactctttaaatggtatgatgttaaggtttggcaggagagggtgctggagagaagtcacaggaagaaggggttttccttcttaaatctggcgtgcattctcacgtggcttctgcagcatccatggcttctccaggacctggctcttgcagcaccggagacatctccagggcttgtttcccacagcacttgtggcttctctagcaccatgttcctccagggctctggcttcactagtgcctggcccctgcagtgcatagtggccacagccgcacctggtagccagcagcttcctttggcacctctccttgggctgttttgtagcagggtgcctctggtgggacacctccctgtgaacagcttccctgaaaccctagaggatggattccagtaagctccaccactgaagcaccacagcaacttccctgcctccagatttctggctcttagccctggggataaaggctctcccttgggccctgtatctctgtcttagagttaatggccattccttgtctctgccattcctatattctttaaagttctttcaggttctctttacttcttgctagctaagtcttgttatagttagtaatttcttctattaaagtttctattttcagacagtagtttgaaaagagaaagtttaatagatgaaatgacaaaccatctctcctaattggacccagggttaatatagggtcccatcaatagtattatggggttctgtgcttgtgttgcaaaaaacaagtggttgaaagagaatctaatggatttgttcaaaggagcgtgaaatcagaatgtatgtgctattatatatttccctgcactcttctggttgaataaaccaattttaggaaaatctggaagtttgccattatctgtaatggaggaagagaatagtggttctgatgatactagagtgaaaaaaattcattgtctgacaaattgaccattctgctttgtgtgggaacttcaggttcaggttctcacaacaaggctgctgaggggacctagtggatgagttcagtttctggggattgtctgcaaagtgataatatctacattgataatcctaaattgattaagagtgcatgtcaagcgttgtttccttccaccctcatatcttgtgatagggccatagcagttgttcttttcttccccttttctgtgtgaatcctgcagcagtatgatatgggccagcctatgatgcggaagtaaaagaaaaaccagaataaggtgccttgaggattatctggtctgatccctttatttttgagatggggaaactgaccaagagtgaggttaagtgtgttgctctcaagagtgtccacctagttagaaaacacaaaaatatagcaaaacagatctgattcctagctggttgtttccctccaaactttactttttaatctctaatgatttatttctttatatttatatattaagatttacaaaacttggaaaaatatgatatatactttaaaattaaatgatattttagtccacattaaaagaatagatcagtaaatgtcttgtgcaggtgcatctttttaaaattttacactacatatattgaagtggaatacatagagaggagaatgtacatattataagtgtacaccatgatgatttattgacaaactggactctcgttaaccagccctcaggtaaactaattgaacattacctgcaccctagatgcttccttcctgtgccttttattcactacccctcccaaggttaaccagtatcttaactaccaactgcatagattaattttgcctgtcttgtcctttatagaaatggaacaagccatatggtcatatagtaggtacttacttgggcctggcatcttttgttcatgattatgtttgggaaattgattcttcctcattgctgtaagtagttatatagttcattcattttcatttccatatagtatttcattatctaatcctactaggatttagttatccattctactgttgatggatatttggagccttttctaatttggggcatttacagtgaggctatgaacattcattataattacttttaaaaacttttggacattggaagacagcaaaatgtgaggttgaagacacaagcttggagttagacaactcattaactgttcagtcttggtctagttctttatgttcatgagcctgtctcctcattggcaatgggcttactaataccagttgtgcagggtttgggaaataatggaataaaatgatggatactgtgcacagtgcttgacacataagtactcaaataatggaagctgccattactttttaaattaaagttttatacattatagcaaagtatcagccaagcttattttactatttgtatctggttgcttgtacacagtgtttttcattttctcagggcctgcacatgctttatctttggagtaatgtttgattctttatctttcctttcccttcctctctgccacaattattacctgcctgttgtattctaggtactggggacaggaactgaataaatgagcagacattattcattcctgagttttcttctcagtttttgctgttgtattagcctacatcctcctcttctcatgccatcctctgaatgctaacattgctctttgacagcctctcaccagtgtaacccatcctatctgagggggacaggatcatctttctccagtaccaccactgccagttgagttctttagtgaggacttgagaaaattcagctttaccctcaagtcttcaacagacactgtggtgcaggcttttctcctaaagatgtggatgtgcagtgagacaaagccactgtatcagtcagcagaggctaagttttgctgcattaacaaaggactccaaaattttatgacttacaaaactcacagattgacagtagctctgatctttgtccaattccttctgaaacaaaggcttaatgagcactatccatttgggacatatttgtcttgaataggagaaaaaaggaaacggaggaaccacagagtggctcttagaacttctgctgggaagtggcatatgtcacttgtactcacatttgtttgcctacaacacgtcaagcctgatatcaatggggagggaaatataaacctcccagagagagcaatcggtaggaagggacttggcacagagtcccttggctcagtcatgttttaaacatgttttaaacacttccattgaatcagtggacatgacttttggaatataattcccaatttattttcccttttttttttgaccttcacatcactttactgtcaaatcagcaaactggcaatgcacaagatatacagaagaccaaggctccaaattagtggcccaggcaccctgatgacttcctgtttctcagaaaagtaagcttgggcagcagtgacctccacagcctatgataaatgaggaatcaacagttgcattccataattcaataaatagttcttccttctgccaggtgatgtgatggaagctctgtgcagcttcaaagtaagagttgacttctgcgtctatacaattcttgtcataaatgtgatcaagtatatctttacctttctatacagttggcccaaggtatgattactggcatgggtgccagctaataagtaaatcagtcagtattgacaccatgtttagcctcaagcatgcttttctctggaatgcacatttggatgaactttgaggaaaattattaactcaccccaacttaaggagctttgaccgaccagagatttcaggattatgtgtacatagtttcaaacgttgtattttaagatgaagaataatttaagaagattagtgagcatccttcattaatctggagctattttagtaataataaaaaagggcaacttgttttcatcttagaagagtaataggtcagttttatttataggtgatatctaatcaattttttatttagcttgtataggatgattctcaagtagataatgttaactcacctagaataaaggaaaccacttgttacctaagtatacgacattttaatagcttttaaaaaattcaccatactagtttacacaataaaatgtttctataagtctgtgtatatgtatatataaatatagaaggtaaatatacagattatattatataaatagataaatataaaatcaccatggtattttgatatataaaatgagtctcattataatgattccactaaatgtacaacctgttataaaatgagtgataatctgaccctcatttctgtgttttaatcttgggatgatttgaagtaaggcataatcatgtatgaacatattcctggagtctgacatgagcatcatgaacttgctaattttattccttgatggtttatataagtgtctgacaaatttaataggaagcagagctttattttttttcattatcagctagagaacaaaaacattggcatctgaattgaatactggaatatcgtgtgagtgtgtgtgtgtgtgtgtgtgtgttttactaagattcatgccactcaaagtgtgacccatggactggactgcttcatgaactgtgtggtgctgtcctacaatatgctaagaatagaaatagagtgttctgaaattttagagcaatcggaaagagtagctttaggtctgttggacctaataatacaaatttgggcttgcatatttgtgtttgttttgtttttcatctcatttgtctaagaattcacttttatatagtctataaaagtatcagcctgtgatggatttggagttaaaaagacaaacaaactaatgccacagacggtttagaagcattgatgaggaacctgcatcatgatgacagaaagtgatataacttctgttattctataggcgtgaattttgacatggagtactgtggcttgtattgcattgagattttaaaattcatgtcccctaacctttaagccatatccccttaactttccactacaaatattctatttaactgtgacttttgatccacttttttctagattgattcagaaaaagtaattctttggatttattcatttgttcagccatcgtttattgaggaactactttgtgcctgacactattccaaacacataaaattcagcagtaaaaaaacagttcttgatttattttagctaatatgaaaagaactcaaatatacaaatatatttgtgtatatacaaaggtgtggatgcacacacacacacacacacacacaccaactgtcaggtgatagattgtttccacctgtcatttggttccacttggactactaatgcatacattctttctccctatggatgttaacatcactattggtgtggttttgagctgatggaagtaagtcccaggtaacaaatgtaggtgacctcccttagggccagtgatgcctgaggatggcattcccagtttggtgatgacagtgggttgagaggagcctcagacagtggaggaaccttagaattcactgccacgtatcactgtttcctctagggatatcattaaagagagagttccatctgtgtgtttctttggttcagcaggagggaccgtgatgtgatcttctgggcgatgtttcagctctgcgaatctaggatggatcaggaaggtgttaagcctctgaaattagggcagtgttttgtgcagatgctcttttctggggtgaggttcccttgctttcatcaggttctatcggtggttcatgaccctcaaagtcaaagaatcactggtgtacagtggccacaagagccttctgcagtttggcccctgttactcaatctggctttcccctttgtgcttccctgctgcatttgggctggcctcctcactcttgcccagtgtgctgcacaggagctcacctgggtgtgtacttcctggaaagctcggcctgctaccacgcacagagctcattgcctcacctccttcaagactttgctcagatgtcatcctctgggcctaccctgactaccatgtttaaaattgcattcctctcctggcccccaaatcctggccctttggttgcttcttgttctggcttattgttaaccctggcacttgctacctttaacattttctgtgcttagttatttggtttatcaggtttatcattagaatttccctccccatcccgatgcttcatcaaagtggggatgtttgtctctgctcactgctgtatcccccacactttgaacctgtctggtgtataatgggtgctcagtaaatgaaaagggggttcaataaatgaatgaacagatatgatatctgtctctccctttcagtgtgcccaacatggagcttaaatttggctggttgctccatgtatactgcatcccatcggttatggtttcatgaatctcatgtcttacgttgccataaattagcttttaatgtatccctgtattttcttttcagattacaaatattcccattatccattttcatctttttcttattgatttttgctgtctgtttcatcttgctttaccctagaccctcaaagtgtttgtggataagaccttaggcaagttagctgacttctctacccctcagtttcctcatcttgtaaaatagggataacgatacacaaccttgcagggttgctctgaggctgaaatgagatgatgtgtgtcaagcagttagcatagtaccatacttaaatattggttgcaataatgctgttgaagatgtaagtatcttaaggctcagtgtaatgtctggcacatgatgggcacggagtaaatggcagccgttaacaattatgcttcccccccattattatcatcactaatgatatggtctggacaatcgacatggagtagggcactagcagaaaatcctcgacagggttaagggttgacgttcttgtcctctttttctgttcctttttctttcctcttccatggtggggataaactttttctccccttgccatgcaaaggaagaccttccgttctttgctgtgtgctgtgatgttggttgtcactatcatagtaataccatatcttttgcaatttttttgtttgactagatagcagtaggtaactaatctgggtcctcaagacatatttctatatatggatttcacaacaatcttgatttccggcaagagtttcatttttgtggagggcatttcaaggagctgccttgtaaatttctgaatgcttgggttgtttgctttgtttcttttacccctcagtgccaggtaagtaaaattccccagatttgaatcttacagttaatcaatcagcaaatacttattaagtatatacatgggagattatttgaagagcagaatgacacagtgaaaggtgagctttagaaagattaatctgggggttgtgtgcctaattggtggaaggctctggtgagcagagaagggagagtttgttgtgggagtccacaagaaccagtggtggaacggtgcccgagggagtgggagctggggtggtacacagggtgtacgcatgctcagcttccctaggtatagccagccagtctcccggagccggtgccccaatttacacttccatccacaatgctcagaattttggctgctctctggtctttccaacatttggttactactgctacataacaaatcatggtcaaacttagtgagtgaatacaatacatgtcattttgttcactctcatggtttctgtgggtcaggcattctggagtgctgggctgggcagttctgtctcagcatctcttaggaggttgtagacagatgatggctgccagaccatcagaaggaggaggccattggtggtcaatttatacccccacttaacatctttctctatctcaagggaaaggactgggtgaggccaaagaggcctctttctgaggatacgaagtgaaggaggcattttttctcagggttatgcaggttctggccctgccaaagaaagtagatgccaaacatctactatgtgttagaccttgggcaagatcttctacatttatttgaggtgacttactccctttaatgtgatgtttttttcagggttaactttctagataggcctttccttaccatcctatcttcatgctttccctttgtattttcatcttattgcccagtggatcaccttcgtagcttgctgttttcctatgacattgtacgcaattgtttccccgtttacactgtatattgttgtttgcctagtcacactgtgtgtggttgtttgtctagttacagtgtatgtgttttttttgcctcgttacaccatatatagttgttttcctatttatactgaatgtggttatttccctatttacactatatgtgtttttttgcctagttacactgtatatagtttgtctggttacactgtatgtaattgtttccttatgtgcactgtatgtagttgtttgcctatttatactgtatgtgattgtttgcctagttatactctttgcttagttacactgtatgtggttatatacctggttagactgtatgtagttgtttctctgtttgcactgtatgtgattgtttctctgttcacactgtatgtgattgtttctctgttcacactgtatgtgattgtttctctgttcacactgtatgtgattgtttttctatttatgccgtatgtggttgtttccctgtttatactgtatgtggttgtttccctgtttacactgtatgtggttgctttcctgttcacattgtatgtggttatttttctatttacattatatgtgattgtttttctgtttacactgcatgtggttatttccctgtttacactgtatgtggttatttttctatttacattatatatgattgtttttctgtttacattgtatgtggttgtttccctgtttacactgtatgtggttgtttccctgttcacactgtatgtagttgtttttctatttacactgtatgtggttgtttccctgtttacactgtatgtggtggtttccccgtttacactgtatgtggttgtttttctatttacactgtatgtgattgtttttctatgtacactgtatgtggttccttccccgtttacactgtatgtggttgtttttctatttacactgtatgtgattgtttttctatgtacactgtatgtggttccttccctgttcacactgtatgtggttgtttttctgtttacattacactgtatgtggttgtttttctatttacactgtatgtggttgtttccctgtttacactgtatgtggttctctgtttacactgtatgtggttctctgtttacactgtatgtgcttttttctctgtttacactatatgtgatggtttttctatgtacactgtatgtggttgcttccctgtttacactgtatatggttgcttccctatttatactgtatgtaattgtttgcctttttattgcctgtccacctgcattccttcagcctctattactgaaggtctgtgagagcagtagccatgcctctttcatgcactactgtgcacccagtagcattgccagattaaatatggatactcagtgaaacttgaattgtgactcaaaacaaatattaccttcattttactaatttatttttaaaatggacacattataattgtacatatttatgggtataatttgatgttttgacacgtgtgtgttgcataatgatcaaatcagcatagttaacatatctgtcatctcatgcatatgtgttttctttgtggtgaaaagattcaaaaacctcttttctagctgttttgtaaaatacaataccttacttttaactacagtcactgtactgtacaatagaacaccagaagttattcctcctatctaattgtaactttgtatctgttcactaacctgtccctatcctttcttcacccatccccttcctagtttctggtaactactgttctgttttctacttttatgatgtcagcttgttttaccccttagatttcacatttgagtgacatcatatgatatttgtctttctgtgtatggcttatttcccttaacatgatagcctccagtttcatccatgttgctgcaaatgacaggagttcattcttttttatggctgagtaatattccattctgtatatatactacattttctttatccattcatctgttgttggacacttaggttgatcacatatcttggctattgtaaatagtgctgcaataaacatgggagtgcagatatctctttggcatactgatttcatttcctttagatatatatccaatagaagggttgctggattatatggtagttatatttttaattttgtgaggaaccttcctactgttttccaaaatggctgtactaatttacaatctctctaacagtgtgtaagtgttcctttttctccacatcctcactaatacttgttttcttttcttttttttttttttttgatagtagccattctaactggagtgaggtagtatctccctacggctttgatttgcatttacctgatgattagtgatgttgagtacttttttcatatctgttgccatgtgtatattttcttttgaaaagtgtctattaagcttgctcttttacctttttttttttttttttttttttggcaaagtctcactctgtcacctaggctggagtgtgatggtacgatcatggcttactgtagtcttgacctcttgcctcaagccatcatcccatttcaatctcccaagtagctgggactataggagcatgccaccacgcctggctgatttttgtagtttttgtagagaccgggtgttgccacgttgccgagactggtctcaaacacctgggcttaagcaatctacctgcctcagcttcccaaagtgctgggattgcaggcatgcacccagcttctattttttaattgagttatttggttggttggttgctgttaagttccttagctattctggatattaactccttgtcagatgtttagtttgcagatgttttctcccattcagtaggttgtctcttcactctgttaattgtcttttgctttgcaaaagctttttagtttgatgtaatcccatttgtctatttttgcttttgttgcctgtatttttgaggtcttatttaaaaaatccttgccaagcccagtgttgtgaagcattttgcctgtgttttcttctagtagagtcatagctttaggctttacatttaagtctttatttcattttgagttgatttttgtatatggtgagaggtaggggcctagtctcattcttccgcatatgaatatctgattttctcagcaccatgtattaaggagactgtccttttcctattgagtgtttttggcacatttgtaaaaagtcatttggctgtaggtgtgctaatttatttctgggttctctattctgtttcattggtctttgtgtgtgtttttatgccagtaccatgctgttttgattactataattttgtagtatattttgaagtcaggtagtgtgatgcttctttcttctttttgctcagaattgctttagctattctgggtttttttgtgatctcatatgaattttaggattttttttctatttctatgaagaatgtcattggtattttgataggaattataataaagctatagattggtttggataggatggccattttagcaatattaattctttcggttcatggacatggaatatcttttcatttatttgtgtcttcttcaatttctttcttccttgttttatagttttcattgtagagatcttttaccctgatggttatgtttattcctatatagcttattttttggtagctgttgtaaatggaattatcttcttgatttatttttcaggtagatcactattagcatatagaaatactactgattttttaatgttgatttttgtatcctgcaacattattgagcaaataatatcctagtataagtatatgccaaatgtaagacatgtttatactgaaaaattatttatggttttcctgaaactcaaatttaaccagatgtctggtaggtttaaatgctacatccagcaaccctagtacctggcgttgagtagggtgtgtagcatattgtaggagctcaataaatacttgaatgaacaagagagtgaatacaatgaaagaacacatttctttctcatgacaattttacaaagtggatcttattattttatagatatgatgagcaaataattcaataagcttgtctgtgggtccagagccagttaggacagggtgggataacagtcaaattttgaaactgctcttttcagcttttcagtacattgtgctgccttgctttgttaaatgaaatttcttccttgtagcagtcagattttttggttgtatcaacagaaaactgaaccctccctagtttaagcagaaaaagatatattcatgtgtatattaaaggatttttaggagctctgggtccctggaggccagagaaacaaaccagaggctgactggccaggactgattcccccagcgtgttgtagaactgatccaatggaaatattgatgttgccctcactgggcacagatactgcagcctgcaccattgacgtccccaatgtggaccactagaccacacagccaagcccctgacccttagggcttccagatgtagctgcatctttccttgccagtgtacatacagcttcacactatttgtcccagatatatctgattgagaacctgaaggcatatgtctccatgctagctacaagagagtctgggaaagtgaacctttggcttctaaagtcaaagctatctctgtctccctctacattcattagaaggggaatttttcaagcacaggaagtatcttaaaaggtgctgggcagcctaaaagataatacgtgtccacttgacactgcctttgagcttcagtagcgcaataccttttgattttttaaggcaggtattactttctaccttgtttgaaaacaggagttgtgtttgctttaattttttaatgtgcccacagagtactgagcctgtactctcaagaggcactcaatatatgaccgaataaaagctgaattatctgtctagtgggattttataggtgacttaaattctgttcgtgtgtatttaaaaaatttccaatcataaacatttgtaataaaaatagttaaagtttccaaaacttgatctaactgggagaaaaacaataggtctgaagtatcttatcttcaaatctgaaatccaaaattctctgaatgtcgaaggattttttttgtctgatacctcattggcagaattacctgacctgaagtgacacaaggctatttatagtcttcattgttccacttaattgaatattcatatgtttcccggcagaaatattaatgtacttgattacaaactgttgccctgatctcactggagtactatactgtatatgatctctattatctctataaaatctggaaaactctgatgttcaagactcatcagtccccaagggttttttgaagtgtgtatgcatgtgtgtatttgtgtatacacacttgcataatatgtacatagaacgttctggaagggtgcattcaaattgccagcagtgattatatcttacagaatggattagatggggagatagtgaggaatgaatttatgcttaatattctttagcatttctaattattattataaaaaacaattgcctttttaaatgaaagaagatagagtagaattgaatagaaatgttcttgtacttaggaaaatagtggtaatattaattttaaaagatggtttgtcaagtaggctatgcgtttcacattagttcaacattacaactgataaagactcagaaaaagttatacacagaatagtcagtctcctgccttttggacactatatgcatgcccaggtggcagggaatttacgtcagcaaaagcactaattttgctaaaaaaaaaaaaaatagaggcacacaaaaatgtgatgagtaaatgaaacaactgttattagtgacggatttggcatgttttacgaagtctgaatgattactcatccactgtacatttgcagaagttctttaataaaaaccagacgcatatgtagtagcaggggttagtaggtggatgggaggattaaaccctgtgcgtttctggagcattggtttgtaactgttttttggcttgtcaacaggctatttttctgagtcagcctataggatggcttcccagggtaagtctgattttgcttttctggttttaaaatataaagtggtaatggagagctgactagttgctctctgcattagattctgtaaatcaatattgcctgcatttcttctgtaagaaagacattggtcgcatttcagcatattctagtgttcctgctgctcatttttgtagctttgccttacctccccctaattttaaaagtcaaatgcccaagtgctgaaagaatttgcaaggggaattgcaaaggtcatgtgtaagttctgtggctgaagtgtggagagcagtatgattgagctgcagcccttcatgaacctttcttttcaagaggaggtttccaataaattagggtagcacactttatgtgcttgtttatgaccttaaaaatggtttagattttgctgagtggccattactgctgctttatgacatggaataatggtttcaacctgcacagtttttcatttttttcatttttgtactgaaacaatgtcatgcatcagtcaatgtgaagttcatttttttttttcttttaaagggacttgggagaatgttagacattagaataagtggctgggttctaactccagagaactttggttcttgaaaaaaaaagtgaagattctccaagccgttacaaatgagctttgtagtgatctctgatgaaatgataaaaacactgcttttcccactggaagataaatgccccttttcattaactatagtatgaggaacaaaatcatgtgattttcttttttttttttttaagtttaaccttaattactttttaaaggcagttttcattttgtgattacttttttttttcttccggtgcctagcatagttgaggattttatcttcttgtctattttaggatactctaatgaataacggaattttgacgtgctctttcaaaggaagagtctagttgcatcctcccagccatcggctggttgagctgtcctacccacttcgtttcagctcatggaggccaccgtgaggggctggggcatgtcagtggcccacagctattctgaatggtagttatatctatgtgggggctcagaagggaaccgactttccattcattaatgttcagtacccacgaaagaaaccgatatttaaaaaaaaaaaagtaagggaatttcagttgattttttgaaaaacgaaaacgttcacattaggacctttaaaaatgaaagcatttatgttctcagtgctgtggatctcacatataaataattgcaccccatccccctccccccacacccctcctccccaagtctgaaaccctgttgcaagggctgtgtgaagtgggaggttaatgtggcctctctttctgggacatcagtaattcttgaatattttgggtaagggtagaaaagtatcccatttcagctgatcagtaatttaggagcttttaaatgctgatgtaagcaagggtatattatggaatagaatctgagatgatactataaagagacatctctgttgctaagggtcagtccagaccacactcctagaccttacttctggtcctccttgcaagggtggtcatctgtcctctgctgtgagatcttctttggtagaaatgtgatggggtttgctttcaccccttctcaaaaggctgtgccaggaacacttctatgggcacaataaggtgaaccactgtgaggtttgagaaaattaattgcccggggtgagctggaacacttaatccatcgtgtcacatatacacagaggtctttgaaagggacaggagtcttgatggaaggctcagctaccatccagacattgttagaataagaagacaattgctcctttcaatgagagaaagggaagaataaaatgtgatggagattggcacctcggaaagggaagaataaaatgtggtggagattggcacctcttctgccattctttaacctccataatgacttaccaaagagctttttttaaaaaaagagatcgacaggaaaattaattatcaatgatttcagagcagattattagatatgtgaattatccagcctctttggattttgtcctgttgtcatcatttgtcagtatttctcaacatgtcatcgaaaggtgattcaggatgaagcacaaaactgtttttttctcttttttttttttttttgaaacagaatctcactctgtcacctaggctggagtgcagtgctgcgatctcagctcactgcaacctctctgccttctaggttcaagcaattcccgtgcctcacccttccgagtaactgggattacaggtacatgccaccatgcccagctaagttttgcatttttagtagagatgggggttcaccatgttggccaagctggtcttgaactcctggcctcaagggacccacccaccttggcctcccaaagtgctggaattatgggtgtgagccaccacaccaggcctctaaactgctttttactcctagttgtgtgttgccagttcagaaacttaattaagcttatggaatgacagacatatttcaccttttagtagatgagaatacattcaagactaggcttaagtacatatatcttcgatgtaatttattaaacccttaaatccatattcacacatacaaaataatcagatcttaaaataattattggaagaaagaagagggaaaaatagtaggcaatcttcatgacactttaatgtgtatgtttactgcttaaaatgttcaaacacatctttgttttgtatagttaattttggtggtataatatttgaaaaggtgatagataaaaagtgcaggatgcaattcttgaagctgtaatttgcaggacactaataatacaagtccattttcttttctgagtgtgctatttatacaatttatatttttaacaaatcttagaactggaatgaaaatagtaattcatcttaagggtaagaaaggttgcagctgtgccaaatttggaaactttaatcagtcctcttagtgcttaagcacagactatggaatattctaatttgtatgtcacagagcacagtgctcagcagaaagcatgcactatcttaaattaatgttaattaattaatgttaaatgattgagtcaatttggcagtacttcttttcgtctctgaaaagaaatcatatttaatttagaagtggcaggtcaattttaaagccaagctaaaataagtaggtcaagtgaaattgtgcacagggcagggatagtggtgttatatgtacgaagaaaaaagactgaaaggaaaaatatcaaaatgtttacctgtgaagatgatgaataatttgttttttatatatttttgtttgcctttagtttaccacagtgggcaaatacattcttcggagcagtatactttcatgacatatgttaagctttacataactctttgttaaatctcccgttgatgaattaatagtaaacatgatacctatcaaatatgaagtgagcggtgtcctctgtagttgggcagcatagtagctttgagtggaacttacattctagcaaaattcattttttcaaataagattttatgtaaaatccaagtatagtcagttctgctataacacaacatatgtgtttctaaaaaatcatcaggctactccaaaatcatgcagtagacaacacacgatgtataggaaaaatggggctaggagcacaatgctaaaaaatttcatcagtgacatctgaaaaaagaaaagataggaagctaataaacacagtagacagatttataccctttaatttaagcgatacattaatacaacaacaaacttgttactttgctttgaataacacctggattttgcttgtagaagtggcttcagaagagttgcagctggtgagttattatgcagtggtagaaggaagcttatctgaaactggatcaaaaattatagcatcagaagtgaatgagtgtgatgcataacactcttagtaaacggaggtagccggtagatgtttgaagtgtgtgcttggtgcagctgggtgcagttttcagggtgttcacctactgtttcttgaagacagaatcacgcacaagcaaaccaaaattcttgggggatatgctcaagttgtttactgtgtaacaaatttgcatttccaaaatcaacgtgatggcagaactgactgagatggatgaaaaaaagctgcactagctctaggtatgtcaggagcccagtgtggaacccaacctccccatcaccaccccaggggttccacagagcactgctgtgtggtgtaaactttattttgtttgtttgtttgtttgtgacctggaacagacacagaaagttatttttcttgtggagagtttcggtcctacctacatatccttccctggctggagtctggaggtgtgccaagggctttggcattgacaactttcagttccactgccagatgggctgtccagtaaagcaaatggccttgaactgaaaaccctatagaatacctcgctccaggtccttgccagggactataaccttgagtactcaatgagtactccgtaagtactcaatacttatgaaatgctgctatgaaaaaccaatatctatggattacagtgtgaagaacagatgttcatttgtttctctggatacccaacaacgagggaagaagggtatgttgtttgagaaatcatttccaaagtgtcaatattgaaagaaggcgtgagaaatttacatttatcaaaaggggtcattggttataaaatagttcagggaaatctgtataatctctaccagaaataatctaggccagcagaaatctctattctgagattttgatatccctgaaaatttgtgcatcctccctccacccccggcaattagttttactggattatacttaatattatgcctctgcccccattgaatctcgttacaagatagagccttacaaatctttattgtatggggtgtctgtcttgtgggtgttacaatgtcctttttatgaagactcttgggtgaagtgtctctctggtttcaataccacaaatgactgtacttctacacaactttgggtttttattttatgtatatagttagtcatgtaactgatcatgttttcttcctctttatggccacagacatattttctttgacccataccgtttttgtttgtttgtttgtttgttgtactttaagttctgggatacatgtgcagaacgtacaggtttgttacataggtatacacatgccatggtggtttgctgcacccatcaacccatcatctacattaggtatttctcctaatgctttccctctcctagtcccccgccccacgatagaccccggtgtgtgatattcccctcgctgtgtccatgtgttctcattgttcaactcccacttacgagtgataacatgtggtgtttggttttcctttcctgtgttagtttgctgagaattatggtttccagcttcatccatgtccctgcaaaggaaaacaactcatcctgttttatggctacatagtattccatggtctgtatgtgctacattttctttatccagtctattattgatggacatttgggttggttccaagtctttgttatggtgaacagtgctgcaataaacatacatgtgcatgtgtccttgtagtagaactatagtaaccaaaacagcatggtattggtaccaaaacagatatatagaacaatggaacaaaacagaggcctcagaaataatgccagacatctacaaccatctgatctttgacaaacctgacaaaaacaagcaatggggaaaggattccctatttaataaatggttttgggagaactggctagccatatgtagaaaactgaaactggaccccttccttataccttatacaaaaattaactcaagatggattaaagacttaaacataagacctaaaaccataaaaaccctagaagaaaacctaggcaataccattcaggacataggcatgggcaaagacttcatggctaaaacacaaaaagcaatggctaacaaaagctgaaattgacaaatgggatcaaattaaactaaagagcttctgcacagcaaaagaaactatcataagagtgaacaggcaacttatggaatgggagaaaatttttgcaatctatgtatctgacaaagggctaatatccagaatctacaaggaacttaaacagcttttttttttcaaacaaaaagaaaaactattttccagcattccagtgctgagacaatttcacacaagtgtgtttgaattactagcatttactgaaaaatcagatctggtaacattgaactctcatgtcactatggcaaccatgggattcaataaagtattgccattttccttaaaatagaacaggcactcttcagttttactttttttaattttacctgcctgggccctgtagatgtttaactgtaaaccctctggcttagaaagcaatttgtgacccacctctagaaaacgtgcaggcttttatttgcatttgtgtactaatcttattcctgaactcattttatttttttcttgaattatgtttccttcattctattttcttcatccacttatattaattttccatcattggttcatcttgggatgttgtgtgctttttcataaattgctttaagtccttttagaaagaagcaagaggtattaaatatataaatattaaaattaggagaatgacttctttctcccagatcattttatttttatttttggcctagtaaatttaaagtgatttcagctatttttctgacctatttttgagtctacttgattctagtaccattcagagctctgcaattctttgttttcttttcttttcttttttcttttttctttcttttttttttttttgctatttcctcacagaaactctgagaaaacatgagacattcagtacatacattgttttgtacctaaagttggttgactctctatgattttgcattaagaactgaagagttaagtaattttcacatacaatttgggatttccatatctccttgagaaatatgaagacacaactagacccagttagcctttagatgtgtttgtgtctagttcaccacatcttttccttacctcccccattgcctccatgacactgaggctgaatgctacttgtcctgttttccttgattttcttggtctgcaacccattgttggtccaccacccaagctgatcctgctgtcaaaacatgttctactctttggcaggcactgaattggcttttctttaatgtccctcttagagccgcgagcttcctcggcaggagtgtcatggctctgtgtgtgcatgtgtaggtaaaaagaacactaggttaattcattcaccaaatgtttattgagcacctactttgtggcaaggactgttctggtgctgggaatagagcagtaaataaaagaggcaaagatatgtgccctactggagtttacattctactgggagttggtaagtgctataaagaaaaataacaccaaagggctttctctttaatttgaggatgatatgttagaccttgctgcctagggcttttttttttttttaacagagatctaaattaattgagagatctaaattaaatgagatctaaattaaatgagctgtgcagctgtctggggaagagcatagcaaaccaaggggcagcaatgagagtaaaatcctgaaggagagaacatactggatttagtattagacatgacttttatttcaaatactgccttgcctaatggtgtgaactgtgaccttctggaccatgtctgggaactcatctctaaaatgctaagattctatgtagaagaaggaccatgccttactagtttctacccagtgccaagtctagtccttggctcttggtaagcatttggtaaatatttgtgcagttaacagatagacacaacaatggttttaaaagaatataaagcatcttggccagccgcagtggctcatgcctataatcccagcactttgggaggccaaggcaggtagatcacctgaggtcaggagtttgagaccagcctggtctcaacatggtgaaaccttgtctctactaaaaatacaaaaattagccaggcatgttggtgtgtgcctgtaatcccagctgctcaggaggctgagacatgagactcacttgaacccgggaggcagagtttgcagtgagccaagagtgtgccacttcactccagcctgggcaacagagtgagactctttctcaaaaaaaaaaaaaaaaaaaaggaatataatgcatctcaaaagccggatcttagctgattgtttaatacaatcccagagattaatgacaaggaagatgcctagtcctgaaatgtgtccaaggaatttctctttaatgataattccatattttctgcacttagcaagacacatctacacatcaaactggggattattatgacccaggaaagggacctgggattctttgactgtttcctcttgagggcattagtgtcactgattgggagacagtcctctaaattcagctaaatattggtcaccctctataaggacagtgggacagcgggaagcagactaagtgcaaggattgtgtcttagttgttgtatccgtttttttcccttagtgtatcccaacttctaatgtagtacccatgagctcacagtaagagctcagtacatatttggtaaagagtgaataaaatcaagggatgcattttcaagctctttcggaagacagtgttggagtcatgctggaaagacatcatacattctgcctgtttccttcctaagaaggacacactagaactagaggagattgaaaaggctgaaaagtggcgtgaaggccagacctagtggtaatgtcttatttgcataactcatttagttattatctttacttacatatggggaaatgaggtcagagctagtaagtggcagaaccaggtagtttgactccaggggttgtatttttaactccaagagtgtgttacgtacagagaaggataactagcagttacagaaacagaagtatgaaaaaaaatcattcactaaatagctgaatggattctgttagtggcattagtgactgatgatcttttctggtgaaaaatcatttctttcacatggaacaggtttcagatggagagaaaagtctactccgtaactcacacttctctggcttttttgtggactcctccaagactttgccatgtttcatttcttgagactttatatcagattttctaaaagccattggggaagcccttcataacaggaattcttattttgattcagataacacatgggtatttcctaactaccatgttcccaatcccacatgcttcatagcctaagagctctttccacatttaatgatgtgctggccacattatttcccatcagcttcaactccttcttttctatttcatgaaaaaattcttgttcatgaacgattaggttttcttctgcttattttccgtgtagatagaatgaactcagttgttacgatgctcttgcagaagaacaaatttaaagctggaagaaagctttgcgaatttataacagcagtctgttgggttcagagagaattgttggaatcctatgctttcctttcatttgtgtgcttttcaagtgaggggaacattgtgatttttgtagatggtgtcagcatagatggcagagataagcagatatcctggccagcgttctggggaagatgaaaatgcttgtgttttctcatgactttatttttccagagctgactctatggcaatatcactctgacaaatattggctggccatggaatattttaaagagcaagggttttgtgaatgttctgtctattaccatggctgaggaatcaaaacacaatattctccacacatttcctcgagcactcatggatggattccagtatgatactttcatgttagctcttagaccacaggaagaatttaaaataaatgattactgaaaacacaatgaagaagaatcgagtagaatgttttgtaccatttttctctttctgcacggtaatatcatgctcagagtggtgacaaagactaactgagtgcaaaagggctttgcaaaaatttatgttttcagatgcttgttgtgaacatgatggcaatgacaatcatgtcacatctgcttcgctcgtgatctctatccttatgtaaggaaagagcagacactgatgatgttcaaaaacaaacccaccacagacatcccaaagacttctataattttccccccttctctagaatgtacttctcacattattgtgtgattaatgagaataaattatatggtgtgagtatacaaaggaaggaatttgagagatagctttttgcactggaaattatttgggcaaagattcttctttttttttttttttttttttttttgagacggagtctcgctctgtcgcccaggctggagtgcagtggcgggatctcggctcactgcaagctccgcctcccgggttcacgccattctcctgcctcagcctcccaagtagctgggactacaggcgcccgccactacgcccggctaattttttgtatttttagtagagacggggtttcaccattttagccggggtggtctcgatctcctgacctcgtgatccgcccgcctcggcctcccaaagtgctgggattacaggcgtgagccaccgcgcccggccgggcaaagattcttctacagtacctcttgggtctatgaatgaagcaggatggcctggatgtaaattaaggatttcagttacggtgctgttttagaggagttccctttgtgatgccatgttcgtatcaggctctggtgaccaagatggtggtggcggtgatgataatgtttattatagtggctgcagtgtattcactgcttgtacttcaggttctgtgcaaagtacatgccaggcattaatctatgcattattccacaacagcctgtgaagttgagactgttcttatgctcattttgcagatgacgatactgaagcttagaaggcttgagtaatttccccctgggtgaatagctaatgagaaatgggaagagcttggaattgaggctagtactctctgaccccagagcctgggctctgatacctcatccttgctacatcctttctagaagtaggaaactcttgcctggaccatttcaggggcctgttgcctctccctactttcctcctgtttcctctttagctctttttcctagcatgtacctcaccattgaaggtccatcatccctgtttctttgcctgacttatatacctctcaatcttcaggacttctttactctggggtctctccttcgaattctcataatattttgttcttatcttaatcaaaactccatgcagtttgtggtcagctagttaagtattccagggattcctaacctgtggtctgagcagtcaatcgagttttttgtgtctatgcctgtgtgaattttctctgaagtctgtagttttcatatgaatctcagaaaagtatttgaccaaaaagatcaaggtgtttattgtttataggatcccccaccctcccataagtaataagctcccagaggaaaggagcatatcatatttatgtttatttccctagatggatataataggataatatttttggagtgttcagatgaatgaatgtagttactagttagacaatgaggtgatatagcctgtggcttaagaacataggatctagattccaactgtgccttgggttgaattccttctttgcaaaccgtttggcaagtgatacagtctcttaaagtctcattctccttattggtaaaagggatactaaaataatattaaaggtagaaggttgttattgaagattaaaataaggtaatgcatataaaatgcttagcttgggaatacatagcataccttccataattagctgctattattattacttaagaaccttttgaaaggggccaaacaatgaggttctcatgattttcctagtgactattgcagagaaacaaaaacctgcaaaggaaagattgtttgcatgctgcttttgagtcttaaagacttagaaccgatgtgctgtcattaactatggtgccaggtgcaaggcagctacctccttaaaatgtttttcttgggcatttccattccctgtggccttgaccctggatagacagtggctcaggctccccagacaggcacccagaatgccagctaatggaaattttgtgatagtctgcccctgaggatttggacatatgttgttttgtgtctaaatcaacagaaataagtgcagctgtagttaccccctctgcataatcatctaagtagcctgtttctttgcatgctcatggagcccccaagtgctgggcccatcacttgccacccactctgtgcattgcaaatgagtacagtaggtcagataaaaggcagaggctggttgggcatcattgctgacttacacagcaatgatgaatagttacacatagatcaagacataaaagttatttataatagtctggtcaccagggtcacattggcaagaaggaacctttggaaaggtgctttggttggatacttctgaactctggctcattaatgtgtaccaaatatagaaaagttagtttaaaatctctttacagaaaatatattatgagctggattttattgacataggaatactgacttatacttttcctataggtttctttaaagtatgtaccatttctttttattattggtaattgtgaccttggctcagtcatttgcaaattttctttttttggtatatcttaaaaatggatagcaccttttattcataattaccccaaactggaaacagcctgaatgtccttatactagtgaaaggataaacaagctgtggtttatccatacaatagaatactaattagcgatagaaaggaacaagctaccgatacctgtagcaatgtggatgaaggtcaaatgcacttgctaagggacaaaaaacagactcaaaagcctgaatgctatatgattccatttatatgacatcctggaaaaggcaaaacatagaaacagaaaactgataggtggtttctgggattggagatgggggctgttttgactacaaaggagtagcacaagagagtattttgaggtgatggaactgttctgtatcttgattgtgctggtggtgacatggctctgtgcatctcaaaactcgaacggaaggtgaattttagtgtatctaaataaaagtaaaagaataaaaaaggagatgaaaacatttacccaatatgctcacatgctcacaaagaaatgttgctttgaaaaggccgatatatgtaatttaaatttcataaatttaatttaaacctcacaaatatttattggtgagctgctataatgcagtgctttatgggaaatcctaaaggaaatactgatccatgcactcagtaatgtaaccatctctttcggcaaacatatacaaacaattttagggtgattttaagattataattatattatgggacattagaggagaaagaggcatctagatgggatcaaggaagattgttaagaaagtgaagaaggtttgtcaaggaatagtcttaaagaataggtagatttttaaagtatttttagtaaacttttaactgaaatataatattcccacagaaaagtatacacatcttacatgcactgcctgaggaattttcaccagatagctagcacccaatctctaagatagagcatcactagcacccttgtgcctcctcctagtcaacccctcttctaagtataatcactatcctgacttctaacaccatggattaatcatgtctgggttttatttaacttcatacaaatgaaatcatacagcatgtactctcatatctggattctttcgcttaacattatgtatgtgagatttatcccttgtttgtatgtagcagtagttcattctcataggatattccattgtatgattacatcaccatttatccattccactgttgatgggaatttggtttgcctagagttctgcactattatgagcagtgttgcaatgaacattattgctatatgctttttggtgaacacacatataaatttatctggtttgggttaagaaatggaattactaggttatgaggcatgcacatgttcagcttttggtagatactgcaaaccattttccaaaagtctttctgtgaatttacaccttcaggagcagcatctgagtgtgccatttgctctgttcttcaccaacatttggtaatacatctccctttcattttactgaagaatacgtagtgtttttttgatagggatggtgagtgcatgaagagtagtactccaggcaagagaacaccccaagcaagagtgtacagctagagttagagaataagttgtttatattggtttgaatcattacaatagataagtccagaaggataagttggtgcttgattgctagtctaaataaaacattaaaaaaaaattcattcattgtatagtgatgaaccattaattttgtgaccatagttgcctgaaaacagcaaaatcgtgctttaggaagtgttatctagtagtaggtgtataatattttgggggaagttgtcagaacaacctagtagtccaggccagagtttcaccatgtcagaatatctgtgagaacagagatggtggttgatagataagatgtgataagcatctgttcggtagagggttaaggggaaggaagagtaagagatacctctgaccctggtggtaccttagccaattatgccaaaattcactattatccttcttaatgtctttaaagagtagtttatacttgccgtatccatttctttacttccctatatggcttattttttaactttttcattactaacaatattcaatattattattattaaatatatcatacatatagaaagcaatacctgtccgtttagtaaagaccaataaaatgaataaccatgtgcccaccatccatcttaaaaaatagaaccctctggaagcctcatctttgaggcattctcctctttactccctacctagttaaccatcatcctttttgttctaatcactcctttgcttttcattacacttttagaatcgttgactacatcactaaactatgctttgaactttaaataaatggggtcataaggcaagattctatgtgacttcttttttcattccacatctgtcttgattttatccatgtaaaggcatatcactcatgtttactgatgtgtagtgatgcattgtgttaatattattcctcagtttattgatctctttcgtctttttttttttttttttgacaaagtctcactctgtcgcccaggctggagtgcagtggtgtgatctcagctcactgcaaccttcgcctcccatgttcaagtgactctcctgccagtagctgggattacaggtgcacgccaccacgcctggctaatttttgtatttttagtagagacagagtttcaccgtattggtcaggctggtctcgaactcctgacctcgtgatcctcccgcctcagcctcccaaagtgctgggattacaggcgtgagccaccgagcccagctgatcacttccctcttaatcattaatccctggacccactgaccctaatattgtggcatatgtgatagactgaagtaaatcatgtattgtgtcccatagacttaaaactttttgttaataatttaatgtttacaatgaggtggaactacagttgtccttggtatccttgggggattggtttcaggactcctttggataccaaaatccatgggtgctcaagtgtctgatttaaaatggtgtagtattttcatatatcttatgtacatccttacatatactttaaatcacctgcagattagttctaatacctggtacaacataaatgccatgtaagtagttgttatactatattgagtttttatttgtgttattttttattgttgcattgtttttatttgtttgctttttaatattattgatccatggttggcagaatgtgtggatgtggagcttatggatacagaggggctgactgtattttgtcttctgtatgaaagaggtgcttattgtacaatagagttttccaatctgggcaatattgacctttgcagccagatattctttcttgtgaaggccatactgtgcattgtaggatgtttaacagcatccctggcctctactcactagatgccagtagcacttgtttctctgtttgcaaaaaccaaaaatgtctctagacctgtcaaatgtcccatggggacaaaattgtcccttgttgaggattactcctctaaagtattaaaattcagtgaaaaggcagtgagttaccatgactgactggagagaatcacagaagttaccttcctcttagtacttccctgctgccccatcccagccctaggttggtgactgtgaacagtggtatttttcttttgtcttttggtagttgacttttactggtcctggagaccagccccctcatgttgtaagcatgttatcagttttaccccccgccccccagggactacttttctgctctcatggtctacattctgcctacgtgtgactctctttgccctaaacccctcctaatccagaggcagtctttataagtccaagggagatgatcatgctcattgcattgcatttaaaaattgcttccatttcccataagcaaaaaaaaaaaaaaaaaaacacttaaagaaaaaaaagtacatatctttttgaaattgtcagtttaaaaatctataataataaatacatgttaataaagaagttaaataccaatgagttacaagatttatatatttgaaatacacattttatagtattattgatactttgatattaatttaagcttaagagttatagaaaatgctaaaatgatagggccttttgacctctgaaatgaaaatttaaaacatttaaagtatatttagttagcacacagctctcccgtaactttgtgtaatgattttttttttcaagtacaacacaaaacctgctcacgaatcccaaagcattataaagctggctccatctagtgtatgaagtactatatagctaatactgggggaaaaattgtactaggaatctcttttggtacttcattatgaaattagataacaaccaaaacaaaaatggactgtaagctaaatttatgttccaggagataacacaggccagagtgaccttcacagcattagaggagaggtctttatatatcgaagcatcaacctgtagcatgcctgacattttgttctgacagccttgattttttttgttttgttttgttttcccctgggctagaggtcttatttacaggcactatcaacaaacgcagcatgtaacttccatggtgatattctcagtcctacttggccagcttcccactttttctgtatggaatcatatctgagagtcatgctcatttcccacagttagtgagagattggggctgggctcacttactgtgatttcagaaccctacatggttttctttatcagactgaaattctttgtagctattagcctctcaccacaatagagtgggccactctatcggggctgtgtttaatctcgtttccactgaaagtttctagcacattctttatatctctcaatcaatgtttcctaaattttagctattctcatgctaacttcattacttttgcttgcaaaaaccacatggaactttaaatattacatgttttaaaggaaatgttatcatacatggaagccacgaatggaaataggtattaaaatcaatataatgaaattgaaagaaaattgttagattcttgctaggtatattgtctggaccggcaggtgtctgaggtctgacctgtattgtgaacaaagggcaagtgttgagagattgaagacatattagcatcaaacagagactttccttagatggaagaaatttgaaagggcccttctcactgtgtgattccatgcttagttaatgtgaagtctgtacatctctatttgagatcatcttgtatcccacactttgggaacttttgctcaagatttaccatgtttctcaaaggaagcctatcattctcccccaaatttccaaagaccttgtttcccctagaaagcctttttgaaaaattatttccttttttgagaactttcttcttctattaagaagtataaattgtgttgatatgttgggttactttttttttcttccttgtaatctcatattttcttagtctcttttctaactagattaaattatttgaggacaaacattgtttctttctagtaaatgccattaattgaattcatgcttggtataatattcagggaagtctgcttcattctctgtttttttgtgtgtgttttttgttctgttttgtttttgttttttttaagtcagatcatcgttagaggtggccaagagaagccattatggtcaattaattaatcatttaacctattggtgaatagttattgagtgccttctctgtgtctggaattgtatgtggtgaaagaatgaagtagtgacctaaacagacatggttcatgcctttatggaattcagaatctagtgtggggtacagacaagtaaagaggcaactccagtgcaaggttctaattttagaattagtttgcttttgtgttcattgggtagattacaaaaacttggaacagagaaccatagagaggaaagtgtgggctctggagtttcaaactccagacctgtggcacattaacctcttgattttgcacaggatactcatatctcaatccctgccccccccagtttctttctttaaataaaaaagatttgtttaataataaacatggggtatgatatgcaaatatgagatacagttatcagtgtgacaatatgataaacaattctccatgtctcttctctcctccttcctcttttttcacataaggcagagacgtgatctcatggtttttttttttcaaattttcatgtttctttcccaacacgctaataaatgaaaatgcagtgatctagatcaagtataggaactaaacatgtttgttaatgggaatatcattgtagatggtgtttaaaggttgcaaatgcattcaattttcacattgtctgtttaaattaataaataatttgagcattcagcattaccccagaacatttttctcttaataatcatgatatatcagttatgcatcttaagcctattgaacagtgcctgggacataggaggtgctcaataaatatttgtttagtggatgaatggattttaataattttgactcttccttcttttattcatgattttgttaacatcttttaaaaatgaaccaatattgtttgatattaggagcaagataagcttaaattatggtttatattattctctatatctgtattaccagccttacctgttatatctggcaggtaattaatatgtagtaaatgttaaggggagaatttagtagtttttttaggcattatttttttaagaacacatgacaatattttaagtaaggatttaatttgtcttttatattatttcatggtaatattcattggaattacagactattaatttaaaatattggttatttgaatattttactatcaacattaatatacactttgattataggtaagactccctagagtgtcaattagatgcagaaagctaatgtgcattgagtttattatgattgattagagtttattatgattaatcaacagacaggaaggatttttgtgcaaatattatttttctcattttaaatcctgtttgctcagcataactgtaacaggatgtcattagtatgagagtaagttttgagatgctttaaaagtttgagaaatttgactgttagcaaaaatttaacataaggtgatttatttagcataaagaggtttgattttttatagttttacttatttaaatacacgacttcctgtgtgactcctgggtatgtttacatagaaaaaatataaacaaaaattatgattgacacactgaatcagagcagaaggtttcctggactagaatttggtttgtagctaagacaaccactgaaaagacagagtttgttgtctactatcagaagttacagataccatcaatatttagtctttagttatgcactatgaatatattattcacagatttatctatacctttcctgaacttacatgtattttgaatctggactacctcttaagatatcaaaattcaaaactaccttaagcattgtctccaaataataacttttatttgccctagaatttaaagttctttgaggctctaagggctgacttttcattacctaacaatgttttgaaatagagtcctcgctccttgtgtcaccttgattgagtgctatttttcttgtaccatgttaagtacttttcatactttatctcattcaatcatagtattaatctatgaaataggtagtattaatattcccatcttatagatgcagatcttgagactcataagtcgaatgccttacccagagtaaaactaggatacgaagggtggtgtgtgtgtctgcattgaatcaccacactatcctgtctccagttggaaaaatggtgccatgtttatatccataggagtgacacatttattaaatagcagacctctcagaagtttgcttcccacaggttgaaaccactgccctggatccttaccacatcttatacaaattggaggttttgcacaccagtgacttccataccaccttccacaatggcatcgttgtctgcaagaaacagtgtctctctaccttctgctcactctttggaatacaaacatttaatttatatgaatagactataaaatctagatggcagaatatccctgtcttctttatctcagtcccttcttctggctcctccttggaccagaatggatttagatggtccatggaactgctgatgtcctgggatctcctaatgagatggaatcaagggaagggtgggttcatctcagcggctgtgagcttagccaaggtggtccatggaggccacttctacagctgaattgcatgttgctttaaaatattataataccttgactcctgcttggaagaagaaagaaactgatgttgtagatgaagatgatggtgatgcactctcctgtttcaatccacaacacccctaaaagataggcagagacattcatattcttattgtccttcaatatttcataacttaaaaaaagttactaacagtaaaatatatgtccacatttttctttttaaatgagtaaagagttaacccataaattgagataaaaacaccatgattttcaggtgctgatgtggagattttatttattgtaaagtcatcttgtgaataactttgtcccccacactgatgacggccttatcttttcctgtttacttaccttgataagatagtaaattgcatttttactaaatttctcatttaaaaatattatcaaagcagcataatctcatcagtgtgttctctccaactttgtgttgtctcacctactctgtttatattctagattgtagttttcttattgcaaatactggttgccatttatagataacaaagaaaagcctctacataacctttaatgcaggaacaagtatttattttgagatgaacactgagagaatatcaaagagtttaaggtaagggattaatccgtggtattgattattatattaaagagtcatgctaatgttttatatatttttgtttgttaattgcttaaaaattcactttaggctgggcgcggtggctcacgcctgtaatcccagcactttgggaggccgaggcgggcggatcacgaggtcgggagatcgagaccacggtgaaaccccccgtgtctactaaaaatacaaaaaaaattagccgggcgcagtggcgggcgcctgtagtcccagctattcgggaggctgaggcaggagaatggcgtgaacccggaaggcggagcttgcagtgagcggagatcgcgccacagcactcccgcctgggcgacagaacgagactccgtctcaaaaaaaaaaaaaaaaaaaaaaaaattcactttagacagaatttgagatgcctctttgtagactatatttttatcctctggacagattctttgaaacagtttttaaaaacatttaatttttccttctggatgtttgtataaatatcttaaccattctttaataatgttgggctgcatcccaatcaggtttatgtggggtcatcttagtctcttctttatttcccttttcaaccttgaagggcttccttggtttccggggacaatgagctgtctttgagaggatgctgtaatatcactgttacaggcagatctgttcttggtaggagaaaaaaatagaaacaggatgaaagagataaacgtgagtgagtgctactgcacagttatttctgcaagtaggtagtcattaaaaattttcttcagtcatgctgtgatggtttcaaattagagccgctggaccagttccttgcaaatttgtaccccaatactttctgcatgaaagtgagttgtgctcagccactaaaagcttgcaaataaagagtacacagttgtatatcccatttatgactattgactttcttcataattaattaaatgctaccctcaaattatacttcatagatccttccttatctgaccttttttcatttttgtcagtcattcatgcattcttctttccttctatccatctatccagcaaatatttaaatacttactatgtgccaggcactgagaaaaaggtaagtacaaggaacctgcccttaagaacacaggacaaatagataaataaaaggattacaagttgaattaagtgctataaaagaaagaagcttgcttcaagagcacaaaacaaaaggagatgtttcttctttaggaaggatggtctgggaagacctctctgaggaagaaatataagacctgcaaaacatcatctgccaggtcaggaggcgccaggccagggaaggagttgcagaggagagagaagagggctctagcattctgtcctccctgtaccctcttcccattggcatgtgagtgtgagtcttgggtttctctggagtgaacgcctggaaagcagagcctcttgcatcttcatccttgtcttccccatggcgctgagaacagtgcctctcacacacatgctgggaaaactaataaatgtttggattgaagggcctttcggtggcatgtgacttttcccagaatgtgagtgtgaggccatctggacaaaagagatgtgtgtgttactcttgagagtactttgtgagtttcattattactttgatgaaactctttaattaccccacaataaggctttcattgaacattccacatggatattttaaagaattaaaatgtatgagtaacttctttattcaataaataaaaggagcttccattcttgagtattttcctgccactcttaacagaccatttacatagataatattatatatagctatatatattataatgttatattatatattagtggtttctagacttgacttcactttagacccctatgagaatcattttttagaaacacagaattctaaaccatacccctgcagaatctcactcactcatttgtttggggaaagatccttgaactttatacttcttaaatctcctgtatttattttaaggaggtggggtaaggagaaggctcctcaagtgcttctgataggaagacaggttggggaaccattggctgggatcataatgaaacattccaagaccaagtagatgcttcttaaattgtgtgtagttcatgggccaacataggacccagcacatagtaagctctcaagtgttaactgttgtggggctattgagtagaagtatgagtttactggaaagaaaaatgactatcaaaagaaagaatataagaaaatatggtgtgctcgggctgggcaataaaacatttaatgcctaaataaaataagaagaattttgagctatgataaaacagtagcattacttttcttcagctaagtcttggacaggataacaagtaaaatcccttatctcttttctaacctgttcaaagcagtgattgaatttttccttccaaaaagattctgaaacccagtttagcttccaaggaaaaagttggctgtcacttggatggttgattactttaaatcccattttagttaaggttcagcttttaaagggtcagtaagaattctgatgactgtagttgatttgctgcaatttagggcaaagagtagtacttattattgcagaagcactggagtactggtgatgtttttattctgcattttgtgcttagtttttctgatattattttttcctccccaaccacactacaaattcttagtctgtgtttaaacttaggatttgggtatctctctctatctctctttccctctgtgtgtgtgtgtgtgtgttcatatgcatatacatatatgtatacaaactcaggaaacacatctgaatagtacagatgtgcccaagacagttgcttacatattacgttgattcattttaaagatattcatcaagccatggactgtttattctgctgagttctagggatacaacattaaaccaaacggacatggttcttgatatccagaagacatgtgttcgttaatttgggtgatgacttgaggagcagtattttagtgctgggaaatgcacgtaacatctcatgaattttgtatatggtggcctgtgttcatatttaagccaagctttggtccatttgctagtggacgtttcattgctgtatccaagaaggttcccttagaactgtactgtaaggtagatctttctaaagtactggtgtaaattgtcaatagaaatatttcttgaggcggtggattgtccaacataaaaagtcaggtgatgttactggctgaacctgccaggggaatatttggcaccacattatgtccccttcgggaagggctggaattgataccattggtttcgtgatcaatatttgagaactcatggagggtacagattttccctgtgtgtgagcatgtaataaatcagagtttcagttctaagatgtacccgagtgccttgtaggtttactcagctttaaatagtgcctaaggtgagagagaaaatctggcttgaacttttatttattttatttcattaaaatttatttttaagagatggggtctccattgcctgggctggtcttgaactcctggtcttaagcaaacctcccacttcagcctcccaagtagctaggattacaggcatctgccaccgtccctggcttgattttttagaaaattatcccttaaagtttctgatatggttattccctatcctttctttatttcttgctcttccactttcttgatttttcatttgtttttttcactctgtctcatttctcttagttctctagattggtcaatattaatacaggacaggtagcactaaccatgattataattgtaagagcttttttaaaaattgagcgtttattatgcatcagagacaatgctgaacacattacttgtcatctctttcagttctaacaataacctatgggtagtcacttatttctcctttctcaggtgaaagaactggggcccagaaagtttagaaaatttgtacaaagtcatagaattagtaagtggtgagatttgaacctggataaataaacgtcagaatctatgttcttgattttcatgccaaactgtgctagaggcaggaaaagagaggtgggataggttagtaagataaatagtgtaacatcttagtcatctgtttaccccaatacctggtacagtacctggcatgtagaaagtgctcaatgactgctgttgatgaactttctcctctaatcgtatttattggtccttagttttacgagcaatctgcccacttttctccactttgcacatctgcccttcccatgagctaccatcacctcctaccaggactattgcagtagctaactctgacagttttctagttggctgtcaacatagcaaccagagagacctttctaaaaactcaaatctgagctcatcgttcccctgcttgccatctctctgtggtttcttgttcatcttgaaacagaatcagtgacctttccctggcctaccagatccttcatggtctggtcctggtcactgtgtaggtctcacgggcaccatgtttttccttcatactatgtccttcagtgatagtgagtctgcctgccaacttcccacctcatagttcttacatatgttgttactgctgcctggaaagcattttttctatactcctcctctccccaactcagatctcagaccagaagtccctgcctaaggaaagcctttcctgacccttaaattttaactttttcacctctctgcagcagttatgacatttttcattacatatttatgtgattatttaatatgtgtttcccattagactgtaaactccacgaatttacacaatgcctgggacacagttggtgttccataaatatttattgaacaaaagaaagaaagaatgaataaaatgagcagagaataaacagaaccagaaatagtttggccgagactcctggctagatatttcctagcattagagggaagttaaaaaaaaagataatttcattatatcacgtaatttgagtttgattatggctgaagaggttgcattattttccaaccatttactttggagataaatgtaggcacagagaggtgaagtaacttgcccagtgtatgcagctagtcagtgtcagatgtctttgttatgacctttgaattgtgtgtagggagaaacatacatacaatattttcacaactctgtagggcatctttggtgtgctgagtcctgtaggagctgcatgaatatttgataatattgatgttgtcatgtctgcattttaaagtgttttttgagaacatgtattgctgttttttcttcttgtataccaatgtgttcagaattagattggatgacagtcttaagaatacacagtttatggcctaacgatttgtgtgtcctgaaagatggtggccataattaggagcagtttgtgttttacttccaccagaaccgggcaaggacaaccctcctaatattcttggggtctgagggtaaggaatgctgttttggatctctagcctgtcagcaaggagggcatattcaattatcaagctccaaaaatgcctgtgcacagatgcaaaacacctagagttgtgtgatgagttgatgcccgagagctcccaaactgagaggggacacaagcagttccacagtcctccctcctagattctgtgactccagtaagtgttgacaattcactggtatgtgaaattacctctccttttaagttctctaataatgtgcagtctctgcaagcctcagccagtaccggagctgggtaaggctaaataagcttcccgaggtgcttgcctggctgctgggctgcctccctggccgtgcctgggtccttgagtagccctcattgtggtgtgaggcagcgtttttgtcctgcaggtacagtaggtactggattaaacaggtctgctgttgcagacagaaaccaggcaccgttctagcacagagctgtgtttggattggagtttccagggccttatcaggagccacccctagtgacacagccagtgccagaactaactttgactttcactcttcgccaagggcttgcagaacaccttaaaggaaaaaagatggaggcgcttagagttcagatgttcatgccatgctcctttgaaagcttgtatctgtaagtgaagttttattctggaaataatcccgggaccacttaagaggagcagttttttttctctttaagggggaggataaaggaagagaagggtttattgggagttaaaaatactgaagctgttacttctcactggctttaatcagcttcagctgtaacctctggtaggtggctatgacaaggataacaactaatttgggggtgggggtgggggtggtagatagaaatgctaacccaatatccttgccctctcctttaaaattgaatactggtcttaagttaataatgacaaaaataccgcgactgcttgaaaaatctgagttagagcagagcttgatttatgattgcaagatagactgcagcccagctttgttatgaataaaacaggattttcttcaggaaaactgtgtgtttaatacagtagtaacatttgtccaaactctcccattgtaaacactgtgaatttttggtttctccccccaccttttttttttttttttcctgactgtggaatggtaacagttgcattaatgaacatcttctttgcattcttgtatattgatttttttctcttggaaggggaaacagacatccaaacatcagaattgtctgcctggcatataaatgtagaacaagtttaaaaaatggcaatttcaaagaaatattaaaatggagaaaaactaaacagagtatagttccccccacatcctttaacatttactttcactgttaggtgataagatttgaaaacagtgctaaaagctgtgtccccaagtgaataggcattcaagcaaatcaacttatgcaaaagctacctctggagcttaatcattatttactgaacgttcctgggtcatgggagaggttctgattaagtcagaaaggcattatgttcagcagcttgtgaaggtgtgtttaaagacagcaagaataatggaaaaatactagatgtagcagatctatttttagaatttgattcttaaaaaatataaatataattaccataagtttaagtgtgggttaaagttcatcattttcagtagatacatctttaaaaggtcttataaaaggtagttttaaaaatgatttctaacttcttgagcttctatttctgctgcagtttgttttaacagatactttagatttttttcattctttatgtcgtcataacagcttaattactcacctctataaaatgttagagcattttctaaacaaagtatatataattatgtgtttaaaatgtcactatgctagaaatgttataaatttttgccttattaatgagatactagctggggagatgatgtctactctttgtgattcattctctacaaaaatatactctaacttactaattttttaatattaataatggatggcatgaacaaatgaaacttgctattctgattctacgtaagaatggtagtaatgtcaaacctgaattcacagccaaattaattcttaattttgaatttcattcttttagttaactaaaatacttgtcgtaagagcatgcttcccttatacactctcagaatgaaattcttcacaaacacgtttgacaaaacttgttcactgagttattgcccattaacttttctgtgcgtattcttttaggagagcacacactgtgaattaattgttttgtattttcctctaggaaagaaaaggaacatgatagcagaaggcagcattctagaattttggctccctagaaagtaacttgtcagctttgactcgtttttagatattaagatgttcagcagataccatttcaggaattaaaacacagactagaagaattcattgcctaacttttactcatgtccacatggtttgtgggaactatgctaagtattgtgcttgtattaacacatttaattttcacaactgctctatgaagaagatatgtctttccacccccattttgcagctgagaaaactgaggcttggataggtgaaaaaccatgcccaagtgatacagctaagaaatgacagggctaggaatttgacccagggatcctggctccagggcttaatgctattatctgttgtggtctgtggattttcacttaagatactaaatgaatcaatatttcttcctctgcttttttatctagtgggtttctcctatccctagatttctgaattaccaaactgtaactcatttgagctcttgaggggccgtgtttggtcctgatgccacggttttcgtctaccaggtgtatttccctgagtccagttcaccattgattataagacagctattggctgggcgcggtggctcacgcctgtaatcccagcactttgggaggacaaggcaggtggatcatgaggtcaggagttcaagaccagcctggccaacatgatgaaatcccgtctctactaaaaatacaaaaattagccaggcatggtgtcccgggcctataaacccagctactatggaggctgagaaaggagaattgcttgaacctgggaggtggaggttgcagtaagccaagatcgcaccactgcactccagcctgggagacagaggcaagactccatctcaaaaaaaaaaaaaaaagacagctatttggtggagaaagaaacttactaaaatatattcattgattatatgatctcttctgacttgggaaatcttaacatgtggagggaaagttcctcttagaattaaggaactgtcgtagatccctagagcccagagttctccgtctctggatgattcaagcaaatggtttgaataagggtgcaccaactctaaggttctagtattattagattctatgaggtagaatatttgttgggagacagacaccaactttactcactgaacaaatatttattttgttctactatgtgctggagagacaatatgtgaataaaacatgtaaacatctctgccctcctggagcagattggaccaggtcatgaaggaccaagcacataccagtttcatccctgagtctggccctcattctcatggttcaggatggcttctgaagctccagccagtgcagccagattacaggagacatggtggcagaaggtttagagaaggggatcatttgaaggagattttctgtagctgattctgatactcagccatgtttggaaatgaatactaaaacattcaagatcacctgtttgtttagtaggcgagctgggacatgagcccacatacatctctcattcttaagccaggacactttcctccatgtctgacaaaattcacattctcttccccacctctagtcagcctggccagaggtctgaaaagcccttctgatactgaattcagtgttttggatggaatcaaatgagaaggactactcactcctgccaaatgggctatgaaaccaccccaaaacatctatccataaactgcccatggctttttgtgggtacagcacaactgctttgtcataaacaaaaggaaccgataggctgaatctataggaactgcctccccctcaggaggtactatgagatgggtcgtatgaagctcctcctgctcgtatgactcacttcacaatacctctcaccccatgtccttctccagctgaggatcccacaatctcctaagatgtaaactttaagttatgttgaaatggagtcttacgtagaactccagaaaacagtttcggtggtgttcttggggttgtcttagaagactcttgaggatctttgttctttcctatttttcttcacctagaaccaccatggagatgtatatatttgatctttaatttatattatgctatagtacagttgccgtagtcagttgtatttgaattaataaaaaaaacaggcaaaaaaaaaaaagccagtctgtttcatcacaaaaaggaattcttaagaatgttttgaaagtgccaccaactgcacaaatcagagttggtaaatggatacacacacacacacacacacacgtgtgtgtgtttatatatatacacatacatatatacatgtatatatacacacatacatgtgtgtatatatgtatgtgtgtgtatatatacgtgtgtgtgtatatatatgtgtataaatatatgtgtatatatatatgtgtgtgtatatatatatatatatttttttttttttgagacggaatctcgctctgtcaccaggctggagtgcagtggcgggatatccgctcactgcaaccttcacctcctgggttcaagtgattctcctgcctcagcctcttaagtagctgggactacaggcgtgtaccaccatgcctagctaaattttgtattgttagtagagacggggtttcaccatgttggccaggatggtctccatctcttgatctcgtgatccacccacctggatatatatatttttaaatggcagtctgggtgtctaacatttcagagtgattggcacttctgttatctacttaaatctaattggcgaaacttagcatgtagccagtccagctctggagacctgggagatgttgtgggtgggagtgtgcctagccaaaacaaagagaaaataggaaaatagatgggtgctaggttttatgaattgtaggtcttaggctgaaactttgactttttccccagtattactgatattttttaaatgttacaaaaccagctgtagtatcccagggtacatcaaactggcttaagaaaaaatggagtttgattggccctcgtgaagtccttgtccagggttagtccagggctatcatgacttcaggaatgatttgatacaggtgctcaatgtcatataaacactggctccctctttctttgttattccttctcattagtcctctgttctttctttactgtttcctccagtttggctttcttctcggatagatccaggaagttccagatttacatcctaccagcttttcaaaccttagtttaaagagactcattttaacctaatagtttcagttgaaggaatagggataacccttacttgattgtcttggggcacaagcacattcctgagttagtctttgtgaccagaaggatggatttcctgattggccagggtcgtacttccatgtctggaggtagtgacaacaccataacctcatgaactgaaagtgaaggaggctggttattcaaggttaaatcaggtactttaccaaacaagtgggacaggatgctgggcagctataaatgccatgtggccaccataaatcattactgctatgtgtaaggttgcctgttaaaccatgacaggtgtacccattcactgctccttagattacagtttgtacttttgtctttatttcaacacaatgttggaaactttgcatcttggttgacgtgtgctagacatgcagtaattgttaagtgatggtggtctaaggcttttgaattttctctgatctgttataatgtctagaaaaacagccagagcatgccctgtgattggaacaattatttgagtacaaacagaagggctttctacctttaaaaagtttattccagttcctttcacactcatgtctgaattctgtcattagtttgtcattgtgttagatttttaaaaattgctttttcttttaaaatactctcagtggagcatcttgccatgccgtattaattactttaagggatgaatttctcaaagccctttaaaacatggcagttagatgtgaatgggattccacagttggacagagtaagcaagaattctagagtacagtctagtgaaaggaagcttgatatgaaaaacagaaaacttgagtgtggggcacttcaactttatctgcttcataacctttcaatggtttggctctcagaggcgatttccttgaaaggaattgagtgttaagattgtgccaacccataatggcatctgtggaaaatggagatcagtcgtggtcataaaatgaggaaatggcaaagttcatatccttagtttaaaatatcttttagtaagaacttgatattcctcttagttggagtatacataagtgagacacactttggtaaaaaaaaaataaccaacttaaaaaaaatctgctgatgaaaattgcctggaagagcattgttcgtatgttacagaggtctctaaacatttttgatccttcttcctagttaatttctttcaagaaaaccttctcaacacattttcatttgatttataagttatgtacatgtgcaactatactattatataacatgtacaaaaataaaaaatgaaagtgataatataaaatatatatgaagaaatgttttaattttttcttcctgcacccaggttgtcatttttggtatggatttttggagaatactgatatattgggaaacttattaaggttctccttgatttttatctaatcagtcattgagattagtctttcctggtacctgttgaaggtccagcttaaaaaaaatgtggagaatcctgaatggatatgaaacatcttccatttttagcagcgaattgaggtctcagcattagaaagaaaagacttcagattttaagttgtgtgtgattggtggttcttaatttttagaatgcttttctccctatgtactgtgaaatgtacaaagctctggagataggagcattgtccagttgcgacaccatgatatcctgcatgtctagcagcacctagcttttggaaagcatttgcgtggggcatgaggctatgttttgtaagcctttgtattttagctatgccagagacctggagtatttattatctgagctgctcatgttacccccaaaaaggtggaatcttggcagatctccattctttttcttgatgactaaaacccaagttaggtgttgacagaagtccagaagatctcagtgtgaagccgaactatgatatctggtactttcacatttacatgggttacactcccagctattttaagtacgagggatgatatagtttcttattagtatttttttccaccatgcatggtgaaaaactcatcctgaatcactttggaaggaatggaaagtttgagataacagaagtgccattcactctgaaatgttagacacccagactaccatttaaaaaaaatatagccatttaccaactcttatttgtgcagttggtggcacttccaatagattgttaagaatttctttttgctggtggaacggactggttgggggcagttcttgtagattcaacctatcagttcctttcatttatgataaagcagttgtgctgtacccataaagggccgttggaagtttctggatagatgtttttgtttggtctcatagcctatttggcaggagtaaagtagtctttctccttgtgtcccatccaacatgttgcattcagtatcagaaggactcttcagacctctgggaaggctgattggaggtgagaaatggaatgcgaattttctcagacatggaagaaagtattctggtctaagaattagaggtatgggttcatgttccagctctcctactatgcagacaagtgatcctgggtattttactattagtttccaaacatcggaatcagtcaagtgtcagaattggctgcagaatttttgtggacatattgattcctgggccttacctaaacaaatcagaatttccaggaatgaggctggacatttttatttgagatgaagttctcagcgaattttgtttttctcagctagccttttgcattttgaaacccctgtagcttaacccatacatgacataggtttctcctttgcccaggaggttaacactattgaaccttcctgtgtcttcactgtgtatatgaatatccaccactgtgcctcctggacataaataaattgtacatcagtgcaaacaaatactaggctttgagctctgtcaaccaaatgactatgatgaagattattttttactgaataaaaatgctacaattcctactttatagctcatgagagatttgcagaataaattatcttctctctccatccctgaaaaagttttttgagttctctcatttaaatggacattggctaaactttacaagacatatcttctgtggtccaaacttgcacataggcatataaaaagtagattccttgtatccaaaagaagaagcatgctcatggtttaatattattatttttaccactaatttttgaactgtattccagtttattggaccatgtttcagtcattgtgctaagtttttctatctattaaaaattttaatcctcaccacagtgctgagaggcagatgtattgcgaagcacagagatagactaactgggccacagtcacaagttaccgcacagcccagctgaactctgcctgaggagtggactaaaggaaacgcaaggaaaagtagaacattgctttagcgtctctaggtttctactgatgaccagagtactgtcttagaggactgtgatattgagaccaaagaccagtccctatgagatagtaaaagaacactggcatcatgtcaaaggtgaggggtgggcagacagatgtttggatgctggagcattgaatttaatggaatttctgatattgttaggtggctgacaaagatagaataaagtattgggatttagcaaaacgtcagatagttcagagcccatgtccaaaatacctataccatcacagagaagagggaggctttgaaggttaagaatgtaaattctgccatagaggtaggaactcaggtcacatttggtggccatctggtgtctgtatacctccagccactgtgctgaacactttaatttagtgaacattaactgacccaatccctgcagcacattaaaatgctgggttttggaaaagcccagagaggtcaagtggctcattaaagctcatgcagctcggcagtgactgagctagcccttgagtccaatcggtggccctcctcctcgagccattgctgacaaattcccagttctcaggggagttgtgtgcctggcttcagtgatgccgatacatgccagtaaaggcatttgtctctctgcccatcggctttcaaagggagctttctgatggtgagatgcccaccttcccatgtgggacttgatcagagttccgtagtctaggtaactgacttaattttaaggcgtctcagaagaattatgtgactgtggctttaaactctatgagattagaaaccaggtattcccagcacctggcaataactatttgttgaataaatgacctttacataatctgattaaaaggaatcagactcatggaattaggattatctagcgaagattcagcttcatggcctgggatgagttcagttagcttttaaaattaaatacatttggacatctctccttgtgtatcattagtagcttcagcatcacgtcctcgttttaaaaaataagcattgttgccacttgtaatgttctcacataaacctcaatttggagcttaagacattatgctcatttgtcctgctaacattgtgacatgcagatatccttgtttttgtctagaaggtgataattgcagattcagttacttctaagagaaagggatgtttagaagattgagagcaaagctgagaatctgggagtcatctttcacaatgtggaaatatcccgcagggagtgtgtgccatgaggcgactctaatgcttcctttgcacttttgggtttttttgcaggaagatttattaaaacactgtcaattaactgagctgtgctatatttatataactataaaaatatatttgctctattttttagtggggtttcttttcacttatactggtctacttcatacatacgtatttttttttcagacaggatatttcagaaaatgctttgaatgatattgttgtcgactttcacgtatgaagacttagtgcagttgataactagaaattttaatttaagatgtcttaagaatgctttactgttaattgaaaggatttcttcccccagtatcacagccaatgactcgtcttgagcagctaattagtgcgattattccacagctgcatttgctacagcacaaaggtttgcttctgtttttatcaaaaggatcagtctctctgggaatgttttaacctgacaggctttgaatagtaaggccgcttatttatttatttattttaaaataactgttccccccgcgcttccccccgccacccgccatgcccctcatcacagctctccttcttttcttggcttaggaaggtacatttgagctttgaacacatactctaaaatgggaaaatacatttttaaatgctcttttagtagagctgtatcaagtgaatagattattttaagtgagttagaataatggccaagtgcccttaatatgtggatgagtgcatgatattaaataatatgcaaggtattaatgctgttcgatttgtatgtgtctgtagaaaatgtaggaaaacatgaaggaaagagggtttgtgttttctggaatgctgagcacttccaagtttgccaatgtactggatatattcaccactttcccatcgtattgtcaaagtgttgtctatgttggattctgtcccctttcttctagccaaatggtgattttgatcactcaagtccttttttcatggtcttaaattagtgtctagaggcatatattctgccattgaaaaaatactatgacttctttatagttgaggggagtaaaatgatagaaagataaatttacctgtagttctattctcaccctggcaactatcgtgatctttggacattccctactaatcattttgcatacttggatacatgcatataccacacttatttcaaattagaatgtaaatatacttttgaatcctacttttaaattccctcttgttacatacatttcccactttgttctgtagttgcacaatttaaaaaaataggtagtattttattgaattcatatatgataatgtatttaaccattctcatagtatgggacaaattttttattattcatatattttgcaatttgtaaagagctttgtaatatcagtttttgcacatttaagttatttacttaggaaaattgtccatcacaacatttctgaatcaaattgtatgaacaatttttagctttttggtagtgttgttaagctgttttaatatataccagcaatggtgtagagtaacattattcttatgctttttgttgtcatagacagtttgtttattaaaaaaaaaaaaaaaccttggatcttaccttaaatactattttgtatctggcttttctaagttctttgtattgtgtagttttattcacatcagtaactatatttttacactagttttaatggttgcatcatgttacattttgattctctgacaatatactgagccaatttcctgttgtgaaaataagcgaactgttaaattgttattgtgtagtttttctgggatagcgtgagggtaaaaccaatacttcttcatcccctagcatgttttgttaccttcagagcctgaaggttcctgtctttaaggagctcatgaggatggtcaatgatatttaaggcttcattttgccttttattagaaggtaaaagataataccagagtttatattcaaggaaggaagttcaaagtacaaatacttacctcgaagcatgactttctcaagagtgaatattttctcaaatgttccttttcttctgttccaggtgctaaggttttgaaccgttgacctaaacacagacgttaaaaaatatatatagagagagaaataaacaatgaaacattttctacctataataatagtgacagcaaacatttgttgagccagtactacatggtactcattgtactagggcatttatgtgccttgttttatttaatcccccaaaatccctaggaagtagggctttaaaatatacatgatgctatagaaattttaaaagaacagctcccacctttataaatggtaagtgggtaaaaaactattgttatccttcttttccggatactaagacagagagagatttaataacttgatgtcatagagctggcaagataagttatcagaaaccatatttaggaaaattaggaagttttttctttttaatttgtgagtagggtttcagaattttaaactattttgggtagagtgagtaccaaaaccattagaagtagtcctcatggggaatgcacagagaacacattgtaacatagtagagggcatgccaaggtgaatcagaagaaaagacagcacaaagaaaaccagacagagaagtattggcttgtcagaccagctcgtcttctgcccccttacccaaagagcgaggtcgagttcagtgttaacattctggcccaaatgcttccttcattaattatttttacttattttatcttagaaaaatttcctcttggcaaagctcaccttttctttaatcaatatttgttagtaaacattttaggcatcttcaaagaacttagataacatgtaggagtagttatttggttagattcagttatacaaaaaagcaaatcaagcaatttatttttaaatgtggaaatttgggtgccattaagatgctttgcttcttggcagtgcatatggtggcgctatatttggtggtgatgagtagtgtgcagcataaaatgtaaaaaaaaaaaaattaaaaaaattaagccgcctgataaaaatgccttgatgcaatcaagctgacttattttaattcaactactaatgacttaaatcctgtcacctcttgattttcaattatgtggagtaccattctgtgacttgattatatttgcgcagactcattttatagtttggtgcaatttaggatacccccaaagtgcaaacgaagggtctcattaggaaactaaatgttgtatgcattttggttttcccacagcagttccgccgagcatcctggggcctccaagcctccgataagctcctccagtatgacatcacgcatcttgctacgccagcaactcatgcgtgagcagatgcaggagcaggagcgcagggagcagcagcagaagctgcaggcggcccagttcatgcaacagagagtgcccgtgagtcagacaccagccataaacgtcagtgtgcccaccacccttccctctgccacgcaggtgccgatggaagtccttaaggtacgtgagtgttgctcttgttggttggaccaaactctcttccattttccatttgctaggtgttttgtttatctgaatatgtattttgttagactgacccttcagaattatatttgaaaactccaactcccttaattcttacgtggctttatattttaaaagaaggatgcaaacgcattgtaactgtaatagtaacaatcagtaaatggtgggagtcaatgttccatgagaaattgcaagtaggaatacatgtttgttgtgatgacatctttctttgggaaagtttcaaaaccagaattatctgaggtgggcctcttctgataatttgtgtatcttaaatatttttctcttaaataccttccatagccactctttacttttctttttatttagtatgtaatattggttgtaaaatctgactgttttagagagctcttcacatataagattgaagaagagctttctgcgctttgataaccagactacataatccttttactgaagtgagttgtctgctttgggtctctttgatttcttgctagagtagaaactgcaggagcttgttagcatcattcgattagggacatatagcttcctaattactaaggaaaattgtaacaagtctaagaatagaattccatctcacacgtgtcttccacatcacatagggagatactccttgtttaagaataaacatttcagttcttaaatatgactgattcaaggaaagttaaaaggaaagtagaggaacttccttatttttagtttttttattttagtacctgctcacctaattctgaaaagtctcaagtgttactgttcattaaacaatgtgaactttacagaccggtgattcattattggtttttgcattcatccatgtgcacagaaaaaatgtctcccattatttaaagtttactattaaagtaaatagagagatgatgtgttataatcaggaatcaatctgtgaaccttaccaggaagtaggaaagagattctttaaaaaacaaatcaagagtcaattattttttatttgcgaagacttaaaatatagtgatgcaataatggaactcggatgaagaaaccaactgaaattgggttagggaaaaaagatacaaatagtttagcataaagttttactctaatgtgattgtttgaaattctggatattgccacagttaatggattttttcctctttctttttttacccgtcagttaactcaaggttttctctctggagtagatgatgcattgaatctttctgttctgcttgggtgaaaattgatatgatcactaagtttttatagatttaagaattatttaagatttatgttgttgtctcatgcctgcaggggtgataatcattgtgtataccttaggttatttaaaattgtatgaattaaatagtaacaagatgtggagaaatatgtctattttattcatcataatagttcacctttataatctgtagggcaaattttagaagagttgccatggatttgggctactagtgggttatatccaactgaaggtaatgttaaagaatttttattaaaatcaatattcctgttaaggcagctacaacagagaggaaattacccaaatgaaaatgtgttgaaacatcatttccagattatcttaaaagtgagcataatttctaaatgcttttgtcactgtaaatatattatttttgaaaatgattaaagttaaaatctacattaagttgtttgaataacataccaatatttttatatgttgctgtgtcctggtgacactggattgagctacaacccctaacttatgtatgccagaaaaatgtccaaagttaaagcacaaataaattgttacagctggacgacatactctaactaaaaataagtattaggtaaatttctctttcactctgaatatagttcctgtctatttaacttctgcttttttatatttcagttatataaactagtaaactatgtcatataaataaaaataaggaattattgccatagctatatggttaggtttgatagctatttagacaaattttggtattcttaaatgaagaaacaaataagaatacacgattttattaagacaatattttaagaaaatcagataacatttttaaagagaatatcatataagtgattgcttcagatacttaaagacttaggacttcataaatatagttggcttattttcaaaattttgtgtataaaagtattatgaaacattatagaaagataagtgagagaaaggtggttttttttttcttttttatagtttttaaatcataagcataattttgtgaagtaagtggttaatagcaaaacagttaatatgcttaatcttggaccatttatttctccatgaatatatattttcaaagaatggtaataccaagtatactaattgagtgcattatgatacagattatattgaataaatattttctcatagtatggcctgagtaaattcgcttaatttttaaaggtttaacttgctaaaacagaacatgcctgcttctcagtggaggtagatgtatacaattagtcacacttgcatgcactagagaatctggttaaatctctccgtctcccaagttgtttgtaagaaccagagggaagaaaggtcatagtttagttttcatacacacacaaagttaagttaccaacattctgctatctggatgaatgactgatttcaaaaagctaaagcagtgttttcaggttaatccctttttttggcagagtaaaatttaaaatatgaagctttataaagcatgtttaaaagttattgacatctggtaaacttaggactagtcagattttgggttagagatcgaaaatctgcaccactcattcctcaacgtatagtcattgtgccgtgagtaagttcatgaatctttgtaagattagcctctggtttctatattgatttaataatatatgaattttccttcatattgattttcatttttggggacatggaatcatgagtcttattgctatatatttacatagtaaagatattctccaagttttttaagaacaaccttacccaattgggtattgtaatttaaggatgctcttttaccataaattaaccaacacctggagtgcataatgcatttttttgtaatggtgaacacaccctgtattttgagttgtgaattaacaacaacaaaaaaaaagtcatcaagaaccattaatggaatcagtttcttccacaagtgggttttgctgacatgcaagtcatgcaaacctgaagtttgaaatttgatgtagcttttttcaaacaaaaacagagtaacgggacagaactgtaggtgagttcagccttatagctaaagcatcacggtacaaaccaccaagttaatcatttatgtagtcaccaagcatctgttttcatagttttgtctctctgactttgatgaattataaaagcactggtcgctctcatcctggactaagttcatcaggatttcttcccctactaccttcccaagatgggctttgacggttgaaagcttgaaaacattagtttacagtttgaaaatgtttctctgttcagaaatctgaagggagttgccaaggattccccactacctctgtctctccctcccttcctttcaccttgaaatttaaaattttaaaggcaaagtcgaagtgtcttctctggaacggattgtcccttgaatttttctgttctgcttaagggaaaggttgcatgaattttaaaaggaaaagattttttttattactttggggcatttcttaactactttgaaggaatttatttttaaattttcccttttctccaaatcatctcaagagttgcgcaaattgctctgtaattagtgatgatgcttgctgtttgtcaaatacagaagcactttttctgggaccttctacattgtaaactaaatttacgtgggcatttatttggtggttatctcgtcaaagttgcctctcatttgtattgagattctagcgaggtgggctggaagccctgctccttgttaccctctttcaaaaactgacattccatatttcactagtgaggggaagggttaatggctgaactactggtctttctctgtaaattatgaaatctgcatggagtagaattttcaaggtgtgatttattttttaggtataacacagaacatgaaaatgtgtgtggagttacaggtggattggtgggctacagattggcaaaagggacttctcccacaacctacccttagattttgtttctggtttatttagccaggaatacagaccctaaatagcatcatggtggctgcaagaagccagaacagatgtagtgtgtctcagatcagcttgcctttgtcccctcagttaggggatctgttgctagaggtgtcactctcataaggtgaagacctgctatgtctaagatttcttcttatagcatagtccattcacacatggaccagcatatacttatgacccttgtagtttgacttacacaaacaacctgtcagccttgatttcagggatcatttataaacattgttgtccttttgtttttgaatcaatgttggtgtctgcaaggctacatcctcattcagggggagaaagggactcagatttcaggtcaacagacagctcttcattctcccagaaacctcatttccctgcagaatctgaatcattcagtgtcacacataaggtaattttctctctctttaaaactcacgttattgactttttaaattgcagataatacttgttaacttttaacagatttaaacaatgcagcagaatagttcaatatgaatctcaccctgcctaccaccgcctcccttccgtcatgttccctggaaggaacgactgttaacagtttaggatgcagccttcctgttattttctgtttaataaccctaccatcagttgccttttataggagcgaggtctgaagaaatatgttagtcactttttatcaggtagacataaaccctttatttttctttgttcatatttgcaaatggaacaaaaaaatgtataatttattttccttctgggttgtctctatctttaagaatcccgcttcaaggtccactcttccctatgtgcagtgaggacttctcaccctgtgtcttgagagcagtttaattggttcaatgtgtaagtatgtaccagcttgcacggcactgagtggcagcccctttgcttcccaggctgctttatgaacacttgggggtgaggatttagtgatctctgggctgacacaagaaagtgctccatagagttgtcttacttggtaaagtcaaacttaacacaggctcagtagtgcaagaattgcaataagtgcaagaatcacagtaagtgcttttggattcatgttggacttggtttttctgtctgcactgcttttagtgactagtagctagtaatgaaatgctggctgcagaaagtcatcttcgcttaaatttttaggttttatctacttaaaagagcagaccgatgagaccaactatctgaaacaaaatattcagcctttacacaactaagcctatgaattaatcccagtttctggaaacattggaacttcagctctaattacatgttcattgggcaatattggcacagaatggaaatgatttctccctttatgaccacaagggcattttcatgtaactgaggggtacagcacaatctgggttttgtacagcacaatctgggtttgatttcatcaggttgtggatagggcctgatgtacctggtggacacttgactagtagctagtaatgaaatgctggcagatacgcaacatggcgctctctctttaagtaggagaatctttgccatcttctccatgagcccctttgcaatcactgaattcatcctgtgggtttcaaagagaagagacacctgtttggctcctcctcgttttctcctgttagaggaggctatactaataggtgcagtctcctttcatttacacagttctcataattccatactgccagaggtgaaggcagtatcataaggaaaatattaaggtctggggcctggaagtgagggctaaaaactggagtgggcctagtgtcatctgactctgaatggtaatttcttttttaatgtcatgagaccagtagaacgtgcatcctcaacaggggcgaagtcactccccacaagtaggacaaaaatggattgttggagggcaaaagagtcttagatgttacaatggtttctaaacctccaaagtcccagtacataaaccgataaacagtatatgtgtcttttaaaattttatggtgatggggatgaaggagaagcaattaggggaaaaatgtcttaaaaggctttttattgggatactaatgaataaaagattgagaaacattcctgcagaggaaccagcatctttcccaattctttgtgttttgtttagggaccatttgtggaggctcctatagatgtgatgcctatattctgtctggtctgtgtctccccaggaaaactgttatgagaacaatcatgatcagcaagtgccagcattgaactttacctgtattgactcatttaatgccaccattgctctgtgaggtagttattattagcatccccatttcacagatgcaggaactgtcacagaggggtcaactaggtcatcagaaagtcacccaagtaggtggtgcagtcaggatttgaactcatatagttgaactccatgggccactagtggtaatacctctcctggagggaatgacctgagaaacattaggagggagagatagcaatgttcagcctctcaaatgacacggtagcttggggcttgtagcaaatgtttactacagagcttcaatccatagcttaaacttttataggaattactgatgtgaacgtgacactacctgaagcaccttggaggaggaaaggcaattgtgcctccttgacaacgtggatattaattatagggtggattggatggtgggatgaacacttcaggtcttttagctcatttattattttagtaaccttaggaaacaagtaggataagccttattttccagatagggaaactgaggcttagattatcactgatccctggttacatagactccacacactaccttatttgcttataagcacacatcctactgtaaggacatgctctaaacatttctaaagaatcaccagtaacagaatatattagagcaaaatgggaggtcaaagagaaactacagaggagtctcacaggcttaacagaaagatacatgagcttaagcatttgaattagtaaggggcttccctattgaatagttaaaatatcctcatgagtctccacaatatgccagatgaaagaactggatgtgtttttattatataaaaaagacttcctggccacattgacccccgtggtaatttatgctttattgatagtcatcattatgggttaaaaagcactacagtgaaagtttctataacaacatccaaaaatcataactcaagtcacttatattctaaagatcttgatggtccatgctattacaattcatatgctttatagttctgagtatttactaatatatttgcattgttttagatgatttttgaaataattcagtagactcacacacttttgatatcaattttcttctgaaattatgtttgcatttttggtttttcctttcccatgcaccttgcaatattagagctcttgccatattttagcacttaacaactggaacttcatttctggtggtttttctatttgcttttaagtaaatgtcagtggtaataaatcttctattactatattgaaaaagtcatgagtctccttcacaaatattacctatttaatcccaacaattaaagaaaggacttagctttgaaagaccacttaatttgaaagactcttcagttagcacgcttttgaacagagattgtgaacatgtgtaagcaaaatctaattttaactttgctctactaaaatcggtgggtgtgatctgtgttaaaaatatgtaaatcagtacagtggcttcactcaaggttataactgcaatcagtactagaatattggctcttgccctgaatgtgtctccttttattgacttctttgaggatcagcttgaacttaaaaaaacatttagctccagataatataccagttattcagatcttatttataaatttagatgttttttgtttagtaatttataactttatgaaaaggaaatgaatccgaattggagcatatgaatcaggtaaagcagggggctgttaaaggagagaatggtcctaaaaaagaaattgttttaattactctttttaaaaatagggaatgtcctagaaaagggtataggtgaatctataccattgtttctaccagctgtctctggagtgagtattgggattggaagcggtggtggtcaaaggctttatcattattattatgatttttactaggagagcatatgcatgcattctttatgtaaagtgatgtcctgatgcattttatttgagtcacccacaactttttgaggagcacagttcttctgtcaggtgtaaactcaccagtttactagacttagacacattatgtaactctagtggtctttcctagaagaaagataacaaggtgtaggaatcctgcaaattcaaagtgagcaaaaggatttcaatcacccggtcgggaagtaatttttaaaagtagttaagaggcccaaaatgaaaagcaaaattcagacttctattaccttactaccatgcataactctgttgtaatctcccctgttgggcctgggttttgtataattaaaatttaggggctggaaattttgttgagccttaattggaagtgacaaaccagagacattcctgccagttaggaaaggcttaagaaattcttattggctaaattacaaatatgtaacattttttctgaacactgcatggtagttcagactgcctaaaggtgacaagattagctctgtttttctagtgaagtagtaaaaattagattaataagtaccaggcaaagaaccttttctttttttctttttttttttttcttttgaaagaaatcttaccttgagtacttctggctgtggagatcggtgccttaattagccacatgttctttttacctcctgggaaataagtacgggataaaattggggatcaagccgtagacgtacattgacttagcacacgccgctaagtaattcatcaaggaatgttggtaattagtcctgcctctttcaactcttggcttattttataaaaccggttgatttaaaataatgcctgctgatttattacccacacgtttcaagactggtacttggctcttaaacaaaagcaatattgtgcagcgatggaaatgcgccctcttgtttttgtgtttttacaaattctgaagggccatctatggcccccctattaactttgttgcctttccttttgccccattcagcattttactgggctttcttttctgtcttggtgaagagaaaaggggaacaaatttaaaacaaaaaacgaaaaaatccaggctcttagagatttgggatgtgaggtgcttgtcaaagtgtattggctcggtgtgatttgatggaatttaatttgaatccttcgtctggtaagacaggctgtagtaatagcctttggttttttttttttttttttttttttttgcattgttaaatgtttggtgatatttatggcagccaggctaatcttaaaagaatgaatttatgagaagcacagaacctcatgacttcagcctcttacccttagtatccaagcactgtagtgcattatagtttgaatgccagattcccattaatgctaactgatggacctcattatgctttgagatgagaccttaatcagggtccctgttgaaaatctacgattaggctgtctttgattcataactctgtgaacttgggcacatttcctgttctctctgggtctcagtgtcctcatctataaaatggaggtaataatactcgccctggggagtttttgcgagagttaaatgagataattcacgaaagcagtgctgtctgatagaatatgaaccaagtacataaattcaaagtttctagtactctcactaaaaatagtaaaaaaaaaaaaaaaatagtgaaactaattttaatgtattttatttaacccaaaatatctaaaatatcacttcaacatgtaatcagtataaaaattattaacaagatattttcacattttttcctaagtctttgtgctgcctttaaaattgcatgtatattttatacctccagcacatccccaatttggacactaaattttcatcagaaaatttatttgacctgtgtttagattttataaaatgtataattgaaaaagttagattcatatacctaacttgtttcaaacgtattcaaaagatttccaataaataaattgaatatgtctttagatttaaattaaattatatgaaaagttcagtctgaatgagtctgaacaagccacatttccagtgctcagcagccacacgtggtctttgcattggacagcacagaactaaggcattagccaagtagatggaaagtgctcaggaaaggattctgctctactgttggtaataataaatcacataatgatttacaattattaatcacacgaatataaaaattattatcttctctaagttgccatcttcatatgccactattgtacctacaaagtattactgttttcctactgcccgccacaaagaaaacacaaaaaaattagtcattattttcttgctcattatttggagcccatgttagctgacatatcttatgtatggttgatatttcctgtcaaaaacagcctcttataggagaaagcagcaacgagtcacccttggtaacatggcattttgactcatctctgccaatagccttccattcagacttgagcatggtgacagccctcaacttgttagccacacatcttactcatactctcaatccaggttcttttcaaacctacacatatcacacttacatagcacctgtccggtgtgttaaagatgtctaaagtcttgcgaatatatgagcatttaatcaatgttcttggtgtgagacagacattaggggacaaggagattagttaatcatacattgttctttaccatacattacatagattgattaacatgaaggatattgaaaactaggtttttttggtggggttttatgtatgatttttatttgtgctgatgtctctaaggcaattttctttcttagttaacttgcggtatatttttaggaaattatagcacagctcataatgcaatgaaacagttctttagtaattcattagataaccaagttttctgttttgatagtaattttcaaccgcttattaaaccagaaataatacctaagtgataatttatattttgttagtcaccttttcattcctaatgcaaacaatgagtcaattatattggaattagtaaactgtgttagagagatttaatgtgttcttcatataatactaagagcctataaagtcacattcttgtgcaattacaaaaagcaagaaagccaagggagcaaaaatgttaaccatgctatgacctccagaaagaaaaatcatcacgttgtcagatttcatgatttccttagtttggagttagatctattttctgagtctgtattaatctcaatattttcttattatcttccattaacataagttaataaactttcaggccattgcaaagttgatttcagttttccagtagctttccaggtttgttttaaaatcacatacctaaataatttttcaactaatgaattagaagaatcttgatagagctcataatacaatgttatgaatatgggcaattgtgaccatttttattgacacctgggactcccaatgtctcatagagagggaagacaaattgaacattctgacaagacatttaattttgatataaaatctctgttcatcagtttgacatgaagctaagatgtttagaacttaacctcaaatggtggaaagcattgtgtaactcaggggttctcaaagtgtgctctggaacctgtagccactgcgtcccctgcgacctcgttagaaatacagattccctgtgcctatcccaggcctactgaaccagaaactctgtgggtggagctcattaatctgtgttttaaccagccttctgaaagattctaaagtatgctcatgtttgagaatcactgctgtagaaacctggaggttaatttgtaagaaatgtaagaaaaattagaaaatgcagaggcaaataaagtcaaataaatttctttactgtagagcctctgagatcctttaacatgtaaagagttatggcaaatctccaacagtggtacagtgggcaagcactttgagaagaaaggggaggagtaagacaggcaaaggaaatgttgccttgagttgctcagtggaagatgcaaaatacctaatagctatttagggtatcttgtacatgtggtacattctattatgtgcatatatttatgaaaagtttataaaaataggttaattctgtcaagtcttgaggaggtgaattgaggataagaaaacaataagaaactctaaaatgacttgctttagcactgggcctttccaggaactctgagggtcagtgaatccatttgtccacaaatatttgtaaattaaatatgtatgtcacatatgtaccattcatctcttttactaataaatgtagatgctgctatgataaagtacaaattgatatcagagctctatgtttcattttttttcttatttttaggcattttcctgatcaacaaaaaccaaagcacaactcgtaatcaaatagggccttgaaatatttgacttttaaaaatgattgaaagctacttaaaaatattattttttgttttttagactttattttttagagcagctttaggttcacagctaaattgaccggaagataaggagatagccatttatccctgcccatgcatattcacagcttctaaccccagagtggtacatttgctgcagtcagggaacctagattgacatatcattatcacccaaagtccaaactttatgttagtgttcactcttggttttgtgcattccatgaatttgggaaaatgtgtaatgacatgtatccaccatgatagtatcatagacagtatttttactgccataaaaatggtctgtgccctgctttggttgctcctctgaagaaaaaagccacttttcttcaggaactgtgttttagctatcaagagttatttaaattctacttttagaagctactctttttacaaaattggatttagataaatggtagcacaaaatggccctttcagagtctgcagacccctgacatctgtaattcccccagcagtaggcccttcatggtctgtctctgacatcaaaggtctttctactgacgtggctgtagtcttggctttgtcttttacactggggcattgacatcaagagaaagtgtttttcttcctttctcctttctttttttgtattggttttctgcctgaaggcagtatatccagtgcatgtggccatcctgccctttctgttgaaataaaacaaacggtcattttaagaagctccatgggaaagatcaactctttctgatgctggagtccttaacatgcacgtccagcacgatgaccaagtacagccttaggtgagatctggctcatatatagccatgaagtgcacttttcttccaccagatgatactgattgccttctcaccttcttacctccctttcatagttatagtccacctagtaagagaagaaaaggagaaatcaccataagatatcccctgaggacttctgcactggatcgtgaaccttgtttcctagacctacttttcttttctgttagggtttgcatttttcaattaaaattcattcaaagaactcctgcccagaggcatttgattatgcctacacctgctatctagttgcagtgttgaaaggcatgggctctggagttagatcgggcgatatccatatgttttctcaacctgaattcccttgtttgcataacagagataataaaggtccctagctcataagcttgctctgaggagtaagtgacatgatgcttgcaaagcacttagcacggtgccaggcgcaatactttttaatgctgatcactgtcatcagcatttcaaccagagacacacagtccacagtaattgagccacataatgggttcttgagaagtgactagaaggttaatgctttggtaaaagattaggaaagttgattctacctatgatctagaattaatttctctagagatgcatgggatgtgtaaagattcttttaatcaattactgttgaattacattgcagcagcaaggaattttaattcttaaaaactacctggctatgtagattcctctaacagtaatttttgggggataaggagtagtgagatgcttggccacagtttttaactttcccccaaattacacccactacataaaagacttatatgttgtttttaatgattgacagccaaattaggcagctgttaaatccttacttatagaaaattctgtggaaagtggtaaaaattggggttaaagtttcaagaaaaattaatagacatcaggctatcaaaatgtttcttgattctgaaattaaactttcacttataagctgagaagccaacaattttggttctagaatacaggttacataggagtgaccatatatgattttattaactgttcacttttgaaagccttattattttggggaaacttgaaggttcaaaatacatttaatcacagcctttcgcccctaagccacagggcctacattgcagaaccagtcaactgatgaaaacaagtgatctgtgttcagagtgttttcattgctaatcaagttgcataatcatttttatctagtctctaagtgttttgattcatttgctttggaattactcgacttcttccttacatgatatgtccatttaattttattggactgcgctgtgctggctgggcacagtggctcacgcctgtaaccccagtgctttgggaggccgaggtgggtggatcacctgaggtcaggagttcgagaccagcctgaccaacatgctgaaaacccgtctctactaaaagtatgaaaattagccaggcttggtggcgggcacctgtaatccctgctactggggaggctgagaaaggagaatcccttgaacccaggaggcagaggttgcagtgagccaagatcatgccattgcaccccagcctgagcaacaagagtgaaaaaaaaaaaaaaagactactgtgctatcctaactcctccactccaatctctgtaatttatggtacaagtttaatttttttattcatttgtttatattttttaccttttagaaacatgtcaccttgactgttctgtagtcagttctaactacttgctgacctttatttttgctattaaaccatttatcttccattacatagactatcttcagataagaccagaggccattctctccaaccagtcttgcaaagttcactacttcacaattgatactgcaaccatgaaatcaaacatgcctctgcatggacccctagtatgacccaggggaagttgtctttctgggtgtaggtctccccatctgagtcgtctcagacttccctcctagcctggactttcagtgaattatctcctttttcctggagaatcgcccacctacagaccactgaagtttcatttgtgataagatgaaggtgacaaaggactttaaaagccttgaaagaaacattaggtttattttaagtgttagatacataaaacagttgtaatgataaagaacagcagtgtatataatacttacagttccactatagtttaagtcaccagtttctccttgagggtggcaacaggtgagttgagaaaagcctcttttttagatacgctattattttgtctaagtgtgttttgccaattataataataatgttaatcctggttatcacttactgcattcctgagacttttctgaaggtcttttgcgtagagattgagcacagacttattcagaatagatggcgaggttgtcaactaaactgccacgagtttatttacacaaatgtcctaaagtctatattaaatatttagttctcaagtatgctaaatccctaatattaaaatttatctctgacacaatttttggtcacaggatgttctatagctcttattttctttcccttatgaagcagaaaacaaataaaggctatggatgcttttttatgttcagtcagtgggtataggacaggtgaagggggatttacaatgtgactcacttctataaatattttgctcactttccttcagtttatatattaatactaattttaattcattccttaagagagaattgtggagtgtttgtgtgtgtgtgtgtgtgtgtgtgtgtgtgtgtgtgtgtgtatgtgtgtgttttgacaatttttctcttaaagcctttccattttcactgatctttcaacttttcctcttttccatccttggagaatacctctatagatgctaacaccccccttcccctatttacctccctccctcgctcactcctttcctccccctctctttctccttcctgccttcccttgaatcctagctctgtcctttgataaacttgggcaagtgacttagtctaaaccttagtttccacatctgttgcactgtgtttctttaacatgaaaacctcccatgttgttggcaaataagacagtcatgtcagtataacatgaaaatccttttggttcatttcccacagcatattaatgcttgaagtagtcaaagacaagttttatcatatttaaagagaaagtcttagccctagataaagcattacttggctttccacagggctctgctctctggagaagttgagaatacagaggcagcagctgcagagacaatactgtctgtgctaacacaggacattcataaagaaggctgtctctgggatcagattttaattttttgaaaaaggatcaacattagaagcatctatacttgttatccgtggtctaccttttgagagaggaagcaggagccccagtgtttaaggctgtctgggatgctagctgcagaatccagtagaaatttaaccagctgatgctgaattagggtttactgattgttgttattcgtgctccggttataaaggtgcataggttttgagggatctgcccccaatcttcttttttcttaatatgccctgctattcataggtgtgatttttgcagaacgtgatgttttccaggactgtagaaatggagttagagcataaacacctgaaccaacctcagagctgtaattaaatgaattcatgtatgtaagtacctagcacagcccctgagctggttggctttgattggagtcttgaaggacaagtaggaaagggcttaatcagtatcagctagtactgttgaacccttcaaacattgcagttcagcctcagaaggtgagggacgtatccctgtagtggtttgtgttgagtggaaacttgaataacaagtagggttatacccaaaagactaggatgagggggcatggcacatggagagaaatgaagcaacaatacatactctggattttggtgtgaagcagtgaaatgcaaggtagcagaaggtaggactaggagggtattgggaactgaagctagatggatgagcaggggccaggagcttgggtctgatgcagtcaggattgggtagccatcaacagcgtgtcttcattttccttttaggaaagaagaaggtggttaaggtggacttctatgggagctggtggagatggtggcgttggttttggaggaatgcagttggaggtggggaggcgatcaaaatgatttggggaatgagtgatgaaagtgttggctccagaagacgtaagaagaaagcactggttaaagaaaattaaggagtaaagtatatggaaccttgccagacagaaggaagaaggcataatactataatgctttacagagaagaaaaactgaacatagtagagcttaagaaattggtctatattgggagttgacaaacaatgtccatgggccaaatcctgctaccatcttttttggtaaagttttattagaatacagtcatgctgatttattttcatagggtctttggttcctttcacactacaatgacagatttaagtagtacaacagagaccttgcgcccacaaagctgaaaataattatcctctggacatttatagagaaagtttgctgactgctgatctgtgtgtatagctagtaagtagacctgggattcaaatcttcgagagttgggatcatatctcttttgctcacttctgtatcctgggcattttgcattgtgtctaacatatagtaagccctcataaattaacatttattgaattaacctacaaatgaatgaatgaattaataaaatcacaaagtcaagtctacctgagtcacagcttgtgctagtcattattattctgtactgattcttacaaagatgttgaatgggagttgatatacaaaacaaatatatttattgagtgccaacaatatataaggcatgttcttcgttttaggatacagtgaaaaacagattttcatgtgcccttgtggaactcactgctaacagggaagacacatgttaattaaataatcacagaaatgcatgcacagtttcagcctcaacaggtaccagacaggagaggggcacagagttttgagagctgccaatgggaagatgtgatgtaaagagtccaagaagtctttcccctgttcacctgtcttgtgatctgaagagtgagtgaactttagtttaaaagggatgtgggatgagtatttcaggcagcaagcactgcatgtgcaaaggacctgtgtcaggagagagcaggcaagaaacaaagagaaggttggtcttgctggaggagcaacagcaaaggggatcatggtaaggactgaggctggagagataggcatggggtcttgtgatcaagatagtgaagtcagtctgcttctagagccaagtctaaactagagctgcaagtttgggactcagtaatagagtaagtattgtagttaaagaagagtattgtacacaccagagagagggctgtgagagaagatgtgatccttgagaagtactctggaacatgccagtaggacagagagggagaacctatgaagcagccagtaggacagagggggagaacttatgaagcaatgtaaaaacacaggaacaaagcttggagaaccaggatggtaaaggttttgaaatggaaggttatggcatgcatgtctaggattgaaaagtgtctattgggttggtcttttgtgtgatcactgtgaccttggaaagaacaggtttgggagagtggaggggaatggctggagctggtaatttgttgaatgaatgggaagaggaaatggaaacaagcatttattcattcatttacccaacaagtagttattgaacatctttgtattagggatctaatggtgagtgaaaacacataagatccttgttctcctggggcttactgttaagtagagaggtgggtacttagtcaaacaatctccctaccaccacccaaaaagatgtatgaacactaaaggctacagtaattgctgtaaaggaaagaaagaaagttttgtaggaatatgtagcagagaacgggggaagtgtttgggccgggaagagttctccaactaagtgatcttggagctgaaggaagcataggtgtgagctttgtgaaagctgtggtgagagaaaatttcagcaggtggagaaaagcagatgctgagaccctgcagtgtcagagagctagaagctccaggaaataagaagtgaggtccagagtggttatgtgtgaagagcagtgatgagaattgtgcactacaaggctaaaaggtgggcaggggccaggggcctagggtttaagctcccaggacttaatccttaagaccatctaaaggattattgtctttattttaagagcaatgggaagccatggaaaggcatgggaagccatggaaaggtataggctaggggagccacacctgggttttaaggagtgtagtctgctctttgcagagacagcgtaaacctgttagacctttctgaaccaacatgggtacatggcacggagaaggattctcatctcagggggttatcattccctcttctgagtgtggagtcatctaagctcttcagaaaacctccagctcagatataacttatgcctgccttggcagaagaacatgaaggtttctcctaaaacccacttggaaaaaattcttttttccaagtctccaagaagacttggagaatgtcttctaaggactgcataagctataacttcaggagacatgaatttctgggttaaaccaattgcaggcaaaaagaaaaaagcataggcaacttctgagataaatgatttcaagggctttaggcttgagttacctctgagtgatgtctctccttggggtctgccagggcacatgatacagcaagtgttttagagacctctctctataaaagccattttgacccctctccacttatgcaccattctgtcctcagatttgatgaatagagaaagctttgctaagaataactgacttgctcagtacctcttaatattcaaagaagtctttgcatattaggaggacttgatttctgccgagtgggaggggtggggaaataatagattttcagggaaggtaatggtgggccctattgggagtggaggcagaaaacagtgaccttcctggtcacacttctaatcacagagagtgggtgaccctcccctctgctcccagctaacacacacctcagccaccctgttgcagccggtttatttttgcatcaataataaccgtcctccatggaattaaaaaatcgtgatatttccctgtggttcttgcctacattttcctgtttctgaaccaaccaactctcttccttttgcttggagagcacatccttaattagttttgcataacatgtgtggtacaattacctgaattccttctcctccttcttggccctgtttaaccaaacacctcccacgtctttgttctttgtgctcatcctgattgactcatgaggtgacactggctgacacttggcaaaccagtgaccttctttttgagctagagttgacaaaacctgatagaacagggtaaaaagggggaggcagaagcctgcagccagccctttttttgttaaggagaaagcagcatgggtaaatatattaagaagaagttctgctttgaatactttgggaatatttgacaaaattatctgttgaagaacaaaagtaacatgtttaaggcaaataaaggatgaggagcaatgctcaatcaggaaaaatgaggtagagggatagagtagtgattataccatgtctattttagagatattatgtactttatgaaattcttgcatttgttaactattaaaatcagaagaatttacctggaaaagtaatagccagggaggaaaaataggtttaacacaccttgagcaccagaagctgtcctatgttcattttcccagaaacggtgttttcaattaaaaaacaaaacaaaacaaaaaaaacctatgaggatggaatgaggtatgtgttaagtgaattgagcagtttggaggaaggttgctacagtataaccttttatatttccatgacttggtttttggttgtaatttcaagcagtacactcctagaccagctagataaaaagaatggccctttaaccaaataatcagggataacgaaccagtgtgatttttcaaaaaaaaaaaaaaaaaagataaattttaagtcaactttgctactatcagtgttaaaattagttgtatttagcttcatttagagcccttttcctaaatatagtgtgttgttaataatgcaagtgttttggctttaaaaattaccttttataacaatttttactatttccattttgccaagatttagataattttcatgggtttaagcataatcctttaaacttaacccaagtttttagccctgtcaccctgactctatccttctgttcatctcctatccctcccccaatccccacacttcaattttctttaagattttgttagagtgcacttagagtgactagagtctgagcccatggaagtttcctattgcttatttttctcccagtggcacatggtctaatcacctattagagcgagaatagttggtcctcccctccgagtctctccacagttctgcatagattgcaaccagatgatgacattaattaatatggcgaattctgaaagcaagcatttaaaataaccctccctgtctaattcagagatcacagaaagacttgggcagtactttgagccttgacgacatagcgtgtgctgagcatggcctcccttccctatgtcatcaagagtccatgtagtgtaggcaattaagggacccatttctcccagcatgtgtcacccttgcaattggaaagtgtccactattctgggcctacatggggatagtagagggagctggcttagtcaggcaaagttggggcaatgggtagtagtaatgtgatttgctttataactgtttgctttgcattggcaactgagctgtggccacactccaactggcagtggagatggaaccttaattttagattgtgtccctaatgtttggtgaaaataaaaatggagaggtgaccatgagttgacttgagactttttatatgtgagtcatagtatctattaggaagaattgcattcatattatgtaattatcctttgtttagtttttctttttttttccagtaatgaataatccttatcatctcttttgcatccttatttatttttcccatttacataaattaataaggccatgacagctaaccccatactaaatatatgtatacttgaagcttgctttgaacttcctgaaaacatatctatttggcttactgttgggtccccagcacctaaaatattacaaggacatatgacaaactccataaatacttcttaaataaaattgcagtttaattcatgactcattcttcaccctttgattcttatgtttgagtgacctagctgtccagtgggtttgcatggataatttatatgttcctccacatgaagggataaatagatagctcataggttattctggtatagaatagaaccctttgaaaaccagcctgaggctctttttccttttttaaaaaattagaatgctggtttcatcttcagacaaaaaatactacttttaattactgtgcagtctttagttacacccataacctctgggacactgagatggtaacacattcaattctttgtctttgacttggttattaacttgcgtttgccttggttattgttagcccatgatatttagggaagtacctctgaaacattttaatgtctgcctttttttttaaggtaaaatgcagaaaaaaaaacccaaataggtttggttttgaattttaaattactttgtattatttttgttttataaaaatatacagtaattagaagaatgcaataatgctactttctatcgtgttttattatttcaatgttgtttgtagaggttgtaagctatgatctctgagtcttcaaagagtttgagaattaaaaagaccacaatctatgggttttatttttaattattatgaaaccatagagatgaaaatgcaatgtgtatcataagaacaatttttctctatgatgtggattgagtttgtaattgagaatagtgattttcaaattagctaatctttggactgctctggtgaggttttaaacataagaatagctaggtctagtcctagaatataggaatggccttgtaatctgtatttttataaaatctccctgtttatttcagatggtaagcacagcctagtttagaacattagatcaatgagctcaagtcatgggtatgatttttcagttggcctattggttgtcctctgttctgtgacctgagaccttcttctgagcctgactaactatcttgcagatggatgttcttgctgtggtgtaggtaagagagtgtggacaggggaggcattgagcctagatccagtttaattaccatacaaatatcttaggtcatgaggtagctagggtcatcttctctaagggcagctaatttctttgcttatgccaagcaacagccttgtcactgggggcttttttcttaatttggcctttttaaaaaaaaatatcagcaagaggagtgttgttaaattgccaaccaattcagactcactagtcttttccagtatctactggagctaaaattcacaaacccaactcacttctagaaatcatagcttctgactctgcgtcagcatggtgggtgtttgggcagcaagtgagcagaaggtgctgggatcagattgcctgggttctgactctgctgctcccatgcactggatgtgcgacttggaagcaaaattacttaacctctgagagcctttgtttttcccgttggcaaaaaggcaataacattaatactaatatagggttgtcggaggattatatgagataatgctcatgcatcaaaaatggtaagcactcaacacatgtcagtggctggtattattactataatttttaccacaaattctgaataaacacgtctagaaacaaggtattgccatgattagcttgaaccagtatcacccataatttttttattaattattgcctccctttgcactctctgggatttccattcatttatttcacaaatacttatttagtacttactatccaagcagggtactaggcactggggatacactagtgaacaaaagagacaaaacataaatgatagtttaaaaattgatgcttcactacattttaacagccttaccatttaaccgtactgaagactgagagaactgaaatgtttgatcatatttagattttgtgaatttgcccataccaggtactgactagcatgaaaaatagtgacagaaatgctacataatttcttccgtgtgtcttctactggtctgtccttctgtctctatccattcttggccaaatcctgcccacccaataagacccactgaaacactgctttccatgtgaagtgccccaaggttttccctcctggtccctctacctctctctcctccaatctctactcactccttccgtagaatttggcttgtattccatgtatagtctgtatcaatgtatcctttgtattcccattagttattttcacccttataaaccataagtaatgtgtaggaccacatggcttctacatcttgcaggcccctggctcttaagaccgtcccaggtatatattaagtagtcagtaggatgcagagttcatagacagagaaaaaaaaaatttagtctacaagtgagatttttctctctttgctcctttgtaaaatgggaataaagagtacccagctcacaggctggtaggagtgtgagatgatgcatattgttggagatgttagcgcaacccattcacagtacagtttcaataatagctatttcttattatttttaaaagttttattgaagcataattagcatataataaagtacacttgttccaagtgtataatttgataaatttagacacattatacctctgtgaaatgatccctacaatcaagaaaattaacatatccttgtacctctttgtaaccccttcttccttcccagcttggccctactccccttgtccccaggcaaccactgatttgatttgtgtcactatagatgagtttgtaatttccagagtttaaaaaatatggattcataccttttgtagtttcttgggagagaggcctggcttctttcactcagcataattaatttgcagttcagccattttgtggcacgtatcaatatctcattcctttatattgccaactgtattcttttatataggcagaccacagttttttttatccattcccctcttgatgagcatttgcttttttttttcagtcttagaatattacaaagttcctatgaatatttatgtacaggtcttcgtgtggattcattctttcatttctcctgggtaaatatttgggagtgaaacagctgaatcatatagtagacatatatttaacttttagagaaagtgccaaacttgctttcctaagtagtcttgtcatttatattctcaccagcaatgtatgagagttctatttccttatatcctctcccacacttggtatggtcagactttaaaattttttgttagctttatgtactgatgggtgtgtaatactatctcattgtgtgtttttttttaaatttgcatttccctaatgactggtgatgtagagcatcttctcatgggcttatttgccatctccgtattttcttttggtgaagtgtgtgcaaatcatttgcctgtttcttaactgagctgtttgtctgtgttttgagagttctttatttgttctggatctatcatatgctttgcaaatattttctcccagtttgtggtatgtctttccattctattaatagtgtcttttgaaaagcagaagttttaaattttgataaaaccaagttcattggttttgtaaattaatcatacttttaatgtcatatttaagaactctttgcctaacccaaggtcataaggattttacctatgttttcttttagaatgttatagttttaagttttatgattcattttgagttaatttttatataagttataaaacatgaattgaagggttttttgtaaatatggatgaccaattgttccaacatcatttgttgaaaaaactatcctttttccctttcattgcctttgtatgtttgtcagaaatcagttgattatatgtgtgggtctatttctagaatctctgtcctggtctgtttttcttccttgacaccaataccaaactctcttgattagtgtagcaagtaagtcttggagtcaagtattgtctgacctccaaattgttttttgttgttttttgtagtaaaatattatataatgagtaaatagttgtgtatatgatgtcaatcattggaggtaaaactgaaactttgctttgttgctttggttaataagtgccatgatttgtcattctactagttatctttctctgaaggtgatttatctgaagcatttcagaattttcccaaatagcagagggatgagttatatgcaagtgtacttgtataatctttaacattttctaagtcttattttacatggtctttaatcctgtagttatttatcacttcggaagtgacttcacagtacatgtcacaaggccaattaaaccctggtagattctgaagtggattgtaggatctgtccaggactatgatttggtttttgtttgtttattgtgtaatatgcccagatggagagcatctagaatggagactagcaacctatagactgttggatgtgaatgaaaataggagctgtcaacgcactccctttctgcttctttgaccacacatctacaacaaaaatagcagctttttttaattggctacttaatatatgctggtcactctgctaaatactttatgtaaattgccctatgtggtacttacattgtccatgtgaggtaggcaccataaatccttgttttgcctgaagaaaggtttaacaagttacccaaagctacacaaccagaagtaatagagctagtgtttgatcctctcccctttccctccataatcttgtgttcctaatcgctatgctacagtacctttggtactaaagaatgaaagggattcaaacttgaaatataacgtaagtcgtccattgagctctggaactcctactttctatgtccaaaactttcctgtctatgatttcttctgaatcactggatgaaaaagtcatgtgggttttagagatggggctctgtgtgtcaaactggttgaataaataaatgaacgagttattcattgtataattcagcacaaatctattggatatctatgtaccaggcattgttataggtgccagggatattgcagcagaacaagcaaatgaacaaacaactctttcttcatgaaagttatattctactggaggagagactcatgatggacaactttgagatcatgtagatgaaatcacttcataagcaggaggtagtattctcctcagatcctggtctaatggcctgtattatggtgccaaaatttgtatttgaaatcacccttgatttcaggcaggaggcctgacctgtctatccctggtaattttgagcactgttaagtctgggtagaccatctgctttacctaagcttagatcattggctctctttttcagtagtctgaggctttcctcagaccagtcacctcttcacggacattttaagtgtatgagggctaagctccaaaacacagtaattgctcttgagaataagcagttttctctgtgaacacaagaaaatcatattctgctgggctcaaagagagtttcttaaagttgactcagaagaggcttaaaaacagtaagtgttacaaatggttttttgaaaggaagaggaaattatttatttattattttaagagtttcatttcaagaatgagggaagtaaaccaaaatatccagctttttttgttgttgtttgttttgttttatttttccctaaaactcttttgcaggaaaccttatggggcttttgccttttgatcttgctatagaatctagatggatacatgagacagaaggatacagaaatgttctcaaagtggttgggccacccaattaactctaggggtgtgattcagttttgtaccactttacatagtgagaaaacattccagaaggagctgtgctccccttgggtgtaggaatgtctctcctggtctgcaatgcagttgaaaagtgaagaataatttccattttctgctttgtctattgaaataaaaagacaaagcaaaaacaataaaaaaaaaactcttctacatcatttatcgctcctttatttggcaggagttttcaaactaatattttctttttgtacaccagccccattttttaaaaagtactgagtagaagttttttaaatttggcaattcaaaaaatagttttacttcaacaaacttaatgaaatcattattctttaaatatcatatggaaataatagtaagtttttttttgtttctttaccacattgatatttgtggtttgtttaccacactgccattcaacctttgatgaacatgtgggatgaatgagcactactggtaataatgaaattaggtacaactttcccataagaaaatttggcaaaatgcatcagaagcttcagtggtttttatatccttttatctggtaattcttccacttaggatttttgttcttgttagaagaaaggaataagtgacaatctgagaatatttgtccctacgtgagctaacacagtcttttaagatttgtattaaggttagttcctttgcacctatcagttttgcttttaagttgagattatttatgtttgttttatttatgtgaaataagtccttagaaaatatctttgatgcttatagttataggatatagtgatttcctttaccagctgctaagttctattaggtttttttgtttgtttgttttttaaagacatggtgatacggcttggctgtgtccccaaccaaatctcaacttgaattgtgtctcccagaattcccacatgttgtgggaaggacccggggggttggtaattgaatcatgagggctggtctttcccatgtggttctcatgatagtgaatggataagtctcacgagatctgatgggtttatcaggggtttctgtttttgcttcctcctcattttctcttgccaccaccatataagtgccttttacctcctgccatgattctgaggccttcccagccatgtggaactgtaaatccaattaaacctctttttcctcccagtctcaggtaagtctttatcagcagtgtgaaaatggactaatagagtaaattggtaccagcagagtggggtgttgctgaaacgatacccaaaaatgtggaagcgactttggaattgtgtaacaggcataggttggaacagtttggagggctaggaaggagacagaaaaatgtgggaaagtttggaacctccaagacacttgttgaatggctttgactaaaattctgatagtgatatgaacaataaggcccaggctgaggtggtctcagatggagatgaggaacttgttgggaactggagcaaaggtgactcttgttatgttttagcaaatagactggcagcatttttccctgccctagagatttgtggaactttgaaacttgacagagatgatttagggtatctggcggaagaaatttctaagcagcaaagtattcaaaaggtgactttgggtgctgttaaaaccattccattttaaaaggaaaacagagcataaaagttcagaaaatttgcagcctgatgatgcagtagaaaagaaaaacccattttttcaggagaaattcaagctggcttcagaaatttgcataagtagcaaggagcctaatgttaatccccaagatcatggggaaaatgtctccaggccatgtcagagaccttcatggcagcccttcccatcacaggcctggaggcccaggaggaaaaagtggttccaagtgccattcccagcacaatccctgtgctgtgtgcagtctagggacttggtgccctgtgtcccagcctctccaactgtggctgaaaggggccaacatagagcttgggctatggcttcagaggttggaggccccaaaccttggcagcttccatgtggtgttgagcctgcatgtgcagagaagtcaggaattgaggtttgggaacctttgtccagatttcagaagatgtatggaaatgcctggatgctcaggcaaaagtttgctataggggtggggccctcatggagaacctctgctagggcagtgcagaagagaaatgtggggttggagcccccacatagagtccctagtgggacactgcctagtggagctgtgagaagagggccactatcctccataccccagaatggtagatccactgacagcgtgaagtgtgagcttggaaaaacctcagacactcaatgccagcccatgaaaacagtcaggagggaggctctaccctgcaaagccacaggggcagagctgcccaagaccataggaacccaccttttgcatcagcatgacctggacgtaagacttggagtcaaaggaaatcattttggagctttaaaatttgacttgactgctccgctggatttcacacttgcatgggccctgtaaccgctttgttttggccaatttatcccatttggaacagctgtatttacccagtacctatacccccattgtagctaggaagtaagtagattgcttttgattttccaggctcataggcagaagggacttgccttgtcccttctgtggatttttgggttaatgctgaaatgagttaagactttgagagcctgttgggaaggcatgattggttttgaaatgtgaggacatgagatttggaggggccaggggtggaatgatatggtttggctctgtccctacccaaatctcaacttgaattgtatctcccagaattcccacatgttgtggcagggacccagggggaggtaattgaatcatggggggccagtctttcccgtgctattctcatgatagtgaataaatctcatgagatttgatgggtttatcaggggtttctgcttttgcttcttcctcattttctcttgctgccaccatgtaagaagtgcctttcacctcccaccatcattctgaggcctcaccggccgtgtggaactgtaagtccaattaaacctctttttcttcccaatctcaggtatgtctttatcagcagcatgaaaacggaccagtatagatgggctcttgctatgttgtccaggcaggagtgaagtgacatgatcatagcacactgtgcctcagactcttgggctcaagcaatcctcctgcctctgcctccccagtagccaggacaacaggcatgcaccactgtgtgcaattcctgttaggtttttaaccacacttccaggagatggtgttaattagaaagacaaagttgataaaaagtaataaataggagaaccatattgataacataaataacaagtgtaggattagtacctagaatatataaagaactcctgaacatcaataagaaaacaatggggtgggaaagaaggcaaagaatatgcatagacagttcacaaaaattcaatctgtacctaaggaattgcacattaaagtaatacacagatacaaatagtattttacaatcagcttggaaaaatttagagagcctgataatggtatgtttggagagaaaaggaaatcagaaccttcatacattgctagtgagagcaaagatggtacaaataccttgaagaacagtttggcaatatttaataaagtttccagtgtgtgcaacctaccatttaatgattccacctcagggcttacaccctgcagaagccataaaggagacaaacatggggatgttcactgcagcattatctgtgattgcaacaaactgcagtcaacctaaatgcccatcaataagggagtagattacatggcacatcataaaggagagaaaataaatgaattagatgggtgtgttttttcatggatagatctcagaaactaaatattgagtgataaaagcaagtttgttcaagcacatgtatggtcaacaagtatgtaatttttgaagaaaatcacacaaagttataggtgctatcttgcaaaagcataaacacatggattggatgactacacatcaaattctgggtaatagttgcctctggggagggagagcagggaacttatggggcttattgttgtcttcaatatttaatacaaagcaaacatggtaatatttttggttttttttcattctgggagacagaacaatgactattctatcatttaccacaaattttaaaagttaacaaaaaaggtaaggaatactttcagggaaataaaagtaatgaggcgcatctcaaccaaggtgttcatcagaaacttgccatcactgtatttgcttgcacatgttctagtcatctctgttggtattttccctcatactatcataatcttttaggacaggaactttgcctatgatttctttgaagccaagcctcatgcaatttaccaaagaaagtatgatcatcattctataagccacacacagaaattgttagaaagcttcacaaacctgctagagtcagtgttggggaaagtgtgggtgaatgggcacttggatcctctgttggttagaatataaacagaattgctttttgcaaggaatttgggctgcatctctcaacatggaaaacaggcagtctctttggccaactatcctctacctcaaagaccccacactccagaaagcctatataaaggtccagtatgttcataatgcaagaatattcaattctgcattacttaccatagtgaaaattgagaacaatagaaatgcctttgaatctgggaatgatttaaaatttttagtaataaaatggaacatttggtggctgcttttgaaaagaaagatagatctaggtgtgttgacatggaaagttgtctaggatatattattattatttaaaaagcaagcggcagaaaaatatgtatcatgtaaccagatgtttgttttgaatggatgtatatagatatataattatattttatttaattctatttgaattagcctataaataaagcagagaatgcatgtaaactcttaaattaattaaagagtagagataagagagagtagggagtgggggctttttgtatttgtttatatttgtctttattcttttgggattttttgatgagcttgttttctcatttttaatgtacagtgttagtagtattactgatgtctgaatgacacttccacctaaagatatgaaggaagcacgtcatgtattgcatttcatgttttataccactatttttctttaggagatgaattcttccttgagagatctcatttgcctttttagtaatctaaggtttttctaagactccaaagaaacctgaggtaatggagcagtgacaatggtgcacagttgagtttgcatgaaggtgactcagatttcagcccttgaggtgcctgatcatcacacatagtgattgactgcatctcatttatgatggtgcagtctactcttttcagatataaataatagcacagctcattggacaggaagggagagccaggtagttccctggttgcatgggtgtgtaaactaggccagtgattttacatcatcctaacgaacgtattaatagcatgataaaacgaaggcccttgaattgttttggtggtgatgcctactcaaccttcccatattcaagatgatataaagctgtaacaggctttcagaaatgcagtctagatttgatatagtgctttttattaactgtgacacaatggattatggcacttcaaatgagaaggggaattttcttcctttttgaaatgtgaattaacaaaatgcttattctcagtagaagttgttttcatgggcttttccatttatttctgctgtggttgccttcctctactgcctctttgctagacaggcaaacagtcacacacacatagttcatatacccattaaatcatgctattagaatggaacttttttgtttgtttgttttttgagttggagtctcactttgtcacccaggctggagtacaatggtgtgatcttggctcactgcaacctctgcctcccgggttcaagagattctcctgcctcagccttttgagtagctggaattacaggcacatgccaccacaactggctaatttttgtatttttagtagagacagggtttcaccatgttggccaggctggtcttgaactcttgacctcaggtgatccgcctccctcggcctcccaaagtgctgggattacaggcatgagccaccacacccagcctgaacaactctgtttttgaggaacggttttatatttcagaagaggatatttcaattgggtcatgctgggaaaactccccaggagatgaacctgccacttcatcgtgcagttattgtctgtacttgcacaaattattgcttcttctggcttgggatacttcatctacttgtgagttggcagtagtgacacctacctgtccccccctggagcactgggctgatgtcatcattgtgcggtgttggatgagtaagtactcgagaaagggtgattgccaagggctgggtagttcttcagggggatgggctgtgttagttgcctggttgttaaaataggagattaagaagaggaatcctgagcctgacttcttcctttgcaacccatgacctcattttgtctgacttttttcctttagcagttaaggccattatactctacagatatattccagaggaagtggagggctccacctttaaaaataataagcaattcaggacagttcatataaagtcaggatttgaatagatatttattaaatgtctgccatgagtaatgtattccactaagcacaagggggagatataaaacgtagtttagtaggttcttcataggttctaatgaaatgtaaacaccttacgagaagtgtattcctttatgtcacaaggaacccttgtgttctgtaggtcaatcactgtgcaatactacgtagattcagagatagttattaagcataataaatcaatcacacttttctctaaagctcagtagagatactacctgtctccacatattacatttgattgtaagatacagcctagagaaaaatgttagaatctcattgcagtgatttccaatgggaagaaatctaagagaatccattcatttgagattttctgtattataaaattattttctaaaccagagtctataatagatttcctttaaacacaagaatatatatcataagcataataaaaatgaatcataccacacaattcttgtttgtataaagaaatcctaatacatgaaaattaatgaatgatattgccacttcatatatatatttgtatgtacaaatatttatatatatttaaatatgtacctatttaaaatatatatatttataacctaatgcctgtatttacaggattaataaaaccataaccctatgtcagagtttttaatagctagcaacaataagcaacttttgttaattttgaaagaaaatgaatttattgacagggtattgggttacctgctgagttgctaggcagtaagaagaccaggcttggaaccgggagcagtacctctaacacactgcagaattggtctggagagcaatggaagcctgcttctctgtttctattgcaccaataattcagtcttcccacagccttgcccactccctgtggtccctgttccttttccttatcctttatctctaacacctgagtccagtgcagaacacctgattggtggatcctcagtcacatgttcattccctagctgcaagggaggctggcaaaggaacacctgcattttctcatttctagagtaggaggatgattctgcagccaaagcaattgccaaattgttattacaataattatgctagaaagtttgaaaggcagaaaacatgaaaacatcatcatattccattgttctgatacaaaactattttaaaataaaattatcccagtctttttcctattcatatgtttttacatttgtgcaatcatagattttatacttttacatctgcattttattttcagtgtctttttttatgttgctatatacacatatatcattttaaataatcacataataattcaaataaactgacttattttgccattcttctaatgtcagagattactgataaattttcattattttgaaaaataattttatgaacgtgttcacatctaaagctttggcatctgaatgttgtatttggggcttcagaacccagaaggaaatcttatcaacccttgagtctttaataataaaattagtatacttgatttatacctttccttaattgacttaaacacaaacacagtcctccttttgatgtgaaattttacaagttcggaattgagtgagttaaatttgggattgtttaaaaaattttaaacattttatgtaggcaagctatgtttgttaagcaaatatttactaaaaagtactgctttttaatttaatactaggaaaacaaataaatgacctaataataaatatcctgtatctaaacaaggtaatatgatgcacatcataataaacttatgactgtcatatgactgttaacactgacctcaatattttttaaagtaaaaagtttcgatttcatcacgattacatatatcagaatattttccttaccttggatgttgtgagtcagttacggtatttacaagtggattcttgtagaattaagtgatattatcataaaataaacacatcatggtgtattagttagccccttggtaaatctgccagtctaccatttttaatatttagaataccttctgtctcctgtaagattctggtattgttgcttgttcatttgacatatgtttagtgcatgtctagtacatgttggacactaagtgtccatattatatgtccagtgcatgatgggcagcatattaagtaacagggtataaaaacaagaaaaacaagaaggacatctgacctgacatttagaggcttaaatcgagcaggtgatattatagtctggaaatggatgtgtgtgggtgtatctgaaaaatcacaatagactggttctgggaataatgaccgaaaagtctcttttgtgcatatttaagttactggcattaaggttagtatgcatggtttgaggacttgggactgggaaattcttaggtattggttaccatccctgactttgaaatatgaaaatatgatgatatttgacttgatacagttgcctcctttttttttttttttttttttgacatctttagcccttaaagtcagcctggcttatgattctgctcttagatgagggtggttcattcatggtatggtgctgaagaggaattagtgtagcaaaatcagaaggcttggggaaaagcatagggtttttcagcattaaatctctccttatataacattccttatattcttcttcccactgatgattccatttctatcccttggaatctagcaaagggctatttgtagctgcaagtattccctggaattgggatcctacaacatgtaaagagtcaagaatcgtaaaatgtaatttaaattaataatccagatctgaactgtactctcagaggttaaaccagacataatctttcaggatcttggtgggcaggttggttggtacattttatgtcttagggatatgtatagatcctcctttagaaaagatagagactgttttttgtttttgtttttgtttttgtttttgaataagacaacttttgctccagttctgctagcatggttggggaccacattaaaattccactttgatcaatagaaagacaaataccataatgttgtcagagtttttttctcagcatgggattgttatatgttgttccttccttttgctcatccttttctctaaattttctccagtcatgtacattatgggttttggggttttgtttttgtttttgttgagacacagtctcactctgtcacccaggctggagtgcagtgacatggtctctgctcactacaacctccacctcccgggttcaagtgattcctgtgcctcagcctcctgagtagctgggattacaggagttcaccaccatgcctcgctaaattttttgttttcgccatgttggccaggctagtctcgaacttctgacctcaagtgatctgcctgcctcagcctcccacagtgctaggattacaggtgtgagtcaccacgcctggcccacattatatttttaataaggaaagtaataaaattggtgtcttttcctggtattaaggatgacaagatgaattcaataaaatttccttggtgttttttctctcgtatgttcctttttgtgacaacaattttgggacttttaaaataagtatgtttgccatatcactgatagcagtgcattgattacctctgagaaatgaagccacgatgcatcctgcatatttggttggtttggagtccagcacatcagggttcagatctctggttatatgaaagcaggcaagtcacatcaagctagttatgtaaccctctgccctcagtttcctcatctgtgaagtgagactagtggtagcacttacattcattgtgagcatcaagaaatattaatgtatgaaaaggcttgagcattatgctttgtatataagagatgctcaataaaagttaaccttcctctcttattttcttttctctgaagggagagggtgagaattgttacaacttattctcatactctccaataactattttgaatatggaaaatggcatggcttgttgttaagtaaataatcatgttctatattagggaaaaagaataaaaaattttgcattatttagccttttgttatgtttttccatagtcatttctattatttcaagaaatctttctctgtctcttctcgctcgttctcttttacatccaaggttgactttctaagcatattcagtggtaaaggtataactgcatcatcccatatttcaataccaaaacggggagaagaaaacacttaaattcagccaccacagtgcattttccaaagtgttaattaaataatatacataatacaaggaagcttcagtttggcgattgaaaccacttgccattttgctaaaagtaagagcccatttaagtccatttaagatcatttgggtctgcacttatttgtcatgggtatcatttgagacaagaactttgtaggaacaatcttgtttaatttaatgctatttctactactgtagcttttgttttgttttgtttttctaagtggtttgcagatagttttgtagggaggcaaataataaaataaaacgatctagaatctttaaaactgcaaagaatttgccattgaagcattaggattaaatttttttttgtaaacccccaagacaacatttgtgcatgtatgtgcatgtgtgtgtatatatctaaaaactatactttttcctttccttctaactctttattatggaaaatttctaataaatacaaaagaatagcacaatgtgcctcttgccccatctctgagagcatttggcacacttctataatacttgaagagcaattagaaaataaaagtctggggttatttataaaattatgaacaaatgactttggaaagtttaaaaaatagattggaaagaaataacttttcaaaatgtaggaaatgaacagatgaaaaattatttgctggggtttttttttgttgctgttttttgttgttattgttgctgctgctgttgttgttttcagacagtgtgggcagcaagccacccaggcgccaaggcaagagaccgaggacaccagctgttccagtataataaaatataaaacaagaatagttataccagatatagatcttagatatgattatatatgaatatcattaatcattagtttgtagcaattactttttattccaatattataataatcctctctctgtaatcataacctaggaaaaaccaggccatacagagataggagctgaggggacttagtgaggtgtgaccagaagacaagagtgcgagccttctgttatgcccagacagggccaccagagggctccttggtctagcggtgatgccagcatctgggaagatgcccgttgccaggcggacccgtggtctagcggtagcggaaagtgtcaaggaacaacacccactacttagcagacagggaaagggagtctccttttccccgggggagtttagagaagactctgctcctccacctcttgtggagggcctgacatcagtcaggcttgcccgtggttttccggaggcctaaccatctccctgtgatgctgtgcttcggtggtcacactcctagtccgccttcatgttccatcctgtacacctggctctgccttctagatagcagtagtaaattagtgaaagtaataatagtctctgatatgcagaaataatggcgtaagctgtctttctctctgtctcctctccctctctgcctcagctgccaggcagggaagggctccctgtccagtggacacgtgacccatgtgaccttacctatcattggagatgactcacactctttaccctgccccttttgctttgtatccaataaataacagtgcagccagacattcggggccactaccggtctccgcgcatttgtggtagtggttccccgggcccagctgtcttttcttttatctctttgtcttgtgtctttatttctacactctctcgtcactgcacacggggagagacccaccgaccctgtggggctggtccctacaagacagagtctcactctgttgcccaggctggagtgcagtggctcgacctcggctcactgcaacctccacctccctggttcaagcaattcccctgcctcagcctcccaagtagctgggattacaggcacacgccaccatgcccagataatttttttgtagttttagtagagacagggtttcaccatgttggccagacactggtctcggacacctaacctcaggcagtccatctgcctcggcctcccaaagtgctgggattacaggcgtgagccactgcacccggctgatttgctgttttatcatggagaatttgggagagtaaggaggctatatgtgaaactccgtaagcttattgtaagctaagcattagccaacttctggttttgtttgcaagtatagtaacgttcctttatttactattttatcagacataagagacttttaagtgacactctcagatatcaataatgcactcatagttgatgttcggaatgactcagaaacaccaaaagcagattcctagtgtgctttttgaaacattagaattgttcagcttcattctatatagttttagggcatagtttatcattattgtgttgaattgatcgttcttgatttatagcatagcttttcctgtccatctgactgtccagaactcaaatcagtatgaattcttgagtattgaattaggctatttacagtgaagatgacgtttcctgcaccctccaattagctagaaacatctcctttgcatgtcaagacaagatgtgaaataactcttgataactgtgaatatcagatataagaaggaagcatgtcaatagttcatgagatacctgtgccattcctggggcttgactagtttctgtgccttttctgaaatctgccactgaaaggagtcgggaaggaaattggcacagcctcttctaggataggatttctacactgtggcattattaacactgggacgaaagagtctttgttttgaaaggctgtcttgtgcatcgtaggatgtttagcatcaccgctggactctcgcatactggatgccggtagtagcaccccctcctcacatagttatgacaaccaaaagtatctccagacattgcctaaaattccttgaagggcaaaactgcctgtacagttgagagctcccatcttaataggcaggagcaccttactgtaaatttctgtgtgggttactctccctgtttcccccacctaacccttgggttgtaagccccttgatgatagaaatgaagtattttctttcatgttgaggtctcgctttcttttctgtctaccacacaatatatagagatttgaggattgactatgccattgctttttttttcagacggagtctcactctgtcgccaggctggagtgcggtggcacaatctcagctcactgcagcctctgcctcctgggttcaggtgattctcctgcctcagcctcccaagtagctgggactacaggcatatgccaccacacccagctaatttttatatttttagtaaagttagggtttcaccatgttggccaggatggtctcgatctcttgacgttgtgatccacctgccttggcctcccaaagtgctgggattacaggagtgagccaccacacccggccgccattgctttttagtttttgtttttatccaagccacataatatagtgggtttttaacaaaagggcagtcttgacatttctcttcttcccgtttttgttactgcttcacaactgagtacgtaacaactggtacttcagtgatacagtggcctattttctttcttataaaagacattactatatcatacagtattttaacctttcctttacaaatctcatgatactgagatgcctttggttaacaaaaattgccattgagtctggaagattgtttgtttgctgactgaccagccccctcatctcatccttctcacaaagaaagaaagaaagaaacaaaccctcaacccttaaattagtcaaagtcctaaggcagttttcccagaacaaatgtccatattgactttctccgttgttaggtcctgtccttgttgacccgttgctggcttgaggggctgattctgttcactttggaattgggtagcgttttggtttaacaacagtgtccacccagcgggggaccaaattctcaggagaagccttatttataataaagcacaaaaacaaatactcagaagaaatagtgattacataggccctctgaacagtttcaaaagcagaaataattccgttgaaaatatgaatcctgtaaataactcatagtttggtagtgtttcataaagtgattaggagtaagcctcaatttcctcatgctgaaaatggggataataacatctgctacttcgtaggattgtaatgaggattaaataagtgaatccattgaaaactttcagaaaaactacctgtaacatagcactcagtaattgctttattttctttcttttggagatggagtcttgctctgtcacctaggctggaatgcattgatgcgatcttggctcattgcaacctctgcctcccgggttcaatcaattctcctgcctcagcctcctgagtagctgggactgcaggcacacaccaccacaccaggctaatttttgtatttttagtagagatggggtttcaccatgttggcctgaagtgatcggcctgccttggcctcccagagtgctgggattacaggcatgagtcaccacacctagcctattttcactttttaattcttctcctaattatgaggagtctctatatcttcccattttcctacctcctttaaaattcctacctatattctccaaagaagtagtctatcctcttcctctttatatgcattatccattatttttatcacacaaatccaaatgggactatccaaaccacatatattggcctggtataggtgtgtcctccctttacagatttttatagattttcaaaaaattttaaatctctgagaatttgctttgtagagtatgataagtcataggtttttgtttgtttttttttggcaaagtactttttatagtgaggaaaaataaagctctgcctaaatacctatgtaagcttaagtttcagttgattacgtgttttagatgacatccatgtagatcattggccaatttgtttgaaagaggtagtcatgatttttttgatctgaaaaggtcaatatgaattcagttctgtatcccctgcacaagttttttaaaaaatgtttcatttgtggctaaaacacacattcctgattagatcaatgagagcactccatgggcaaatccagcttattttgctagttaacaagatgtttctctgagttctcgtgccagcaacgccacagaagaatcacaggaatcctcctgaatccataatcaattcatgcaacaccaagtcagatctcttagaagaaaattgctggtgaaggtccagaatagcaagctaaaaagcagatatttgatacttgcaataggctgataggtgtgctaagtgcttgcttagtaaacatgctaccataacacttttccttttatggagaaagaggacataaatacataaaaataaaatatcaaatacataaatatgtgtgcactgtgtgaatatgtacaggttgtctcaaatttatacgaaagcagagtgaataatagaatgaacccttcgcgtaacccatcacccagcttcgagagttattgactcggctcatcctgtttcacggatacctccctctaacttgcaaatcctagacataatttcatctttaaatctgtctcgtagtttgttcaacctctccccagaaaaatgtacagtcaaagtttgcttacaattttcaggaatttacaatttccctaaaacccagttaaagagaaccactgactgatccagctcatttggaagtatgagaggaaagatgtcacgaaagccttctgtatgagactgtggcctgcaagtgtcccagctctaacgttcatgtttttcccctttttctcttactctcacaatccatctatgatatttgagttagctaaagagaaaaagataaaaggatacaggaaagaggctgaatatttccttcatcttttaaagtcctctcgtctccttcttggtggctttatattttttttgagattgtgagctatatgatttaacactaatccacttggatgtgaaagcaaaaattccaaggtgaacaatcatagagaacattatttatttactgagcatttactatgtgccaagtacttttcatgcatctcatcacttaagcttatcagcatctccagcaactattaggtaggtaggatccatgagcccattttgtaaacagaaaactgaggtccaaagcatttaagcaacttgcccaggatttgaactcagatctatttgaaattccattcagatgtttaacaatactaaactgcatctctccattttactctgacagtgggtcgtattcttagctgtgtgtcccaagcaggcatacgtggagtattttatagctgtgtgcaccatttataacaacttcttcatggtggcgtgaggcatttcagagcattatataagaaagtctcttaatgtttatgctgtttttaaattagacttagtgcaagccaagaagaagccaagggcattttcaaagtgttcatcagatcatgttgattctctttattaaaacatctcaatggcttcttacaagtagtagagaataaaaatcaaattcctttcaatggcctgcaaagccctacaacatctggcccagacattcttttcagggctctcactgaccttgtcagtactccaaaagtgctggctctgtggttgttgatcttgtccttattcatccaatatgctgggctgcttcctacctcagtatctgatctcttctgtacctcaccatagctggcttctcatcattgaggttccacccaacttgttgcttctagaatagctttgttgcaatggcctttttttctcttttactgtctgcattgcacttctcattgtatgagattcttattcctttgttggttcattactctgtgtttgtctctgcttccccaccttaaatatgattttcatgcaatcagggcctgtgctttagttgctgctcagtcttcagcacctagatgagtgctgagtaaatcctggttgaatgaatgaatggtttgttaagtggggatggttacattaaacctgcatgcgaagctctcagcacagtgcatgccccagtcggaaagcactgccgagctgctgctgttgttggtgaggttaattccaatctggaacttcatcataacataatctataaggcaagttttaagaatttcccaagccaatgcagtttctcaaaaaccagaaggaccctcagtctcatgatatagatcctgaagttgtgttattaggagatggctgctttttgacagtttttagctcatgtgggcttgaccttcaaaccagtagcattcagcagctctcatctctgcctaggggctttctgaccttttgcttaggcccaaggcaatgttttcatctctgacaaacttgaccactgccagtttcttaagagtgtcggtacttatgagaaggagttgttctgcctgtgctgtaatcatctctaatacccgataaactgcaaacaatgggggcatttgaggggggaaatggtacaacaaaaagacgtctgcgattctgaggcagggctaaactggggcacgtggaaaagttctagcatgtggaatgctgcactcgcagctcccatggtgggggggatctggacggtcctgacaatgggccattataaaggcactattgaaccacgtaattgtggcctttggaaaaaccataaaaatgtgtcaaatattatacaaatgcaaactgtacaagcttgaatgttagaccaaaaatttcagaaaaaacaaagtcctctccatctgatcaaacagttcaagaaaaagttgaaacaaggcgaatttcaccattgtgtaaccccttcatgggtttatttgttgcttgcaaaattttcagtagaggaattctgcctgaatatattttcatttgtccagatctgtaggctttcattctcatggaatgtctagcttgtttaaattacaaaatcagtgtcatgtacattatagaaaataataaaataacaatcactgagaatttatcgctcgggaatagtcattgttgagacttgaccgagtaatttgtcattagtttttttttttggctttgcatatatataaatagcatttaaaaatcaattttggatagcagcatgtatagtgtttttaacctgctttatgttcccatttacattaatgaactttccgtctcattaaatattgttagattaacacagtaacggaaaaccaaacaccacatgttctcattcatacgtgggagttgaacaatgagaacacatggacacagggaggggaacatcacacaccggagcctgttgaggggtgggggacaagggcagggagagcattaggacaaatacctaatgcatgtggggcttaaaacctagatgacgggttgacaggtgcagcaaaccgccatggcaaatgtatacctatgtaacaaacctgcacgttctgcacatgtatcccagaacttaaagtaaaaaaaaaaataaatttgatatatgaaattcaatgtagtgtactagacaagaaataaacaaaaaattgttagataaaatgtggattgtaatgactgcataggatccatttatatgtagtggttctcaactgagggctgttttgtccccaggaggcatttagcaatgtttggagccagttttggttgtcataactggagtgggacatgctgtgttacttggcatctaatgggtatagattagggatgctgggagacagcaggcagttcacacatcacccccacaacaaagcagtatctggctccagtgtcaatagtgctgaggctgaaagcctgaactatatggcttccttataattaattgaatccatggcctatgagatatttgttttcaatttttttattagaaattaatggctgaaaaactttatctataaaaaacagagtgttttagacttttggggccgtcgggtccattactcaactatgctcttgtactgttatagcttgaaagcagccatagactatacttaaatgaaagtatggatgttttccaataaaaccttattgacaaaaatgggcggcatgccccaggcagtagtccacctacttctgttagagataatgctctaatagatgtctgtgtacctaaatctttgtcccgtatctgatcatctccttagaaaagttcttgaaaagagccattgctgcatgggcaacatgtatgtatctttttaaagtttatatccgtttattttattttatcttttacagttctacctatttattttattttctcctatgagattgttcatttcatgtagctttctgaacacacttgcgccaccatcattctatcagatttggaaccttgttcagggatatgaagtgtgaatgggtaaggtaggatttgcagatttaaaagtcttcaggaatcagacgggttaatgaataaagtagtccagttgtcagtgtcagaataaagagtgatgagagttgcagaatgaaaagtaagtgctcattgaaagggagaagctacttctcaactctgttgcttttcaactctgataagttgctggcccagtaggagtgcagtttggtatctctagatcttctgatttatcaaccagaaaagagaaatccaaactctggtttgagaaaccagattttgggttgaaaactcccaatttttcatcattggtgacaaattcatagaacactaaattctgtctaggtgaacagacttgcctgtggtttgtgtccatggactgccagcttggggaccttggaataactgtgacttatctaggggtctacagctagaggtgaaagcaaatctcaggcttccggccggtcatttgagacccacagggccctactggcttgttgtactgctagatgagagctgtaagaattggcaatctttgggcagcccctgatagataaggaagctttatcatgtgaagtagggtggcaggctgtgaatcaactgcctggcctgaagacttagttcctctagagctttctaacttaggaagactgagggactgtcacacttcatttcctcaggacgtttccagaggtggtcagaatcctagcctacaacccctgcctacacaatgtggccccttgttcttcggttctgccccttatccatgcacgccagccacagtggttccacactgcttcactgacgtaccaaatacttgctgagtgcccacagtgtgccaagctgtgttctggacaaagcagagcagaggagggagaatcaggagcactggtagcatgtgggctggatatgtgaatatgtccttaagatagttataggagacaaggtcaatgaggtaatgctcctggggtggggtggagtgggagaagtaggcacagtggacaggggtctgtagaatctacgtggagaactaacaagctagtgtggatttctgaacaccatacccagagattctgattcattagctctggtttggggccctggaatgtgcatttctaataagcactgtgaatagcattgatgtagggacttctaggccattgcaaatactttgtttttgtttttttttctcagaaataagtagggaaccattacagaggtggggtttttctttttgtttgttttggtttagtttctatagagaaatgacttgatctgacaatatcacaagatccccctattcattgtattgaaaatacaccgtcagagtgccaagacagaagcaggtagaagagtcaggaagctttccatcatctaagtttgaagagatggtggcttggatcagatggtaacagtggagcatgaaaatccatcatattctgattattttctgaagatggaaacaatatttcttgatgggttggatccagggtatgaaagaaaggagtcaaagataaccatgatttgtagaatgagcaactaggttaagccagaggaagaccattttttgacctacccccgcccccaacaaaaatggcaattttctatgtttcaacctaatagaaaaaaatggagttgccaactgtgaaaatgcagaagaccgtgggaggagccaatttggaagagtggatgaacatgctgagcttgagagtctgcagtcctccaaacggtgccgtctcgtaggccagtggagatgagtctggttctcagagacctctgttctggggtgcttaaatccatgtgactgggttcgatcaccagggctgggagtgtagatagatgaaatcaagctcggatccttgaggcactctgacatttagaggggagaagaggagaaaactagctaaggagagtgagaagaaatgaagaacgtgagagaaaaaccaggcaagtgtggtaaatcgaaagccaagtaaataacatgtattaagagcctccttgctgttctttgagcaaccaaggcttgttcacacctgagggctgtatgcttggctggaatgccgttcctgccaatctgcctggctcatctcaccaacttcaggtctgggcgtcaatgtcatactctgtgaggcccttacctaaacacactgtgtaagatttgcacagttgcctggcatctagttggtgctcaagcaatatttgttgattgaatggtgaacatataacttttgatgaaggcagcagtccaggtgagaacatatgaaagccttgctgctcgggatgtagtgtgttccctggaccggctgggtcagcatcccctggcaacttgttagaaatgcagaaatcttgggctctagcccagacttgtggcatcacactctgcatttaacaagatcctccagtgatttgtgtacacattaacatttgctcccagtcctgtatttaattttctatgaatgtcaagaggacaattgagtatactctctcagatgggaacaactcaaagtaagaagttaaaacaatcaaaatcaaatatcttcagtggttgtttctgtattcaatcagaaagctatgatacagtttaaaagcaaaagaaaactgtgtcgagactttcaagaatattttatgtgattatccccctatcttttttacttttattttatgtggttattccacatatctttcttacttttactttgaattgacataagctaggagcgcatgtaaaatgcatggcatctggtacatggtagacaagtttgagagaatgagcactaattccgttctttatattttaaaacatcgtgctatataatgtaacatatccactcataatgtcttataagaccctcatttaagagaaatggttttctcttctattcggctgagataaaaccacatgttctttttattatcatggtctttggcttattttagcctgagggagaaaaaaataatgtatatattagggattttcttatgataacaccttttttctgaggctactaaatattgtttgtcctaaaaccaaagtatgcctgtcttgtggtttataataagcatactgttttataggtcattagctaaggataaaagacttgctgggaatttttgatagggctagtctagtctattctgttttaacatcaaattttcagaaaagtacatttgttatccttttcttttatacatatttacagctcaattctctgaattcagaagcctacaatgtaataagacaggaagtagtatgaaagtatacagacccataaatatgtgatataaatgtatatatatttatttgtgcacacctgggatatgcacctggaatatgcacctggaatacacccctggatttacacagttttatcttcccttcttattcagttaaagtcctagatcagaactgacccacagaagagggagcttctctagttcgcctctgcggacagaataatggagacatggctatggtttctaaccctggcaagttgtttaggtttcctcttagtttctgttttctttagctttaaaaagggtggggggtaattaagcatatcctgtattcttacaaagatgcttgtccagttaagacagtagttggaaaaacaactgtaaaattacgtatacatatactatttctctttattaaaatcaccccattctttccttcaaatcctgctaaaacttctgttgagtaggaaagttcaattctagtttggtgaaactttcctagagagcaggggtcagcattttctataaaaagccacaatgtagataattttaggccttgggggccctgcagactctgttgctactcttcaaatctgctattgcagcaagggagccgccctggacaacatgtcaactaatgggtgtggctgtgttctgataaaactttatttatccacattgaaatctgaattttatataattttcatgtgtcatgaaatattcttcttttcattttttttcaactatttaaaaatgtaaaatccattcttactttatagaccatacaggcagcagaccgagttgggctgatgggtggacagactcctgttgtagagaaaaagcactgggtttgtcaaccatagccatttcgaacctttctttatttaagactctttggtttgctttgtatttgcatctgattttgattcttctcccttaggccaggattcatacccttgttgtttttactttttgttaaggacagctttgtacagattgtacagtaaacaagattatatgtccaaggatatatgttctgggcttttgttttcttttgtggtaatgtaattgtgggactgaaaagaacctcgacacttaatcagatgtgaccttttgcaagactatcctagttatttaagaaagctagctttctctgttttaccgcttttttcaggaaatatgattgcataactgacattctctatggattgccatttttaaaacagtatgaaaagaatagtggtgtggtgatagataacaattgattaaagggtaatccctttagttttctttaaacttgctgagcaaaagaacaaattatctctctaaacataagtgataaatctgaacattttgttgaattattaaaaatatatatatataaagccatttgagtgtagaagcatgtcatagctactcaggaggctgaagtgggaagatcacttgagcccaggagttcaaggctgtagtgtgccatgattgcacttgtgaatagccactgcactccagcctgggcaacatagcaagacccttatctctaaaaatataataaataaataaataaactaaaaggattaagaaaatctacactcgcttctacttgaattctggtttacaaatagtagagagaatagaagaatagtggatatctagatagggatatttcttccccagtaaattctgttgtcagccaagatggtagtatctatagctaccatcttaaactgacatgtgatgtgctccaggatctctttagaatgaaactgatggaaaataacctgtcagttttacccaggaagtggtaaagctgaagtgtgacagttaggaggtgatccattccgattctcttgctatccattcaagatctgaatgaagaaaggaaacaggtgaaattacaggagtgctaacaatgaataaaagttacaaagcctttgggtgtttgccctttaactcagatagctagcataatttatatgaaatataagttatatcaataaataatattttatgataaagtattctagctttattttgctgtctatacttcaggtgttcagcagtactcaacttttgctatctgaatttcttagtgtggttagtcatctggaaagtcaaaaacatgcaaacattatcaggaaatcataaagatgtttctgtcctctttaatgctacatatatgttctcatttgcatacttctttggctatttaaaaattaatgaaagcaaagttattgactaaaaagctatgaattagggtggctgaagacagaaaattatatttatatggctttttaagttgtcaaagggctatagagcctcataataatgctatgagggagtttggacagggttagtatctttctccagcatcttctcagggagggaagtaaacatagagaggctatgtcacacaccacctgtccacagtggggagtgacattgctggtgcagtgatgatgctagaatgccaaccacattctagatcaggggttctcaaagtgtgatcagagggccctggttgtatctaagacccttgcaggagttctgccagatctggactatttcagaataacactaagatattgttttcctttttcactctcatttcaccagtaaacaatagagttttccgaaggctacatgtcgtgttgagatgtcattgttctgacatcctgtgagatatctactaatgtataatcgtgtgttttcaaaaattctcaattttaatttctaatatgctaaatattgatagatataatccatgtaaacacaataaatttaaagagtgtaaaaggatcctaagacaaaaatgtttgagaattgctgttttagatattgtgctaaggccgttagaaacatgatctcatttaatgcagaaaacacacatatgaggcaagctctactgtcattcccattcaatatgctaggagatgagggcctggagaagttaatgaattgcagaaggtacacgggttgttaagttgcaaagatagaatctgaacccaggtttcaagttaagaactccactgtctgtgttgtcaggcacattgtctttcaaagaagcaccaggaaatgcctggatttggactaatttctcagaagagaaacttcttcccataacctaggctatctccaagggaatgtaaatatgaagattatccttatagacagtgtaaaatagagattattttctagtagtttgtgggccgaggcttgtactctgtgaaacacaaaacagttgagcatcggatctttaaacctggaggattttacttaaaaaagaagtttggattgccagctacccttgaaaaatttggagattttgagctaggctggactcatattcccacatggccacaatcagctgcagtttttatctgctgttcctgctagatagatgtgtgtcctctggtttgccacagacctcactactccttattaccttcctcgtagctcatgttcctcatttatgttgcctgtttgaggtatttgggttagaaacagctggagatgttctgtctactgcatagtgtttataggccatctgctttcaacttacgtgaaaaataaaaagttattaacagtaaaagagccaaatatatcccattctgcttacccaaacctggatgtaataaagacctcactgacagtgccacatagaaagcaaattgcttctttctttactaaagcataatattctgattcattaaagaattaggatctgccagtgaattaacatttatttttaaacatgaatctcttttctttttaagtgtaatagtgaaataagcacattctactcattgccctcattttatgtttattttagtaatgtctactgtcatcattatcatgtctggaccctttataaaaaaaaaatctctgtgaacctctgtgtacatattaaatcagtcatttgaaacaatatgagattgtcaacctaacggactgcattatcctgggcatttagacaacattattgaacttcaaatttttagcttaacataacatttgtcagcagtagatattaagcatttatcataatttataagtatatatttgcttgcctcttttctttttttgcctcaccccagaatataagtttcataaagctggaaactatatctgtttgttcacaatgtatattctatgctttgtacagtgtttagcacttaacagtcaataatgaatgaataaaggaataaatatgtaaatatatcagtgttgtatatgataactcattcttctgtaatcttaagaataatatgtaaaaattctcagcaaaaatgctcatgcttttttcatttgagaattaaataggggagatatttatttcttattatccacataaatatatatccacttctgtgtgtgctatgttctatttaggatagtgcccggtcttcctgatgtgaggtcaataggcaggttacacatctatgtagctaagaataaggtgcatattaagaccaggatgcaagaagaggctgttgaacttgaacattcagcacagagtctcttctcttctatactaaaagatagtcatcctgcagtcggaagtggcagttattcggccattggaaaagtctcatgtaatagtagcttttagatgatgtctcctccaaaggggcattctgctattaacctattgctgaaagagaaataccattgtctattaatactactggaactaaagatgaatagtgaattggccttgatctgacagtgagtttgactttgatagctcgtcacttaaaaaggttcttttatatttatgaaaaaaagcatgacgtcaagccagggggaaaaattgatatcaacatttaagaccaaactcgtagggcttccaaaaaaaaggcccttatgtgaacgtttttttttacatgcataactaattagcttaggttattataagcagggcttctgtgataaagtttccggtggtgtctcgggataccttgtttatagtaccttctctttgccagtccatcttcaaattggaattatagaaagtagagggagggatagtctaccgtctctcactggattggtgccacctaaaacattgttatgctggaaatgctagaatataatcactatcaggtgagatttattctgactcatattcagtctttgaaatataatgcaataaattgatttaatccactttttgttattgtaatagacatactgttttcaataagtataaatctgctcttttaatgctgtttattatttgatgccataagaagtaattcaatgtagttttgaacaaagtaaatattagtaggattcttttttttttttttttttggcctagtgtgtggctaaactatcttcatcagctcctgttcattgctcataagattaaattgtctttatcaagaaaaaagtgacttaaaattgaataatgttgttttttggggaaaagtatttctcgttctgaattaatgtctgtaggaaaggagaaaaaacatcctgttggcttgttaatagtcatgtcttttaaaacacatacgtgtaagtgttatgcatttgaaagaaactacttaatgtagaattgctttttatgttgagttttttcttaattacaatgttgaataatcatgtccaaatgaaaagtgggagaattaatccacaactagttgatttaatcattggaagatttatatttattttctacagccattttacacagttggttcttaaggaggtgtgtgtgtgtgtgtgtgtgtgtgtgtgtgtgtgtgtgttttaaaaagaaagctgttctgttcgccaaggaaagtgaaacaaacaattatgccacttctacattgttgtttgatcttaataaaccctttcatgtgtgttggggaaatttttgccctaagataatttcaaacttttaattattagatatgagaagaaggatacaaggtttgaaagagacgtatagttaattagcagggaaataaaatagggcaaagtattacaccaaatcctactagttagactttaaacttcagtaatatcaaaatccgttagcacagtgcctggtacataacaaaggcttaataatttattctgttggtggcctggtcagtttcatgtttgtgcctgaaggaagagccgtctgaaactcacaaataacagcgctgttttcttttccctccatggctatgttcaggtgcagacccacctcgaaaaccccaccaagtaccacatacagcaagcccaacggcagcaggtaaagcagtacctttctaccactttagcaaataaacatgccaaccaagtcctgagcttgccatgtccaaaccagcctggcgatcatgtcatgccaccggtgccggggagcagcgcacccaacagccccatggctatgcttacgcttaactccaactgtgaaaaagaggtaattcatgtctcctctcctctcctgttttcttatgctaaataacttgtctgttgaatatgattcccacacttaactgtggactctagtttgtccttgtggccacatttaccagcctttgtccccgattcaccatcgtggctgtggcattccagcctgttgtctccatcgctgggttattgggtgtagagcacatgacgggagacctggccctctccaagtgaaatgtggaggcgaggacacttttgccacttgcttcttcttccttagctgagtgctctcttctcttccatgcctttcagtttatgaagcagtgagaatgcagagagaggagaaggggaggtggaaaaggaaaagcaaaaatagaagaggtgtgggacatgctgtttagaagttccgcttgttgtgaatgtctggaatattatttttatttctccctgagttgggggaagaaagaatggaatatgcatggatggatttgaatcatatagcacatgagactttaacggaaacgcaaaggtttaattgctggatacattctgtttcataataaaattgccactgcccgttaaatctgctttggtgaaggctggattggaaacaagactcaaactaccttcaagctaattggtgcatcaaaatttgcagcatacaaatacctgagagctgtgatttaatgctcattatttccaaattatgagatgatgagcttcatctcaatgggatttaccgtactatggactatgaagtgtttatgcaaattcggaggcaacttttctagagttggattgattttaatttctagagggactaaaatctttgcccctatgcccaaaccaactgctttatttttctctacccaaatttgtcatctagcaagatgatttgacacaagttcttccttcattatttcatcttttggtcagattccactttgtttgaaagcttagttcatcttgttgctgtgccatcagctttgtgtgaacaggtcattaaaaagtcatttgcaaatccaagttatagactgtttttgcttgtgtttttgcagggattttataagtttgaagagcaaaacagggcagagagcgagtgcccaggcatgaacacacattcacgagcgtcctgtatgcaggtactgaatgacttggcagcctgaggatgaacactttgtaatgagaatctatatttgtggtggatcacaccttcctgaaaacttaagcatttttttcccccattgttttttttttttttatagagaaagctaggaacattgccattttcctcatagtatctcatgattaaataatgacaagggagaataaactaaaatgtgtttttcccctaagttgctgcaaagattaaaaacttcttaaagtacataaattttaataagatatgaaatatgtactttaacataatccatatatgttatacaaatttgtaggttagcaatttttgtattagtaaaaccaagatgtgtgtgtataatctagatattgtttcctaaatggaatctcatggaacatacattttgaaactatattaatttaataacatataatggatgctttcccaaataactaaagtttcttctactacatcctatttaatggatatataaattatgctatatctatttatatatctatgcatgtatatagatataggagagaatgataagcaacaaaatttgttgcctttctatgtttcctgtcatcaacttgcattatttttgtcataagagaaaaaaatattttaaaaatgctattacatcaagcccactaattttatttttctaagaacaaaattaaaagtggcaaggaaatgttgttcataagtttcctagcctatttgcatatttaccaactcaattagaaaatcatctcttaaagacaaacaaaacaaataaaagtggtgtcaatagaaatggaacctaacaaacagtggatagtagttattcaaaactggccaattattctttttaggggtcattaataagactccttttttgagtgtttactatgttcctggtactttgaatgctctgtacagtttgtcctgaaatcatacaagaatccataagacagtaaatattatgaacccccattttatagattgacaaactgaggctttaaaagattggaggctttgccctaatctagaaagcaggagaacggggattccaacccaaacctatgaattttggattctctcctctttaatggaagtggcaagagacagaagagcatccctgttagttctgtgatttcattgtgtaactatgaagtcctgttaagacccaagcacagacacaccaactagctcaaatacataaggtgtttatgaagaaatgttttcacaggcttgtctttgcaactgctgcaatgcacatgtaatcactgttgtttattatcataacttatgttttggtactttagaaataaaattgatctagtgggaatgtcagctccacgactgtaatgataacctcatcctggtgtactccctggggagtaccaagcacactggtagctgtacaaggagaaacttattttacaagtcactgtaagatgggtgcagggatagccagtggcctgggagccacagtgtccacacttccctgtggaacactacagacggtgttttccttctgcaagaaaagggtaggggccatcgtctttagggaaaaaaggaagtagaatgacagctgtcattcaagatgaagtgctgtggtacatctctcctgtttagggcaggcagtttagcatagttgtgaaagcatgggttaaattgtggctccagtctttcttcagtgtgtgactttgggcaagctgcttctcatttatttcacctggaaaattgctataataatagtacctgccatgatacggttttcgttagggcaaaatcttagcctatgaaaatcctcgaacccaatgcttggcaactcataatcactcattaaatgctggctacaagtattatcctcatcacctattcgtgttaatggtcttcaatactattttatacttcaatactattttagtggaaagaggacagttacttcttagaatctaactaaagaccattattgctttgggtaaaaaaagaccatgagtctctttttaggttgtgttgcatagtttatttatttttgtctctcttctcttaccctttttcctacagatggatgatgtaatcgatgacatcattagcctagaatcaagttataatgaggaaatcttgggcttgatggatcctgctttgcaaatggcaaatacggtattgataacctttttttaagtagaaaatcttgaggtgtttccagggttcttttcttttttcttaaacttttattttatctttgtaactggttcactgattaaatgtattaatagtaaaatggagaattatctcaggatcacaaataagtgactttaacatcagaaattaagaagtttttatgagtttatgaataatcccatgataaaactctacattccctggagtccacgagcagttttgatagggcattagcccttccaattcccttgacatctaatgcccaacccagtacactgcagccaagggaaccattgtgaactgcactattcacagtggtgctctagttggcctgaaaaagttggttcagtttttcaagaaggttttctcatattcttaggtgatagagggacattggagttacccttctccaacagcaaaatctattccaacctcagttcataaacaagtggtcctatttgctattgtatgttacttgtttttctctgtaatttagagccttgcctatattgtttattttccttcattccttacattttagtcttatgttactgttttaccaaagtcttattgcacatcttatttagtccttgcagttattctgtgagtcaagttcggatggtatcattgccctcagttttaaactgtaactaggttagacagtcttacgcaagattacatagcttgggtgtatcagagccaggcctgcttggtaggtctttgaatgccttctccaatccttttctgtttcctctgagagcaatgctatgagactatcatattcttaataactagtgttttaaagaccaatatttattgagaggaaagggaaaaggggagttgtttaatgggtatggagcttcggatttgcaagatgaaaaattctggagatctgtttgataacaatgtgaacatacataacactactgaaccatacacttaaaattggttaagacggcaaattttatcctatgtgttttttaccataatgaaattttttaaaggtatgactaacttccagtagtaaattcccttggccaaaggacaaaataacacttacttaggtacaccagaatcctcagaaaattgagtcttatagttagcattttcttttcttttttttttaaatccatcttgatccaattcttcaagttcacttccttgaactcatgtggggtgaggacttcccttgaaacctcaagcttcttttatgatatttagagtttgtctactttctacccatttaaacccaccccctgattttggaagaaccaggtgttctactattgtgatgaaagtttccatgccatactctccgaacctcttggaatccttggttggcttctgtggaaccttcctgcttacaagttgttgcatcctatgaggccaaactacacttatctagcactcagaatcctaggacaaacatgagtaaaacacttgggggagcatgccctggggaatttataaatatacccaaagacatgggtatatttacatttcactgctctagcagcattaattagcaatggcccagtcatctcaaaagaactttgctgtgagagtggtcattttgctagtggtgtcaaatgggtccctgggcacactcaagtgaactgtagaattgacatgattctgtaaaatcattgactttttttgtaatggcaaagacctttgatatcatttggtctaacctagtactcaatgcattagcctcctctttttttttttttttttttttgatacagggtttcattttgttgcccaggctgatcttgagctcctgggctcaagtgatcttcctccctcaagtagctgggattataggtgtgtgccactacacctggcctgaccttctcttgcatctcgttagtattctccacaaaaaaatcaaggcatccagcttcttggaagcctccaaaaaaggatctgtactagctcactagggaaatagcaaagcacaatggttagaatttagaggtttctgaccagatctggggtcaaaccctgaatcttccatttcctctgtgaccttgcatgttatttagcttcctgaaaccctacatttccccatctgtaaaatggggctgttatatatacctatattatgtggtcaactcacttggtaaagcatctgtagtatttagcattggaaacataagttgtattcaataatgttatctaaattattaagtataacttattaattataatatcaaataatattgatagtatttgtttattcagctgatcttcactgagcccctataatgtatcaagctctatgttagctatctgtgagacatatctatctcacaatatccctcacagtaaataactctgtaaattgcagcatgggtcccagtttgcttcatggagaacttttccacataccaccccttctgaagacagttgtcatgaccccatatatgcttctgtcctttagaatgaatacttggctgggtccatggttcacgcctgtaatcctagtactttgggaggctgaggcaggaggatcacttgagaccaggagttggagatcagcctaggcaacttagagagaatccgtctctgtaaaaatgtaaaaaattagctgggtggggtagtagtacatacctatagtcctagctactcaggaggctgagatgggaggatcacttgagaccaagagttcaaggatgcaatgaatcatgatcgtgccactgtcctttagcctgggcaacagagcaagaccctgtttttagaaaacacatttaaaaataaaaaagtagaatgaatcctcatacctcttcattccatctacattagcgttgaggccttgttccttcattatctcgttgttccgaaagtatattaaagattaatttagcatttatggatatgcctaataggtggccagcaccaggcaaggtgctgtggatgcgaaggtgactaaggtgtgcttcctgttctcacgggggttaccagtctagaagggggagactcttttagcccttgaggggagaaggacaattcaggagcagagaggccatctcaagggaatttccagataagaaagatcctctgggcagagttgaattaactcccagacaggagaggagtcccctgcagccacccttagaagtcactgactttatcccggcatccacttctcttctttatccccatactggaaaggctaaatgtggctccattagagtctttcaacaaatctatttcagcattttgccattaggggaaagacaatgtaacttcaacattaggagcacagactctgaaccagacatctgaatacatactcttgacggagtgattcaacctctctgcttgtgtttccttgtctgtaaaatggggatcataatagcatctactgcaatagaattaatgggagaattataagaggtagcccacaaaaagcatttagaacagttgggccctgataagctctcactaaaagtaagttactagctcttattcttgatgaacttgggttttagttgtcaaaattaagtaacaaagctactgcaacctattaacattttaattttttcccacagtaaagtttaatgttcttcgtgttaggcatttttttcttttatttgattatttgaaatgctttatttcaagttaactacttaggaaaaaataaagtggaaggaacacttagagaggaaactgtcctaagggaattgaagtctagaaataactattctgagagcacaagggccctcttgtactatcacaaacaaagaataaaagtcccagtttacttgtgttaacagtgctcaattgatattcagaaaaggggaccatccagagagaaaaaataataacgttttacaattatcatttacttggaaaaatattcattttggtggagcacaacattgaagaactcaattcagaccagtatgggggcatagacccaggcgcatcttccttcaatttgtttgtccggattagactgtggctttcatctgtccatggtgcagtttgtgctctggaagtgaaatcttgtcatttaggtaaatggcctggataaaaatcccacaaagatgtgaaatatacatgttaatagaagaagtctcttcctttttcttagctctaaaggtgttattttgacctaattatgatgttaactgtatttatcgggaaagttttctaatgcagaagaaccaactacagaatcctttctttaaaatgcatggctaggagacacattttaaattatttccatcaaccttccttttagtagcttcagcaaataagagcggttgatagaaagaacatacaccaccatttaggacacagtttctcaaatgtggaactgttgacatttgggatggataagtctttgtggtgggagactgtcctgtgcattttaggatgcttaacagcatccctggccttcacccactggatgccagcagcaaatcccctgcaggtgcatcaactgaaaatacctccagatattgatccggggaaacaaaatcagctctagtgtggaatgcctgacttggaataatgactggtcacctcagccttgcagattccctgatttctgttcctagatttgcattgcagtctggtaaaaaattgtctaatcgttgacaatgtacttagtaattaacatagcaagtggttttgttgatcaagtgaaaattagctcacctgtcaaaactgtaaagtgggaatccagtactccctagaaaattagaatactgtattgttaatcatagcagttaccacttattgatcactgaagtagcaggcactgtttcacctactttatctctattaaatcttataagacccctgtgagaagaatgttgtcacttttcaattggagacactaagcctcagagaacttgcttaatatcacatagcaagttcgtaaagaggcaggattttaatccggatctctgactcctaagcacaggctataaagttctgcaccattaatcggtaaattggagtatccacattcggctagtaagcggcagggtttttatttcctcaggtctaattggagatgaattgaaagtttgcagtttctaactggttaatatcagcatgttgatactctccccacccccagttctgctgttaacatgggacgtgagcctccgaccaaaaacctccattaggcaatggcaaaaatcttggcttttctttctgtaaaaagcagtaagatgccatacacaaagtgccattttaattctgtgcttggcccaaagtaggcacccaaaaaatgagatgacccccagcaaaatattctgccatgctttctgcttcccactcctaatcagcaagtatgggaaaagcagccgaagcaggaaatctttcagagaagtagatagagggctataagctttttcaactggaagtaatgatgtctgatctcagtagagtgcccaatgaggcatcttgctatagggattttaattcatttccctttttgatgtgcactgtcgtcaatccatgctaatcacagcagtactttctgtagtttttcatgcatctcaatccatttctcactaggtatcccccacgttgctctttgtctcccccaccctgtccatctcgctgtctatggcagaaagcattctctctctcagtcatgtacatatctcttctttagaatatagttagaaaatatgttcttgtccagaagaagcttagaattagatatctgttcaacataggtctatcaatgacttggagatgtgtatcagttgctattatttatccctaacaaatcatcataataacacagtgagttttgcatacaatttgcctatgaaaaccatatgtgtgatttacctttctagagcaagtggaataatttttcttttagcttattgctttgaattttcaagtcacattcttggtttgttaaaacctcaacgttttcccaaaatccaaaattctcaaaagataggggaataaagctttggaatccaaggagttaccagacatcatggcagctgtataagtttagtctttctggtactttacagggctgttttgaaacatgtgagtgcctttcactttgcgttaaattggacaagaataaaactaaacacacacagagcaaggttgaccctgagaaggtaacctatttcaactaaaaccacttagtgaaatgacagctaataatcaaagtcactttttatcaattccttagttagagggccttgaaataccatacaagggcattttaaatgaccacgatgtctatttttgtgcctgtgtatgggggtatgtgtattaggttttatgcatatactataaacgctgctttcaaaaaggagcaaaagagggagttgtattctgctggtctgtctgtcctccctgcctaccccaattctgttcgagccagtgtctgattcacccatcaagaagtatcttattccatgtccattgcctcccacccaaatctctttagctaggggtttaattcatagagtatatgtttagaggctatcacagaaatagatgcaatggttatcaatgaggggaagcacattcgacttgtattttgtggtatattttcatctgtatgttagtggtcattggagaggatgcaaggtactctgttgaatacagtttttactagatacttctcagtcactaaacactttaatcacacctaaatgctttctgaatgtacttttctcagatgtagaatacaattccatgtgtaatcaagaaatgggagggctaaacgacttaaagtcttacccagtaatcatggttatagaaattgtttgaatcaatctagtaatggtacgtgtctgcagtggaaggagtgaggtcagtcaacgatttctccatagttactatttcaaactgtatttcagggcatgggaagggagatcaacttgggccttttctacaaaaacaggcctataaactgctgcaaccagctagttaccaagaaatgcacatacacaaccaaaggaggactcgctgctttaaaacagcccattcagaactagaggaaaaactctgacgctagcttggggaaggctaaatatttcttttactttttttttttattattattctcttgaaagtgtaaatttttgctctcttttaaagtctgtgggctccctcttgtggctttgtggaaaatttcaatttcaaggaaacgctttttctctctagcaataaggaaatcatttccaattaaaaaaaaaaaaactttcattgcttttccttgtaaaagaaaaagtgagaagaagaggtggatacgagaaggaaggaacaaaattaactttaatggaaagtcctatttggtgaaaaggtcattttatatacaatcctgttttacaataatagccaacatttcctgaacacccactgtttgctactagttgtactagataatgcattcaccacattattcattgcctccatgctcaaaataaactgactggctagttagagtagtcattttatgggtgtgagactgtactttcctgcctcaaagggaactggttgaggagatcctgtacctctcttttaatacctgtgaatgaaaaagtaaacatctcatattttcctattttaaaaatgattttttgtatcaaataatttttcttaaataaatcctagagtaggatataggttttatctgaaaaaacatgggaattgttcaacagttaatttctgttactgtttgtctctctctagttgcctgtctcgggaaacttgattgatctttatggaaaccaaggtctgcccccaccaggcctcaccatcagcaactcctgtccagccaaccttcccaacataaaaagggagctcacaggtaaacacctagtaaatgtgcctcttactgcagatttctgtccatttcctgataagacaaagttattgatatagtgatgtgcaaactatatccaactcatggacgtaacttttataggtctctgcagtggttaaaacattatgcaatattttaagacggagaatttatacttgaaaattctgttttttttcaaggagatccttgaaaatctcctgagatactgggaatcggggccaccattactgcatgtcaccaatcactgtgtgtgtggtgaaggtcccctttgtgttggggatagtaggcaactctttcagctgtaactgtctccaccctacctgatatgtatgtttctaacaagcccctagaggcatttgcatttgagaacccagatctgaattttcctttgacacacattcaagcccacaattgggatagcataagaatatatttctcacatcttcagatgcctcctgttgtcttttgctgtattgtgtgcaaaagatttattacacagaggggaaaaaattataaaatggagcaatggatattatttgttcttgaggcaagtgtgaaattacttatttctctactttgcttaatgctttagggaaggcatttatttggtcattaaaacatggcggaaactatattagaactggcattctaccatggtgaattttatggcccttaccacacccctctttttattatttgatccttgcatcctgcaggattggatgaacagactgagaatatggaatatggatttggtacagagaattcctgttccagtcaaggatgtcttaaaaaaattttttttagaaaataagcaggagaaagatgttttttaaaaaccatggatttgagtgaaaagagtaattaataagtaaaaaccatccaaaaccaaaacacaagtagctaccctaccaaaaaggaaaattactgcaagacaacaacaacaacaaaagcaagaatcgtcgggcaggcacagtagctcacgcctgtaatctcagcactttgggaagctgaggcaggcagattgcttgagctcaggagttccaggctgcaatgagctgtgatcacaccactgcactccagcctgggcaagaggaatgagtcctgtctcaaaacaaagcaaaacaaaacaaaacaacaacaacaacaacaacttaagaatcattgaagtggagggtatgtaagtcatgcttctgtgtgaggaaaaaaaaactagaaaatgatttgaactgaccatcacaactgaaagaattcaacttctgagttatatatatatatatatatatatatatatgcacacacatacacacacacacatagatatgcatatatatgcatatatacatggatgtatgcatatagatatgcatatatacatggatgtatgcatatagatatgcatatatacatatataacacccatataataaatatatatggtgtgtatatatatatatatatatatgcttcagtggctataagttatgctaaaaagatttctattttgagataaaattctaaattatggtagtgtaatgcttcagctatcacttctgaaaaggaaataacagagctttctggatccccagattggtcaagtaacatgttttgttttgtttttaattctgttttgttttgttttgttctctgtaaggcaaaaagtaatctcttatcccagagatgtcacaagagttgctatgcaaatagagctttccaattgcagttgccaccaaatgcctctattcctattttgtttttatagactcaagctagtaaatagtggttcctaagttattagatgatttcattacagcaggttttaacagaatctggcaccaacttctgaaaaaatgagttcattctatgaagtagtgaactagttagaagagacagagatccaatttggcagcttttttttttttttttttttttgagacagggtctctctgtgtctcctgagctggtgtgcagtggtgtgatcacggctcactacaacctcgacctcctgggctcaagtgatcctcccacctcagcctcccgtagctgggactgcaagcatgcaccaccatgctggacttatttttttttattttttgtaaagaccaaggctgatcttgaactcctgggctcaagtgatctttccacttccacttcccaaagtgctggaattacaggtgcaagcaaccatgctgggccactactcagtttttatatcagcacgttacacaggcatcaaaaaaggattgaaagcttctatggcctgaaaagaaaatatatcagacccctgataatagagtatcaacagcaaattgacatagttttctaattatcgatttctttcttgctagtatctgtatatgtttacagtgtgctatatataatttttaccagggtttttttttaccattttgtggaagcccagtttttacatattgtatatatgatatatatattgcttttgaaaacatgcaagctttttaaaaagatatcatttttaaaaaaacgtatttttacttagagtcaagtcaaataagcttctgtatgtttgggaaatgagatattttgtagtttacattttgtgcaacttcaaacagttccaacttctaatgacttcattcacgtgcacagcgtgtatttttcccacagagtctgaagcaagagcactggccaaagagaggcagaaaaaggacaatcacaacctgagtaagttggttttatttatgttcatgacatttgatattaatgttccccatatatcaaaaatgtttccagaaattctgtagaggagagttgattcctacagctgttaaaattctctcttatggaagaaaattgtatttgacagaaaccaaggtatatattttccccatattttatctcagatcaaattgaattttgtatatatacttattttcagtttctgaagagtttttatttttcttgtttctagtagtggttttctctctctctctctctctttttggtaagagggagaattgatccccaactacccaattataagtgttgctcacactggaacttattaacaaaaggggattagggaagcaccttctccaatgagatttgaaagaaaaagaaagaaagaaacagatctgaaggggagtaaatggatgaggcagcctcctaaatttctgacatgattcgtgacttaaaaaaaatagccctaaagcatttaaaatattttttacgtgtttaatttactcttgatcaaatcttcaagttgtctcctacgaatactttaattttggtttaatataaacatgtaagacaagttgcacagatttttttaaaaagggattgggcttggaggtaggaaattgtgtgtgaatttctcatctcatggcctcatgtcctctgtttcttaaattgatttttaagaatgtgagtcatatataaacactttctccttataaaaatgatagaataaggccagagttcccctttagtccccaggaatatgcgtgttggtttcaatttggcattgctcttcctgacctttttctgtgtattaagaatatagacacatgcacacagaaaataaatcatatggatttctatatgttttaacacaaacggtatcatattgtccattttatgttgatttttttctactaagcagcatgttttgaagaccttttgctgttagaaatctagatctatctactttttgaaaacaaattgcatagtattttatagtgtgactgtatgatatttagtaacttcccaactgctgtgtgtttatgttgtttctagttttttcctatcataagcaatgccacagttaacatttttatatgtgtctctttgtgtacaagaaagtttgtttctctaggttagaaaccgaactgagaggcacaacttctgggtcctgtgggtgctggtttttactttaaaagctacacccctccccagttctcatgtcaagtgtaagaagctctccttatcttttaaccaagagataaactattatctccaaggcctcctccagcttctaagtaattttaccctaagatatttcttcttttaaaacaccttagaaacaagataattaggcattatccaaaactacttaagtgagatgtggaaaactgagttggatcttgtcaaaaacaatagatacctgtaattaggcacctgaactctcaaggtcaaggttgtcagtaaagtgcaaacatgatcagctcaaactctgaaggctatgaagcaatctaaaagtctcagccaaccattgggaattaatactcaaggttagattgccccttggtcaagctgttcctcttctaggaatttattttgtaagaatattgccaaaatgtacaaaaggatacattcatttattcactcattcaatcagccattactgtatgtatgtgtgtatgtgtgtatatatatatatgtatgtatatgtatatatatatatgtgtgtatatatatatatgtatgtatatatatatatatagagagagagagagagagagagagagacagagacagagacagagacagagaaagaaagagagagagagcgcccctgttttgtgtgaggcacttttctacaatgtgaaccagaaaatgagtttcccatcctgggaagcttgcctttgagttaggggtcatctaccatgtattgctgagtaagatgagcaagggtcagaataatatgtataatatcccattgtgtaaaaatagcacactggggagagacgtgcttgtctctgtgtttatatgaatgtatatgtgcttgggagacaatctagacatcacccttatcagtgacaatttgcccaggcatatagatgttggatagtataaagacttggcttttactttttctttaatacacctttgtattttttgaaattttttactagcttatatcttctttctaataaatgattggaaagggaagtcatggaactaaaaataaaatgtagtacacctaaatattgacagtgaaaggtgtcagctatatgctggtgagtgaaaaaaagatgcagagtcctttttagtatgatcccactttaaatgttttgtttcttatttaacacatatttgttgagagcgtactatgtgccagatgcacaaggttacttggaatgcaacagtgaataaacataacaaatagatcaatgggatacatgaatatgggatggcagaaagttccacgtggagtcaaagggcaggcaagggagtatagtgtcagcatggacatgggaggtagtgaatcagtttcaaagagggtgaccagaaagtctcttaggtaaatctgagtctacctgagggaggtgagtgcagtgctgttcacatatctggaggtacagtgttccaggcaggtggaacagccttatgaagtcctccaatggggcgtgtctggcttgcttgaggaatagcaaggagccagaggggctagagtaattttatgattattatgtgcttggaaaaaaaataagaagaaagtatcatacttcagagttttggggaaggttagctagtggatcaaggaccccacaattccttcttcaaaaccattgaccatcatttagggtttctattttatacaagcctaatggtaggacttcgtattatataaaacggatttcatcattggaataatccctcagccaaaacaaactgcaatttatattgggaaagcagggaatcacattatttatctaggtgtacagactattagtggaacaaaaagaagcatatattctggtatttagagtaactattaacaactttaatccattttgttagactttaaattatttggaatttatttgtttgactacattaattagagacatttatcatgtcatatgccttattatgtcatcctcccctaagaacatgatagttgaccttacactgagatttataaaataggaatgctgtgaagattcatggtacagctaaaaatgctagacttcagttctagggctgtgctatctagtacagtagccattcaccactggtgcctactcagacttgaaatatggctggtccaaattgtgacgtaaaactgaaagtgtaaaatgcgccctggattccaaaaacttagagtgaagaaaagaatgttaagtacttaatttgtaaatgtttacgttgattgcctgttaaaataataatattttggatataatggatttaagaaaatgttaatttcatgtctttctttttactttttaaatagtactactagaaaatttaaacttatatgtaaattatattatatttctgttgggtagcactaggctagggcatgggttttttgtgtggcccatgagttaagaatgttttttacatttttaaatggttaaaaaaggccggacgcagtggctcacacctgtaatcccagcactttgggaggctgaggcggatagatcacttgaggtcaggagctcgagaccaacctggccaacacagtgaaacccccttctctactaaaagtacaaaaattagccaggtgtggtggcatgtgcctgtagtcccagctacttgggaggctgaggcacaagaatctcatgacccaggagatggaggtcgcagtgagctgagatcctgccaccgcactccagcctgggtgacagagcaagactccgtctcaataaataaataaatgctaaaaaaaaaattgtgacatgaaaagtatatacaacgcaaatttcagcatgacaagtaaattctaatgcttttcattgatttgccttgcaaaaaattgtactcgtatgttatattttgaattttgtcagtaaaaaatgtgtggaaatttgttttccctccgcttaagtaaatatctgcataatatcctcaattttgctacttatcccacaaagccagaagtactaacttcctggctctttgcagaaagtttgctgacttctgctctaaggggttaggttagaatttgggctttcaccagatattgttggatgtcctcgccaagtccctaataacagtatctccaaggcaatttcattatttgtaactaaggatagtaactgatttcagggttgttataagaacaaatgagaaatcgtctgtatctaagggctttggaaatggtaaagaaatgtagctcatttttaactgcaataccaagaacatagtaaaaatagggaaaaagtaggttcaggtttccgttgtcatgacctggagaagttaatatgcacatgcctttaatgagatgtgctaaatgcatacatggcactgttactaatagcctttcctgtgctcttttcttgaagttgaacgaagaagaagatttaacataaatgaccgcattaaagaactaggtactttgattcccaagtcaaatgatccgtgagtacaatcgcgtgttaatctgcatcatatatttttcgtacctgaatgttttttcatacgttgtaaaaaatgcagttgtaaaaactaaagtaaagaagtctcccctctccctttggttctattcctaaattcttcttacacctttcttttggttagtctcatcaagctaaaatttcaagacaaaagcattgaattgtgcaaaaggattgttggacactagatgttttggttgtgaggaggtggctttctgaaacctaagaattctttgcaaacaaatactgagcttaaaaaaaatttcctttaatggttcatgcagaacagaactttcaatagttgttaaagctagatttgttgactgtttgctctttgacttgtacagtacctctaaataggcactgatgaacagacattagagacttaaagtttaatgatactccacagacaaaaagggtcaattatttttatgaaaacttgcctactctttgtatgttttaccattgtaggggaaaaaaagtagtgttttaatcctcttattaagtacaggtcagctaatttagatttcagcttttggtctctctttacccaccctgtccccttcagagataacagctgtaaagatgattttctcaagtctttcctaccagcctatagttacctgcaacatcagcagataggacaacaaacacacagtttttatccattagaaattggcccatttgaagcaaggggctagaaaatgtatacattttaatggcccccacaggcattctgtgaaattagcctttgaatatgaccttttagctacctaataaaatgtaaagatgaaatcaagtattattcatgccaggcttattaaatttgctgttcacgttactgttagaggatttgtaacaaaataaaataaaaccattacctattgtgaggtggttttgatgaatgtacaagcacaattccatcttcaatgttttgctttcccaggtttcaaggaaaggcattttcaaacccgaaacatttcagattctcagttctgcagcacaaatttatcctactaaagggctgtgaccttcatttcctatagtcagtcttgcatgatagttgaaattgaattcccattttcctcttctttatcagctttcactttttagcatattcttttaaactgtagcatgtgaatctctttagcaacatattatgaaattatggggctgcagtgaaagcctctatttgcatatcttctttccccgttgtattagaatacttgcgggtttataatctgaactgataatgatctttaattgtaggcattgttttaagacaaaacagactataatctatatggtggtttcccacaccaggtttctagaatgtgccttggggctgctatagagacacagtcttacagactggggtctcagcccggtaccttttctcccaccagagcaagtctgcatttgttgattttatataatggagatctatattcactattctgtgaaaaaagagtccctcttattaccaaacaaaaaaaaagtttgaaaaccctttcttaaactcagaagcataattgattgattggatctcacaaggaagcaaaacccaagataattggttgaaacaatcacttcttttaaactgagtgacccttcaaatatcccaattctgatttctcttcttgctggcctatgtgaagcatcatttattttaactacatttctctctggctgctaaagttacttctcttactttgatcttagctctgaatattaagtctctgcgctcactgtgggtatctcaggacattcccctgggttgccatctttggtgttcagaccccagggatcaactccagggaattctctgggggctggaactgtccctcttatgggagaacttctgtgttgttcttcatgtaacccagatgaggatcaattacttggtgacttgtttaatgaccctccattcaccggttccacctgatacttgtagatgaggaaatggacaaagagaggctagatagcctgcccatgataatccttgattaaaaaaaaaaaaaatagaaggatgctgagtttatgccataaacaatttagtagtgagatctcacagatctgttttaccatcgtttattctcactgagttaacttttgtagttttagaaacctataactctttaacatagtgtttaaggaaactgactttgtaatcaacagacctaactttaagtcctgactctgccatatagtactgtgtggcctaggacaagttgaattgtgtctgtttcaacatgtgcacagtctctctcttacaaggtgcttgtctgggttaagtaagacaatgtgtacaaactgggtgggcaacactaggcacgtggcaaacactcgtgaatggcagctataattaatgtatgattattttatttttaaaattgaatgcttttaaaaatgatacaatggactttggggacttgcggggaagggagggagggggtgggatgggggtgagggataaaagcctacacgttgggtacagtgtacacggcttgggtggtgggtgtaccaaaatcgcaaaaatcaccactaaagaacttatccatgtaaccaagcaccacctgttcccccaaaactattgaaataaaaaaaaattttaaaaagttcaaaaagaaatggagtgctttgaatattgaattttcattgagcctcaaatcctaaaaatatctgttttcctccattttcatcgcagagacatgcgctggaacaagggaaccatcttaaaagcatccgtggactatatccgaaagttgcaacgagaacagcaacgcgcaaaagaacttgaaaaccgacagaagaaactggagcacgccaaccggcatttgttgctcagaatacaggtacgcagcctgagttgtgtaaagtttactgctttttaccgacttcaagacagtagaaacagggatataatgagccataggggagttgacttacgtgatcctaacacagtcaatccttattatttgtggattctgtgtgtgtgaatttgcctacttgtaaccccaaagtcagtatctgtggcacttccacagtcattcttggacatgtgcagagtggcacgtttgagctgcccatggcacgcatttccaggtgaggtcgaatgaccctgcctgaggttgactgtctgctgtcttgtttcagctctcatcctctaaacaagtgctcctttcgtggtctgttgagtactttctacatttttgtggtttctgttggtgatttcgctgtttaaaatgacccccaagcataatgctaaagcactgtctagagttcctgagggcaagaaggccgtgatgtgcttacagagaaaatacatgtgttggataagcttcgttcaggcatgagctacagtgctattggctgtgagtttaatattcatgagtcaacaacatatattacataaggtgaccttcaacagaaacatacataaaacaagattaagtgttgtgactagggtctcacaggaacctaacttgtaattcccctgggaacagtgcttcagtgttcaccaattcagtgttcacagtgactttgtagaacataaaaaaaataagtactgactataccacgttaaacaagaagatgccttagtatttgtagggtccgggaagcagttgatggtcaaaatctgtgtttacagggaacttgggaacacccagaggatcttatattaaggacataattcctggagatagttataaatagtggaattatagcatatatatctttaacttaaactatacaccattagaagaagacatactaattttattaatatgtgccatttgtgcgtcatcctactcagtgggtatatgcaccagtgtaagccggagatggggaattcctctttggtatcaactcctggaacttctctcaggggcttggcgtctcttgttgagtgaaagggcactacttcctctgaaatgatcctcaaaaacagactccctgttatggaccaaagggggtttgtgagggtaattttaatttgctgactttgaacacaacctatctgtaagagtcagtgacaccatatcttcttcttgagtaggctgacccaccttttactagattttgccataaagcaagggttgtctttcaacttttccagtgcaactattcatggagttattttacgaaacagcaatgagaagtatgacaccctagcgaccattgtgtttcacctagtggtgctcctcccggacgttgaacttttcaaacagagcaattcacttataataatggtctccagtcttctgaatgcttatattttgaaatgccacatctctcattcactgcagtgattcctcagctgtggggtggggaggtgggaagccacttccctgttggggtgcattttagattctgggtagtgaagtagaggtagtgtgtaatttgaaagccctcctttcccctcccctcctctactttggcttttgttgttggttttatgttctgtctcttcaataagtagctataggtatttaatctctcgaacatagtctgcctatttataaaagcagcttgtgggccgggcacgtggctcacgcctgtaatcccagcactttgggaggccaaggcgggtggatcacaagatcaggagttcaagaccagcctggccaagatgttgaagccccatctctactaaaaatagaaaaattagctgggcatggtggcgggcgcctgtaatcccagctactcgtgaggctgaggcagagaatcacttgaacccgggaggcagaggttgcagtgagccaagatcgcgccactgcattccagcctaggcgacagagtgagactccatctcaaaaaaaaacaaaaaaataaaaataaaaataaaaccagcttgtggccgggtgcggtggttcacgcctctaatcccagcactttgagaggccaaggtgggtggatcacgagttcaggagttcgagaccagtctggccaacatggtgaaaccctgtctttaccaaaaatacaaaaaaaaaaaaagaaaagaaaagaaaagaaaaattagctgggcatggtggtggatgcctataatcccagctactcatgaggctgaggcaggagaacccgggaggcagaggttgcggtgagctgagattgtgccattgcactccagcctaggctatagagcaagactccgtctcaaaaaacaaacaaaaaaaagcagcttgtactaatgtgttgtttccttctacaagtattaaaatgtaataactattttgaaagagaagctaggttttgttttattttagggttccaaacatgtatattcatatgaaatacgaatattgtgaaatatgtgcattggaaattccatggtgacgatatcttggttttcttccagtgacggtgtgaggcagcctttagaacttttgcatatcacagaaaacattattaattaggaaagctctgtgatgcaattaagccagagttctctagatgagatttatcaccttatttagaaatctgagtaatgctttaatcgctgataaatatttttaattagacaacaaaggattagagtgagatgtttgcctctcttaatccaactttattattctttttctgaaaagacaatctgcctgtgtggaggtactgttcttattagcatgttggtgtagatttacaagagtccatgttttcagtatgggcctaagggctttctttcattttcactctaagtgatgcatgcaaaagttttcacagaagaaagagcatgaatcctttatgtcagtggaactgccattttattaaatagcccagggctttcaaatggtgcctgaagaaacttgtgtttctggagattatgtaaaggaacttgaaggtacttgtgtgacatgtcaagctcctggcttttactcatattgtatccaaagaaggattttgcagacccaaaaaccttgaatttagactgaaacgtggctttgcaggcacatatgtttctcagcttgtgggcagaggttgagaggccatgtcatatggagagtccttcccctctctgataaggaaaggtgacttgcttcaaatttatattctcttgctatatattattgtttcacaaccgtggaagggatagcattggaatggagaagcagaatgcttatcaggaatcaattaaagtctgtgtggttcattttaggagtgcccagggatacactcagaaaggaaaaagggaaagagcttgcttggaaggcattttgcaatgagttacagggggaatcaagggtatttaggaagtgtattacccagctagtgctgctgtagtgaaatgccactgactgggtggtaaacaagagttattttctcataattctggaggctagttgttgtccaagatcaagttgtcagcagggttggtcccttctgaggcctctctccttggcttgtagatgcctgtcttctccctgtgtgttcacatggtcttttttcctgtgtgtgtctgtcccaatctcctcttcttacaaggacaccagtcctattgggtttaggcccactagtaaaatctctttttaaattaattgcctctttaaaggccctatctccaaatacagtcacattccaaggtactaaggttaggacttcaacattcaaatgttttccaggacacaatttagccaataataggaatgtatgtgaggaaggaaaggaaaaaaattgttcatcttatagatgagaacgtacttgttgagttaaaaaaatacttcccctttgccatggtgagatgggctaaatgatgcttctaaaactttagttactggcatagaactttcacagcttttgctatcactacccaaattttttacttcatggcactcttagtgttttagcaatctttttaccatccccctagaccaaaagaaatacctactctttttgttaggtccgaacaacttattaagtatttaggttctaacaacttggtagccatttgaaaaaataaaacatataaattgaaaggaaatagcatttttattttgttattaaataaccatattacttactaactggatgtgtgtgtctgttgggcactgcacgacttctaaagtcttggaatcagattggacaccatcaccccatcgcccttgtttcccaggccacaatgatgttcatgtggcacttgttttccttcaatcacagcaactgccaaaagctcaactttgcaatgatatcatgtggttgaaaagtatatagcacagtctgatgctagaagagaactatcttgagtttagtagttctcaggtagtattgccattgcccttgaaatgttaggctatctccagtgctctgtgagttcattgcagcacacatggggacctcagtgcaaagctgaaggaccatgaaagctgaaggaccatgaactctttactgaatatgtttcttttttcttttctttttttttttttttttttttttgagatggtctttcactcttctagcccaggctggagcgcaatggcgcaatctcggctcactgcaacctccacctcccaggttcaaacgattctcctgcctcagcctcccaagtagctgggattacaggcatgtgccaccacacctggctaatttttgtatttttagtggagacggggtttcaaccatgttgaccaggctgatctcaaactcctgacctcaggtgatccgcccccctcggcctcccaaataatatttttcttttatcagctcgcatttaaaactttatttttgtattttttaacttatcctcagtgtgaacattaatatctgtgagagaccatctctatttttcatacataatcaaatctataaaacacctaaaaatttatttcacatactgccagtggtacttctcctatactttagaacatacagagctcattaatttaaaagaacaaaaaacttttattttgaggatttattgttttccaagtatctgatttttaaaaatagactttatttttcaggacagtttttggttcacagtaaaattgaaatgaagctgcagatatttcccatacacctcattcccccaagcacgcacagccttccccattatcaacattccctaccagagtggcacatttattagaatcaatgaacccgcagtgacatttcattatcctccaaagtctatactttacattccctctggtattgtacattttgtgggtttggccaaatgtctaatgacgcgcatctaccattatagtatcatatagagtggtttcacaggcttaaaagtcctctgtgctctgcctatttcagtgttttatctttactcttattataggaacttgaaatgcaggctcgagctcatggactttcccttattccatccacgggtctctgctctccagatttggtgaatcggatcatcaagcaagaacccgttcttgagaactgcagccaagacctccttcagcatcatgcagacctaacctgtacaacaactctcgatctcacggatggcaccatcaccttcaacaacaacctcggaactgggactgaggccaaccaagcctatagtgtccccacaaaaatgggatccaaactggaagacatcctgatggacgacaccctttctcccgtcggtgtcactgatccactcctttcctcagtgtcccccggagcttccaaaacaagcagccggaggagcagtatgagcatggaagagacggagcacacttgttagcgaatcctccctgcactgcattcgcacaaactgcttcctttcttgattcgtagatttaataacttacctgaaggggttttcttgataattttcctttaatatgaaattttttttcatgctttatcaatagcccaggatatattttatttttagaattttgtgaaacagacttgtatattctattttacaactacaaatgcctccaaagtattgtacaaataagtgtgcagtatctgtgaactgaattcaccacagactttagctttctgagcaagaggattttgcgtcagagaaatgtctgtccatttttattcaggggaaacttgatttgagatttttatgcctgtgacttccttggaaatcaaatgtaaagtttaattgaaagaatgtaaagcaaccaaaaagaaaaaaaaaaagaaagaaagaggaaaagaaatccatactaacccttttccattttataaatgtattgattcattggtactgccttaaagatacagtacccctctagctttgtttagtctttatactgcaaactatttaaagaaatatgtattctgtaaaagaaaaaaaaaatgcggccttttcatgaggatcgtctggttagaaaacataactgataccaaccgaaactgaagggagttagaccaaggctctgaaatataaagtctaatcttgctctcttttattctgtgctgttacagttttcttcatcaatgagtgtgatccagtttttcataagatattttattttgaaatggaaattaatgtcctctcaaagtaaaatattgaggagcactgaaagtatgttttactttttttttattttatttttgcttttgataagaaaaccgaactgggcatatttctaattggctttactatttttatttttaaattatgttttactgttcatttgatttgtacagattctttattatcattgttcttttcaatatatttgtattaatttgtaagaatatgcatcttaaaatggcaagttttccatatttttacaactcactggtggttttccgcattctttgtacacccatgaaagaaaacttttatgcaaggtcttgcatttaaaagacagctttgcgaatattttgtaaattacagtctcactcagaactgtttttggacacatttaaggtgtagtattaataggttaaaaccaggctttctagaaagaataaacttacatatttatttttaggacatgaaaatagcaatattcttggagattgataaccatagcattaatacgcccattatggtcatttaaattggggtttatttcagcaaacttgttgaatttatttttaagaaagaaatactgtattgggaagttactgttacttgataacaatgttttaacaagaagcaatgttataaagttagtttcagtgcattatctacttgtgtagtcctatgcaataacagtagtgttacatgtatcaagcctagatgttttatacagatgccatatagtgttatgagccaggctgttgaatggaatttctcagtagcagcctacaactgaatagcaagtggcataaagcatatccattcagaatgaagtgccttaaatatagcagtagtcttttttggactagcactgactgaactgtaatgtaggggaaagtttcatgatggtatctatagtcaagacgaacatgtagcatggtgcctatgtagacaatataagagcttccaattttccttcagatatttttaatattaaatatattttagtgacagagtgccaacttctttcatcaggaaaccttattcaggagggtttttaaaaagtgtttaaatgtcaaatgtgaattggtgatgggtgatggagggttcagagaggagtgatcgtcagatgtgtgaatggacggtttaggtgaaaataatcaactgcatagttcccatgcacgctgggcaatgagaatccttggaaacattggtgatgctatcagttttatagctttatttcttaagggggtagggaaaattagttcccattctttcaacccccttaactgtatagctcttttcctagaatagtgacgcaaatctgcatgaacagctaattgtaccatagtgttcattgatacaatcatagcattgtctatttttctcttcatatttatatgggggggagggcgctggatgcaaaagttgaagatcgtgatgctatgatgttagttttccttagctgattttgagggtttttaaaaataaagcaaggttgactaacctacggccacgggaacaggaccatggttaagcaaccatatagaaagctttgttgaaagaaagtatggcatcttgtaccactgccctgactgtcacaactcctaaccttgccattgcctgcctccccctccccttctccttaagagacaatttctgcaggtggcaggtgagcaagcccaggagaatgctgcaatcttgggggtggttttatttatttcttttttgccaaatagagtgtggattcatttcaggggctagctaagccaagaggcagtggtttgggcttgttgtttgtaacaagaaaatgatccacaccactcccccgattcccgggtgcagaattgtaactcggggttgggcctctatatggagtgaccaaaatgccaaaattgtccatctgcctctgagtagggcaatggaaataccaaaccttctgactttgccaaaaagcatacaagcaacctggtcatacataggatgacaaaattctttctggttgtttttaaacaataaagcaataagaacaaatacaatacataggaagttaaaagcacaaaggaatgaacttattaatatttttgaaaaatgcactgggaaaaagttgatgtcaataacagtataaaacagccctatttcttgataaaaaatgacaaatgactgtctcttgcggatgcttggtactgtaatgttaataatagtcacctgctgttggatgcagcaataatttctgtatggtccatagcactgtatattatggatcgatattaatgtatccaatgaaataatcgacttgttcttgatagcctcattaaagcatttggtttttcacatag

SEQ ID NO: 92 - DNA, 1176718 bp, Homo sapiens
ccaggatttctctcttcctatttcaggaggactctcacaggctcccacagcctgtgttaagctgaggtttcccctagatctcgtatatccccaacacatacctccacgcacacacatccccaagaacctcgagctcacaccaacagacacacgcgcgcatacacactcgctctcgcttgtccatctccctcccgggggagccggcgcgcgctcccacctttgccgcacactccggcgagccgagcccgcagcgctccaggattctgcggctcggaactcggattgcagctctgaacccccatggtggttttttaaacacttcttttccttctcttcctcgttttgattgcaccgtttccatctgggggctagaggagcaaggcagcagccttcccagccagcccttgttggcttgccatcgtccatctggcttataaaagtttgctgagcgcagtccagagggctgcgctgctcgtcccctcggctggcagaagggggtgacgctgggcagcggcgaggagcgcgccgctgcctctggcgggctttcggcttgaggggcaaggtgaagagcgcaccggccgtggggtttaccgagctggatttgtatgttgcaccatgccttcttggatcggggctgtgattcttcccctcttggggctgctgctctccctccccgccggggcggatgtgaaggctcggagctgcggagaggtccgccaggcgtacggtgccaagggattcagcctggcggacatcccctaccaggagatcgcaggtaagcgcgggcgcgctgcaggggcaggctgcagccctcggctgccgcacgtcccactggccgcccggcgtccccttccttccccctgttgctgagttggtgctcactttctgccaccgctatgggactccgcgtctccgtgttgggcggcggatgctcctgcggcttcttcggcgggggaaggtgtgcgtctccgccgcctcattgtgtgcacacgcgggagcaccctggctcccgcctcccgctgctctcgcgcccttctaccccttagttgatggctcaggcccggctggccagggagcccgggtcactccggggcggctgcaaggcgcagacggagagccgagccgggcgctcactccgcgttctggttcgggcaaacttggaagaactgcgaccgcagtttgcccagcgccacagtctgagtggcgccttctccactcccgcccttgcgccggcaggggcggtggagagacgcggagggctcccccagcccctctctcccctatccgtccttcgggcgacagagcgcccggcgctcgggccgggggcgggcaaggctgggagggaccctcgccggggacctggcctctggacgccggcgtttcaaggctggtttggggacttcacgggctgcctgtttcagatgtggggcgggctttcccgttagggttcctcagtgcttccccagttgctgttggccactcagggcccggggacaccctgccacccggtctggagccggcctcgtctgccagcgaacagccaactttagcgggtggctcagctggggattcgggtccgggttcgggggccccgtgtcccccgcatgcccggccactggcattgctccaccaagagcttgagagcgcccaccctttctctcggcgccagtgtgtgtagcacttggtctccgacaacttgcgcggcagtctgggtgcttgttttccggctcttagctccaaccgaatccgagcttctctggggctctgtgaatgaaacgtgtcggggagagataatcctttggctgctaaagaacagaactgagagaggccgagggaggccaggagatgctgcgagggcgcgggctgctcaaaccgggcagctgaagtccttagtgacctcagatcgtcaagtcaaaacgctgaatttccaccagcctctgtctgctttttgccaaataactggtggatggatgaaaagcattttgcagatatcttagaacatcacagtttcgatacgttgaggaattactattttcttatgattttcaagctgtagaagtgagggtttttacttacactgaaatgaacacatttaaataaatttgagcattggcaaagggggaaaaaaagaggcgcaaattaccacgctcattatatagaaggagctttttcagttcagagccagacattccctttgctgagtctaagttagaatctgtggtgaattataagcctacttttctatccttgttacttcttccttcttttccagaactccttaatttgttaatcaatgaatagagagcgactgtccccacagctccttaagtttcttaactctccttctcctttgtctactgttatttcattctttttaattaattgataaggatcagcttcgcttttttttttccctccccaaatctcagggaattcaactttttaaaaggtttatagtatggatcacttcttctaggaactttttctcctttaatctgggctttttcaaacggtatcttttaagcacacaagatatttcccaacatgatttcagataagatgtctcaaagaagaaaatagttaggtatttttaaattgcttcggtattctttagaggataatgggactctcaggagactagagttcatcctcagcatcaggcacatctctttaatatcaaagtgaagattttcagtgtaaaacaatttctgtagtcaccatgaatgtttgttgagaacattcccaggggttcatgtaaattcttcggtggatatttaactaaagaggtttttgtttttgtttttggtttcctccccacctttttacaattacagtgtttgcttattagctatgaatttctaaaatgtgtgcacttttttttttttaaactcacctactttccatgagtaagggcatactgttaactttgctttaagccttgtgtcctttgatgctggtagacataatcaagatgcaggtcaccacagggtcagaggcacatttaataggaaaataatgaattgaaagataattgtgttttttaaggatatacttgttttttcaaaatcaactttacttaatgctacctattgctgttttaataatcacttaggaaatataccctgttgttacaggaacacactctatctctcctccctagttcttgatactgtttacatttaattatctagtgtaagtggttatcttttcttaaactcttttttatcctttgccttgattgggcatctaatggtttgcttgaagaatttcatgtgtcttcaatctgccagggcacataaatttaaaagaattgctgttcagacttcagattcatgacagctgtttctaattgaaagctatttgcaggtagcttgcttagtgaaataacttgagaagtaataaggacattatgtttcatcatgacattatcaaagttttactcagaactcacaattgtgaaatagtgttgcccttttctattctaggatagaatggaaacccaacagatgaggaagtatcacaggtaatatataaagttatgctttcagagaatgcttgggaaggaggaggccttcaaggggcagtttgcaccatcagttttcactcagcactgattttaaaccatggcaaggagatcagatagactatttatccttgtttgaaaaacttccaaaggagtagactcttgatcccctttcagcaatccattctaatatttagcaattcttgtggtatagaaatgtttccagatatctagccaaaagccttcacaatatgcttgcttattttttcttgttctatcctctgggaagatactgagcagtgaatcatcaggttctttgttaggagagttactctcatcaaaggtcagtgtgaaacattctagtctttcctcattcatcagaattatgacctaagtttccaatcctcctcatgttggtggctctaaacttctaaaggaactctaccactgaaaatagcacctgcttaaaactctgggaaattcagagaatgttgtttcaggcttactctgccactgttttatgccttgagtcttgctaggatcattaattataacactttgtagttaacagtgacttattggcctacatgatcatgttttcattacttatgtaatgtgacattatttaacaatctcttatatagaatttactatgtgcccatcacctacttaaaaattattacctttataatatcaccttactgaattcttccaataacttagtagatactacacattaaccccattttatagataaaaaggctgtgtgacaggaactttaataaacttacctaagggtgactctactagtaagtaatgaggctgcagttcaaacccaggcactctgactccagggtctatatacctaacttggctcactgccttacagtattaaacattcaccatttattttgaatgaatgcatgcaaaatctattctttcctcatttcatatatatatatatacgtatatatatatatacatatatatatatacgtatatatatatatatatacatatatatatatatatgtatatatatatatatatatatatatacgtatatatatatatatagtctggtattattaatcactatatacatatatgtatcccttccagttttgcatgctaaatacgtttctattttgttccaacgtctctaattctcaatatcactttgactttggattttgtattctcaggaattggccatgctaccaccattaaatggttcatgcgtttatgcctttttctgaacgttttctggcaagatatagttacataaaacacagaaactaaagtacatgtcttggtttctttcagtatactaggcctattgaaatattgggttagtccaacaaagctcatgctggaaagttattcatggggctagagggagtaagaacatttatctccacagattagaaaaaaaaatgtaactagctctgttttcagtatttattttgcaactttttctgtcccaggtattttgagagttgggttacagctggatattaaaaaagcactaaagtcttcatctatttgatattaatttatcaagtatttatctaaaaatctacagtttaaaaagattatttgcttgtttcaaaatacataatgtttccttttcactgatctttgcccagtgggcgtttcctttctctggaaacctgtctttctgtctgctcccccggcaaaccaactaatttaatacatttacaatttacacaacttttttttttttttccagtttccatggagatatcacattaacttaaatggaaaacagtgtttggtaactcttactctttaaagccacagtaaatatcgtagtttgagataaattgtttaatttctgtttatctgcctggttcaaagatttcttatttctttgccccctgtttagttagctgatttctttaaaagtttttggaaggacagtgtaagtcacaaatgagtgaggtgaacttcaatttttgtttttgtaatgattctacaagtcactagatttctaaaagaatcacattaattccaggtatcaaagcaatctaaaagttgggctattagaagcgtcacttgttaaactcttgatttgggcattaattttagagcgattgtgagttatcttagctgatttaattagaggataatatgtcatcattgggaacaagagttcatttgagttgactgatatacttttttacataaaatatctctcaactgcattgtatcttaataatagcttgtgagtagaaatataggccactgtcaaaattgatttaaaatgtacagcattatgttctttaagtattatggcataaagattgtgccataaattatgtaagaaagtgactagtgttcttttaaaattatggatgaaatttacgaacacttataaaacacaaaattattgagtagttctaacctaaaatgacctaacttcaatcactagttttgtatagaaatctgagtttagggtaaacattataataaattaattgctttaaaaatgattttaatcttttgatcttatattgaaacccacaaaaataacagtataagaacaacctttacccccacttaattcacatctttcaaattacttctagaaaggccagtaaggtgatttagatttatcttgccagtataaacagtgatttaatattcttttaaacttggtgattttatttctttacagactaaattctgctatgttaaattcttgagctggtacataatttaactttaaatattttcatagatttctccagtattattcaattttcaatgatatatatagtacagtttgaaagtactattgactccctgggatcatatatttgtaataaagggttccatagtggtgagacttgggtaaatattttaaaattctaataatcctggatgaaaatatctaagaatttttaataaccgtggatgaaaaatatgttttaaatgaatgtgccagttagtagccaaaaaaaaaaaaatcaaaatttggtttcacactttcacattattcaggttattgggtattttaataacccattctctctttcttctaggcatttttttcttcatgcaatgagtatttattgtatacctactatgggtaagtcattgtaccaggttctgggggtagaaccccagggaatttgaatcccagcagggaagcagaaattaaggacaccattcacaatgaattaattccaactgagataaatgcatagcactaaggacacctggcactgtgaaagcattttataggagcatttgatcaaatcagaggcagaataatgggttctgaagcatgggcgcccttcagtaaggaagcaggagtgtggaaggggcacaaatttcctgtgtggtgagaataccctgcaaacatgaggagggttccagtccctggggagactggtcagtgagtggggagaggggtgtgggagactggagaagggggcccaaaggtcaggttaatgacttacatagacggaaagaatccaaaggtaacccctgcttcttgaccgtaagttgttccctttttcacagcagacctgaacctttagttaaaaagcccagtagtgctaaagtcaagtttctacacatccagttgtttcaaatatagcacaaagaagcagatttttaaccatttagagcatgtttgccttgtgcactctgtaaaactgtacctgtctgctagccatatgtaagacaaccctggggtgatcaaagactcctagctgctgcagcccttagcagctctctggccctgaggctgtctaccctgttgctgatgacattgcctgggtcataatgcccttctcccctgggagttccttgaccttctgcccttttgggtggtggcccgtttgttagccctgcaaggtctcatgctgtgagggactttccttcacgtgcaaccaaagtgtcttccaaattaagctcactgtgtgctactgccacctgggggtcatgtcgtcctcccccacccccatcagtcctgacatccctcaaactcactacagtgactttggcctttagcctgagtcccttaacaagctgttgaataagtgttttaatcaggattggatacagttttgaaatattacattggttgctctatagagaaaggattgaggggaaaaaacagatacaggaaaaggaggagaggctagctaggactagagtggtgaccatggaaataggaaggattcaagaaatacttagtaggtgaaatggatcaaagttacttacttagcatctactatgtgactgacaatgaataaggactgggttgtgtgtttgtgtatgtgtgtgtgtgagagagagagagagagagagtgcaagagagagagagggaaggaagagagagaagagagaagtaagtgtcccagaaatgttaattgaattaccatggcaataaaaatactttagcatagtttttgtgtgcttcataatggagacaaaactcaatatcattaaaccagcagaagactattaacagtatcagtgtcactgagagaaagagatttctcaaataggatcagatgaattgctaactctcaaaagtgtagaactatcaaaatacatgtaatcagctacaattcactatgaaatttaagtcacagtactttctgctctgtcagtgaaaaaaaaacttcaaattttttaccctaatggagaattaatcaaattgtgccataatttccatcagtaatgatatttggtacttaagctactgacatagcattgttttaatctaagtaccaaatatcattactgattataataacaacgagaggttgaagctgaaaggaggaggcaaaatttaattggagccttgaaggatgggtagcatttgacaaagggccatgaaagaaggaggcagttagggagtaattaaatatgtgagcaaaatagggtgtgcagaggagagcacagaaaggaatctgatattgaatagatagggtgggattggatttttggagggccttgaaaattctaggctttatatgacagaaagtaggtcatcatctcaggttcttggcagagaggtgacatgacgaaagtattgttttggattaggcaagcagtatcacaggatggattagagaaaagatcattaaaggcccctggggagggaagaaggacagctaggagacacttaaattttagaggcttaggcaggagattgccaaggtctcagaggaggatgagaggagtgaagaaggggtgaataaggccatgagagaaggaagaaacaagattaaaagggaaaattttaaaaaattaaaaacttcactctgctgcttagaaattccaataaaagagtttagaggatgagctgttgaaactctcaactcaagtagtctgtgtcagttaagatacttttggcagcaggtcacagaaattcctgactcaactggcttacatagtcagggcaagccgttatttcacataacaagaagtcccagtgcagagtcttgcaggagtgagaaagctgtaagcttgcagtatcaacagggtgccaggttctctctgtcttttggctctcagatccttgttccaccagatcacctccaaataaacacaagatgatggctagagttccaggagctaaggcctcatgacaatgcctagaggcacagaaagaaatgatttcttcccacatgtctcttccttgatgaggcagacaactctcaacagtcccccagcagagatgcccacccttctcattttagaattgcctcctatgcctgtacctagaagggaaggcaaaggatatggtctttcagctggaccctcagatgggagctgatgatcatagcatggcttagctaatcttcattatccttttttttgttattcttttaaatttcaatagctttaggagtacaagtggttgttggttacatggatgaattatatagtagtgaattctgagcttttagcgtacctgtcacccaaatagtgttcattgaacccaagagcaaatttttcatccctcaccctcttcccaccctccctacttcttagtctccggtgtctattataccagggatccccaacccccaggccatggactggtaatggtgtgtggcctgttagtgactgggccatacagcaggaggtaacagtaggcaagtgaacatcactgcctgcgctctgcctcctgtcgaatcagcagcggcattagcttttcataggagcatgaaatctatcgtgaactgtgcatgcgagggatgtaggttgcgtgctcattatgagaatctaatgcctgatggtctgaggtgaaacagtttcatatccaaaccatccccaccaatccatggaaaaactgtcttttatgaaaccattccctggtgccaaaaaggttggggactgctgcattataccactctatgtgcccctgtgtatgcatacttatctcccacttattagtgaaaacgtggtatttggttttctattcctgagtcacttcatttaggataatggcctccaattccatccaagttactgcaaaagacatgatttcatttttttagggctgagtagtattccatagtatatatattccaaattctttttatccacttattgtttcatgggcacttaggtagaattccctgtttgcaattgtgagttgtgttgtgataaatatatgagtgtagttgtctttttgataaaatgacttctcttcctttgactagataaacccaatagtgggattgctggattgaatggtagatctacttttagtcctttgagaaatttccatgctgttttccgtagaagttgcactaatttacgttcccaccaacagtatataagcattccctcttcaccacatctacatcaacatctattgttttttgattttttaaataatggccattctgactaggataaggtggtatctcattgtagttttaattttcatttccatgataattagtaatgttaagcatttttttcacatttttgcccatttgtgtgtcttcttttgaaaaacgtctcttcatgtcatttacacactttttaatgcgattattcattttattcttgctgacttgtttgagatccttgtagattatagatattagtcctttgtcagatgcatagtttgcaaatcttttctttcattctgtagtttgtttactcttttgattatttcctttgctatgcagaagcttgctagattaattaagtctaacttatgtatttttgtttttatttcatttgcttttggagtcttagtcataaattctttgcctaggccaatgtccagaagagtttttcttaggtttcattctataattttaatggtttcaggtcttacaattaagtctttaattcatcttaagttattttttcatatggtgagagatagggatccagttttattcttgtgcatgtgactagacagttttctcaggaccatttgttgaatagggtgtactttccccagtgtatgtttttgtctgctttgtcaaagattcgttggttgtagggattaggctttatttctgggttctctattctgttctattggtctatgtgtctatttttacactattaccatgctatttgggctactatagcattgtagtataatttgaagttgggtgatgtgatgccttcagctttgttctttttgcttaggattgctttggctactcgggctctttgtggttccatatgaattttgggattgctttttctaactctgtgaaaaacgatattggtatattgatagaaattgcattgaatctgtagaatgcttttggcagtatggtcattttcacagtattgattcttccaatccataagcatggggtgtttttccatttgtttgtgtgatctacagtttctttcctcagcgttttgtagctctccttgtagagatctctcacatccttggttaaatatattccttatactttaaaataaaaattttattgttttgcagctattgtaaatgggatggaattcttgatttgattctaagcttggtcattattggtatatagcagtgccactgatttgcatgggttggccttgtaacctgagatattactgagttcatttacaaaatccagtagtcttttggaggagtctttagggtttttttaggtataggaacatatcattggcaaacatagtttgacttcctcttttctaactggaatgccttttatttctttcttttggatagttgctctggctaggacttccagtatgtgttcaatagaagtagtgaaagtgggcatccttgtcttgttccacttattaagggaaatgttcttatggggggatgctttcaacttttccccttcagtatgatgttcactgtgggtgtgtcatatatggcttttattattttgaagtatgctccttctatgcctagtttcttgggggttttttatcatgaagtgatgctgaattttattaaatgctttttcttcatctgctaaaatgaccatatagcttttgttattaattctgtttatgtggtgaattacatttgttgacttgcatatgttgaaccatccttgcattcctgaaatgaagcttagttgatcctggcaaattatccttttgttgtgctatagtatttggtttgctatgttttgttgaggacttttgcatctatgttcatcagagatctcagcccacagttttatttttttgtcgtgtctttcctgacttgggtatcagggtgatactggcttcataggatgagttaggatttcctccttctcaatcttttgaaatagttttggtaggattggtatcacttcttttaatgtctggtcacattcagcatgaacctagctggtcctgggcttcatgttgttggaaaattttttaaattactgatttgatctcactacttgttatttgtctgttcaggatttctatttctttctgattcaagcttggggttttgtgtttccagaaatttattcatttactctagattttctagtttgtgtgcttagagatgttcatagaacatcagatccatgaaaatggagacattacaactgataccacagaaatacaaaagatcatctcagatcattttttgtatttctgtggtatcagttgtaatgtttctatgtttatttctgattgagcttatttgaatcttctctattgttttcctggttaatctagctagtgatttatcaattttatcttttcgaagaaccaacttttcatttcattgatctttgtatttttttttcagtttcggttttgtttagttctggtctgatatttgttatttcttttctgctacctttgggtttggtttgtcttgtttttctagctccttgaggtgtgacattggttgtcaatttgtgatctttttgtcttttttgatgtagacatttagtgctataagctttcctgttagtactgcttttacagtatcccagagattttgataacttgtgtcactgtcatcattcattttgaaaaaattattaattttaatgttgattttgtcattgacctaaaagtccttcaggagcagataatttaatttccacatatttgtatagttttgggaatccctcttggaattgatttttaggtttattctgctgcagtctgagaagatgcctgatatgatttttctttttaaaaatttattggaacttgttttgtggcctattgtatggtctatcttggaaactattccatgtgcttatgacaagaatgtatattctctagtttggtgtagaatggtctgtaagcctctgttaggtccatttgtcctagaatccagtttatggccagtgttcctttgttgactttctgcctcaatgatctagctagtgttgtgttgaagtcccccactatgactgtattgctgtatttctcttttatggaatctattagtatttgttttacaaatccggaagctctggtgttaggtgtatgtttatttaaggttgttatctcttcttgttgagttgaccaactatcattatataatgaccttctatgtctttttattatttatttatttatttacttttgttgatttaatgtctgatttatctgatataagaatgaccagtgctgctcatttttggatgccatttgtgtggaatattttgttccactcctttaccttgagtctataagaatctttacaagttaagtgggtctcttgaaggcaacatatacttagattgtgcttattaaattaattccactaatcttatgttttaagtggagcatttagatcatttatattccaagttaatagtaatatattaaatactattccagtcatcatgttgattactacctagttgttttgtattctccatcatgttactattttataagcagtgagttttatacttttgaatgttttttatactgttgcgtatagaactttcattctgatgtttagaattcctttgagcatttcttataggtccagtctagtggtgacagattctctccgagtttgctttactgggagagaccttatttctccctcatttatgaaactaagttttgcaccatacaaaattcttggtgaccattactctgtttaagaagactaaagataggattccagtcccctctggcttgtgagttttttgctgggaagtctgccattagtctgacagattttcctttataagttttgatgcctttgtctcactagtcttagaattatttctttcatgttgactttagataacctgatgattacatgccttactgatattctttttgcaatgaatctcccagagttctttgagactcttgtgtctggatgtttaaatttctatcaagaccagacaagtttgcctcaaatattccctcaaataggttttccaaactttttactttttcttcttctccttcaggaatacctatgattatagggtttggatgttttagagaatcccatatttgttggagactgtattcatttcttttgattcttttttctttgtttttgttcggttgggtaaacccaaaagccttatatccaagctctgaaattatttcttttgcttggtctagtctcttggtaaaacttttcactgcattttgtaactccctaaatgagtctttcatttccagaagttctgtgttttgttttgttttgattttttgattttttaaaatctatctccttggaaaattttcattcatatcttgagttgttttcttgatttctttatgttggttttgacttcctcttggatctcattcagaaactttatgatcaatattttgaattctttatctggtatttccaagatttcattttggtttagatttattgctaaagagttaatgtgatcttttgagggcattgcaaaactctgcttttcatattgccagaattatttttctgcttccttctcatctggatagaattgtttcttcttattatttttgaattgagttttgactgaactgggttttttttttctccttgaggatgtaactataatgtgtatagtttatgattccctagctttgggtctgggtaatttcagttgcaaagactctgtgtaagttccttggttatacagaattttgtctgatggctttcttaggtcgtgcttttagtagcaatgtagcgggtgtgtgaatagggccactgtctcctgtggtgctggaatggcagaggtctcctgaagcttattttattcctcttgatgtgtacttttttccccagtattttttcagtgggttgaacaatttagtcttcagtttaattagaggtgttcatgggtaagaattggctgtggctaaggtaggtgggtatatgcaataccacaatggtgagcacacatcccagccctgatggatgtagcctagggagttcccatgaaatgcactgaggtcttcataggtgaaaggaagggtgctacctcagctctactacaagcctggcaaaaaacaacccaactccctatcatcctcctgtcccagtgttctggatattcagattagacaagcatctttccatcttcaggaatgctgacattttgtgtagagagggagcagggctctactcctcttgcaagcctgaccccagaggacacacatcctgtggggacacagtcaccccaaaatgctctataaagaccatctacagatgcacccaagccaagctcctacaggagacatcctggctgtgtctgcagcagtgggtgagggggagaagtcccctctacgtcacttcatgagtactggggctgctcgaccgctggggaagaattgtagtcttcccactcagctgagcactgtgcccatccctctgctgaaagagttgcagctgctcctagcccacaagcagcaagttcacggacacagaaaagcctgcactctgtttcttttgtcccacagagtgctcccttggtatgatgcactccccctttccctaggtatgacaatccctggggaacagaccaccgtgaatcctgctgttcctctgggtctagccaccatgtggggttgccacaatccaggttggtactgaggcatgtctacaagggatcctgtgatgtgaagacacaagggttggaagtccctgagcagaacaaagtctcgcaatgggtgcacactcagtatggcacctgctactacaggttgggaccgggggaacaggaagggaccctgttcgagatggtagcccaatataatgccctcgagaagtccccagatcgcagcccgctccagtacttgggctcatggtggcaaaaaagctctccttgagtttggataccagcagtctgctgcaagggctagagatgccaagagcattcccacctaccctttccacagaatactaagtctctcttgatttgatctctgcaagcttcttgattccttaatttttgtgtatgctgtagattcttccaatgaactttccaatgggctccaacaatctccccttaacattccatttaggctatggttattcacattcacctgtaattcgttttttttgttgttgttgttctgaagggaattgttcacccatgtctctagtcagccatctagaaaagccctctgatccctcaggccatggactggtctacaggacttgcagtagcttgggctttgctcttagctccagagacaagtgatatgggtggagctggaccaggctgacctgtcctctccggtctcccagtggcaggtgcgagcaccagctctgatgggggtggcaggggagtggtgtgggctctgtaggtctgtcttggtctgttcaggatttctaaataaggctgtttggtgtggtttggtggctttctcacttgccagctgtagcatcaatgtactgggcatgtgagcgggctcaagtcctcctgggtagctggggtggtgtggacaatggtgttagctgaggtcaaagaagagttttctccttcacaagcactgtgttactgtgtcagaagatgttgtaatgggctgtgctgggtgaagtcgggccaggaggtagcgcttgtaggagagaaccagctgctggggtggccatgggatgcttggcctgtgttattcaggggaagcactcagatgttgctggtgatgggcagggccgtggaactcctaaaaggccctgtctgtgttctgctgccaaggtgggtggaggggaaaagctgggtgggggctgggtcaggcagtcccgtgctttggctccctaggtgtgagtgcaagcaggagccctgatgggagtcagtgggaaattccctggccactggggtaatgtttcagagaggaatggaaccactttcgctgcataaaagagtccacgctgggagccgggcagcaggtggcaatgagacccacccagctcccatgcctttgacaaggcagatctcacacccacagacttctgctggcagaaagctgcaagggccggctgggtcccacagtgcaagactgccacacactgcaagacttcccccgcaagacagaaaccgcagctcttaggccacaccccttctagtttggcccacgaagcaggggcacctggctcctgtgtccatgccagaagcatgctttatgcttaagattaggttgcaaatctcgcttgggagcttctttcagcctgtggccatctcctgagttagctagcagattttcacgtgggcgtctgtgagttggattaggagtgtcttccttctgcccctcctggcgcctgggcgggcatgcaaagcacttctccatgctgctccttctccccactgctccccaaatcagctctagcacccggtagggttaaggagctcccccatggcctggattaagcggctccccagtgggaatgtgtatgaaggagacagtctctcccctttcacgctccaaagactgaagttttctgcctgactcacagtgcagcctgctgcctactgctcctttcacagtatccaaagtttctttcactttttctcttgagttcctctgttccttcttagataaaagtgcacagcgtgaatctctacatactattttgctcttttcaaaagggtgacgcacactaacaaagcctctaatctgccatcttcaaaaaaaaaacttcataatcttaataagaatcccaataaattgagtagtaattgagaaattgagagaaactgctgaggctgtctgaattaatgaggtatttggcattgtcactttagtccagtatttctcaaccctggccagtgatgaactgattaggtattaacaactgcctgggtgtggaggggacactgattcatagcatttggtaagttttgtggtataaatgttctcaccatgaacaatttcaagctaccaacagtttaacagccagttcacaaaattccttaaaatttaacagtcttctaggctataatgtggggcactgaaaattatctatacttgagcaccgttattcagttttggatactctgatttaattgatttgggaaagggcacagtccttccttcttctattcttctctccttccttccttcattctttccctcctttcataatttcctaatttagatgtgctcccaggattgagaatgagtgatgtagagcagtgagcttcctaaactttactatgcaccagaatcaccgaaaggcttgcaaaacacaaatggctgggctccacctcccagactttctgattcagtagtagttctggcctggagtctgtaatttgcgtttctaacaagttctcaggtgatgctgatgttgttgggtcaggtatcatactttgagtctctggggctcatactctggttgccattcattgtggttttaaatatggatttctttcagagtgggcagtcaccttttggataatggtttttgtattgttttttacattggttgtgggtgagaatctccacccacaaagtgtgttactgctacaagttgtactacttagatctccccgcatactttaaaaagtttacatgagcccctagggggactaaggaaaagagcagaatgggaccagagcagtctatcccatgtctgcctggaacaaaagaggccaacgattcttcttcctaagtagaatgggctctccacattgctttaaatgggaaatgggcaatggcatttcaggtttctttcaccacaggatcctatttttcttactaatatggtatgccttctgttggtacctatgactcttaattaatttttggtcctgttgagatttctggtcaagagaaattccatccccccaacctcctccttgagctgtttttcctatcctagcctctcaggcacagatctagccatttcccctgacttttagactgttatgcaaggcgactacatttagagctggtcactctgcattttgtacacattgaattaaagatatagcataatacattctgggcatgcacacctgcactctctaggctttactagttgcatgtttgctccttacatcatagttttaggtttatcaagcaattggcttcctctctttgtgcccccaggacagctgagattagcaggggccagtgcttctccacagaatttgaaggaactagaggtattttttttcttaagattgcagtgatgttgaggcaaccattttctttgcaaagaaaacaccttgaagtgttctaaaaaataataataataaataacttttatttactattttcttaatagatgagaataactcaaagtcactagcacttgtgaaatgaacttaacaaaagccactatgattgagaccatcctggcttacacggtgaaacctcgtctctactaaaaatacaaaaaaattagccggatgtggtggtgggcacctgtattcccagctactagggaggttgaggcaggaggtgaaccccagaggcggagcttgcagtgagccgagattgtgccactgcattcaggcctgggcggcagagcaagactgtctcaaaaaaaaaaaaaaaaaaaaaaaaaaaagccactatgcacacattataggtatttttaaatgacaggccttacattttttcctggaaaaaaaaaattgtcttttagctgtttgcttatcctaatttcccccccaaatctccatgattgggagtttttcaaacttaaaaaactgtgacatttaaaatttctggtaatttgttctcttttttcttttctttttttttttacagccaaatatttaacaaaaattttaagtataatgtaacattttattatgaaagaaacaactactggaaactaacttgcaacaaaaaccattctagtatctttgcagtacccttaggagatacctaattctttaaagagatgtttatattaatgaactgattttagaagacagaatttttgagatcgcttttagatacctacaagctatattaaaaatcaccaataaacaaattaagattatctttgacctctgttttctgttggcctaacaaatgtttttgcagagtttaggattgctattttgaaaatgggaacttgtaattctaaagtactaacaatctgaaaatgcaggattgctggacactcctatgtggtgatccattattagcttctcctccaactatatttgccttgaacttgagaatcttagtttactgttacttttacattatcaagtgctaatgtgtgaaaggattttattatgcttttactactcatttcatgatatggtatcttattcaatattctttcacagacttggggatattagatatcaggtcaagcattatgttaaaagcttaggccaatctttttatatgaccgcaataaagaatatattcatttcacttatattaccacatggccctcataaaaggtcagtttcaattgaatataaaataccttacaaatggcaaatcatatgtcatcaacaacacacctattatgaataatctattttcaattaccaccttcccctctttaaaatataacttggaaatgtcttagaatcactaagagatcttcattatgtattttgtgcaaaagacataaaaattgtatatttttctgttttagtcaacaaaatatgtatggagtaatcacacttaaatttcagttaaaacaagttaggtgcatcagatattcagaccaaaaaacatgaaattatattttttccattttgttgttaacacaaaatttaactaattaactgaatcagttactcggcctgggctattgatgatgagataatattacaagaagttatatgtatacacataagctggttgctgtgatttaggagtgccaatttattcttactcagaacatgcttagcagtgtatacaaaggtttccagtataacaaagggttgactatatatagaaatataggttagaatgagcttaattctatgtgataaccaaggttgatttttacaactggaataacaatttcctagaacagaaaaacctgtagcatatttaaaaatgagttttaacctttctagccatgattttaaaaagcacagtcttgacaaaactgcttagtcccctaaaggatatattttcaaaagtatgatcttatgtttgaaaaaaaaaaagtctaaaaatgttctgtactttaaaaggcccacaaaaagtgttttttttttttttcttttttaagtgagcctctgtcacaattactataatcaggaaaaatggaatacaaataagcaagagcaggctttttcccagtacgacacttcctacagctatcttcattcagggtgacaatttctattttaacctaattaagtataagagaggaccagtgtcctaagccataagcctgaaggttcctggaagtactgagctgctcattacctcccgggcactgctgggagccgctgcctgaaacttctggaaggtgccacggatgcccagaaggaggctctgctgcacagcgccagcctgtaggtgcaccaccttcaaccgcatttcagcctggttactgtggaattgattttcacggctcatgacagaagctgttttcagcccatgaaaaggaagtggctggagctgatacgcctaacacaaacagcaaattgctccatggctttcatagcattcgaggcctgttaccttaaggttctaatggccttttaacagtgtttccagctgagcagcagatgtaaaggatactgaacattgaaagcactgttcttttttcccctccctgaaagaatcattgtttacagacattgtaccaacaccatatcctaggacctattcactggcatgttagatttgaaaaactgaaacaaatttcagataaatagaaagtattatcagtgccataaacctaccaccttactgagctgtctgtcctatattaccacccatcaggaactgagatcactgaggacgtattttcaccattaataggggcccccatttggtaatatcgcatcagggaaaataattaatggaaccctgtgaaacctctgaaactccttatactttaaattgattgattttaatcctaaaaattgctgtgtatttctgaaaataacacatttaacatttagaattgtatcctttctgcctttggcttccctttctgttgttctgagtgtttagtttcgtcctctgttggtaagggttgtgaaatgtttgccttataggcagctatgggcttcctgcatagggaacatgaaggcctttaaaaggtttggtctgttgaaagaggttggcatttcagtcttgtggacttttgggaaaaaaatgttaaacataactgaagagcccttgtcaaattggaggtttttccattttaaaaactagagaaatagtatgtcttttgatttcactttggtccaagcagcgcctcatatttccactttccagtggtaactagcagaggtaagagaaaaacagccatgcgggtgagtcatcattcctcactccaggaaatggctcattttacaagcttttggaaggacctttgggaagttgtgagctgccaccatttttgaattgaaaatatacatatgttgcaactctgatgtaaaaggcatatagttcctttttcctccacctcttggtttctccttctccttctcttcttgctcatataacctgtgtagttttccgcaggagctcccacttgatgggtaacaggagaaaacattttagtctgatctagttgaaaatgtagtctgatcagttttgcctttctagctgacagtcaatcaagtgggatacttgctgtggtgcagtggctttgactcctggctcctctacttagccttttctgaacctctctgtgccttgatttttccatctgtaaacaggggtaatagcaattcctatctctcatcactgggattgtgctacacgaatgaacacttctaaagctcttagaatagtatctgacaagtacgaaaggctgtacacatgcttgtcaattaacacagagtagaggaggaaataaatctcttagattgcggagtgataaaggagtgactctttctcacgaaagaaaactgagggtcctagggctctgcccatttccagggccctgctggcctgcatatctgggggtggtatactttgtgatctgctcttattcaagttgggaaggaccgggtaactagtccccttcctttggtattcaccctcacattggcctttctgggcatgaagacctcctgagtcactggtttgtcactcaactggcctctggcccacctccagccttgatcacttggcatggggggaccatgacaagcctctggtttgcaactccgctgctttctgagttcttcccaggagggctctagggattgctgagccagaccagtgctacccaggtgaggggtgtagctctccctctgagtactctgtgccccaaagttgaccctaaagttggtccaggtagcccaccaggcaatctcttcacagaatcctaggcagaatttgggccccacatcctgcttccctttggcttcccagcattgaggcaaagctcagagagaaactgggtgtattagtttgttttcacactgctgataaagacatatccaagactgggcaatttacaaaagaaagaggtttaatgaactcacagttccacatggctggggaggcctcacaatcatggtggagggtgaaagacacgtctcacatggcagcagtcaagagaagagaatgagagccaagcgaaaggggtttgctcttataaaaccatcagatctcgtgagacttattcactaccacaaaacagtatggaggaaaccatccccatgattcagttatctcccactgggtccctctacaacctgagggaatgatgggagctacaattcaagatgagatttgggtggggacatagccaagccgtatcactgggtgacttggcaaaccattaccattcttccacctccttcctttgcacagaccccttgggcagggatgggtttgctatctctttctctttctgactggaattcaagcccttctgccacatttagagacttctgcctactaaagagatgatgtaacagaccctcatgcccttagaggtggaaacctataaggaaataaatgatttaaggagcaaacagaatggaatctgtttttaaagtatttgtaaaacattatacccattacataaacaatatgaaaactttcaaagaatctcttgagcatcaagtaaattggaaataatatgaactttttatttacataggaatctttgggattccttgcagatactactatatagaagcaaaaggacttaattccttgtctcatgcttgcaaattggttaaagttttcttaccttttcaactctggtttcctatctatacagagagaagtctcaaaataaatgttagttctccttttccccattccttcatgacatgtggtgataagaaatcttcctattccttgttcagcaacagggagaaaatgtaggaggctgtaatccccactctagacttagtcattttaatttctttttatgatgagctctgaagagagaagctctaatagaactttaaaaggtgatcttgaaatgctgttaaatgtcaaacagcaaatctttaaaaacatttactttctttttttggtcttctagttggaaatggcactgaaacatctctctcatctcatttttcacaggtttctgtttgttgtttttaccatcaggagaatgatctgtttgataagttgctttgattatttcgatttgttgaaaccagtggttctcaaacttgaatgtgcaccagaatcatccaaaagtcttattcaaacctaaacaggtgggccccaccctgagagtttttgattcagtagatctgagatggagcccaaattgtgtttctaacaagctcccaggaaatgcaggtgctggtgttctctggaccacactttgagaaccactgtcttaaaatttaagacttcaactatcagcagttcccttttttttccccccaggggtttgagaatacatttcaaacatggtttgacattcaataactcaaactatttttctaacttacttctaggcatttgccttctagaaatttccatctgataaaagatttttccaatacacttacttttcttcctgactaatttgatttgtgcacactcgtgacaatgctgatgtcttccctgcttttatccaccaagtaaaatccaaccctgttgaaagttctcttcaaactcccttcaaaatcccttttaaattcatttgccctaagcctcttggttcctgttttcacctttgccaagcttgtatagtgtttgtctctttattaggtaactaatccacttctactcttatattttcttgtatcatttaaaatgagggacttagtttttgtttctcaaattgcctctaagatgtcagaggtcattctaacacatatttttattccctggagcacagtgcttgaacacagtaggtactcaataaataattaaatactccttggttggaaatataaaggaattttttaaactttgcttttgttttgttttcttaccaggcataccttccagacaactttcagtaagatcaaaattaaattgtgtaatgtagagacacccttatattttctttgaaagattgcagctgataagctatattggcttaagccaatggaaatcagtttgcaaaagtatagaccaccagagtttattgtgtggaacatgcattttgttgcctttatattgttttaaagcataacatttctcccaatgaagctctgttttatataggtatatgtctatcaaaatgttttttcaaaacatggcatattttagctatcactgacagcaattttcaaatacctgaaaagattagagaagttaaacataaagagtactttaaatggcagtgacatttcctgggagataaagaagttgatatagaggaaatttagtttaaaaagtcaggcctagggataaagcaatcaaattgtactgccttttgaatgatctatttatgatggaggctttgaataataaattgtgcttctggaatgtacatagaaaccacttgtaattttgtggattccattttaagctgttgcctacttaggctctcttacctgtatcagtgcaggtcagaaacaatttatttttaatcacttgactaaaagaatagcatccacattttccctgcccttaaggtacacatagagcattgaagattgacttacaggtgattaatttcagtatgatgtggggagtggagggataaacctgctgggagcctaaaggaggacaggtgaaggtaaccatggctgggaggtgggggatgagaagaaaaaccgagtgctctgatacagtattaattgttctttgatataaatggatgaaccctaattatatagttaatatggaggctacattcctctcttcaatagaagatcatgccctatgaacctcctgagaaatgtcagctctggttttacaaaactgcattcattgatctttgttcaagtaaatggaacttgcatctgtccttaggaaatggtatataactaccaagggagagatttaatgtaaaattaatatacttcccatagtttgaataaaatttctagagaaatgttaggaaaataatcacatttatcacatatgattatccctgctacagatgtgggtttaaatggtgatcattctaccacttcatataccaacattcctttagcaaaaattagtatatgatcgtgctgtgtattttaaatattaggcatggtggctcacgcctataattcaagcatttgggaggccaaggttgaaggatcacttgaggccaggagtttgagactggcttgggcaacatggtaagaccctgtctctacaaaaaacaaaatcacagttagtcaggtgtggtggcatgtgcctgtagtcccagctaccgaagaggctgagaagaggatcacttgagcccaggagtttgaagttactgtgatctatgatcacaccactgcactccagcctgggtgacagactgagactctatctcttataaaaacaaaaatgaaaatgaaagatccatagatagtacagctaccatattaaagtgtgtatgcttgtgtacaaaatataaatatttttataaccaaagatgatactaatggtgtggctattttttgccataggtgactaaatagaacaattgtttcatgaatcccttttactaacttttcttaggtagatggtgcaaccagtggttccagatggagaaaaggtgaaaacaagttggcatttttttgtgcccttcaagatctgacttgctttattttttaatttttatgttttctagcacatttgaaagtgtgaacatttaaactcttattctgtttcagtttgcatatgaagatgttttaagtaagttctggaattatataaaaaaaaaatagagagagtgaggatgcccagatgacaacaagcagaaaaattcatcctttaaataaaagcctctattctcatttggaaagcaaaatgttctctcttaaaagtagcagctgtaaaaaaagcaggaaggcagaccacactaatctaagttgtaaaatatgttttggtagcttaacagagatttagctgtttctgagaaaaaaaatcaaatctaattttaaaatgaaggtatttaaaaccatggcacaagggagccttatttatggagctggtgggaagccaggatgtttccaatccgctgctcttacaggagcctgtgcctcgccagttctgtgctgcagtgggcagccaactgaagtgcatgagtcaaatgcacgaagcagcagacacctgtcctttcagaaggcaagaggtgatgaaatgagtgaattccagaactagtggaaagaaaacgtaatgattaccccagatttttttcttctatttatttatttttattgatgcataatagctgcacatagttttcgggtacgcatgataatttaatacattcataaaccttgtaaagatcaaatcagtgtacctgagatttccatcaccttaaagatttatcttctttttatactagaaccattcaaattcttctcttctagctattttgcagtatatattattataaaccatagtcaccatactgatctaacactgtctcttttttctatcacatttcagattttgtttttcttaaaattgatctgtacaaactaatatttctttctaaaaacaaggtgaaaagtgtttgggtttttttccccctacatggaattcaagctttgaacttgtgtgtttctttcaatgtcatacatactgatctttatagaatactgaaggtgctgtttcttttctaaatggtatgcctgatctttgaatgaaaggtatatcatggtgccaaaaaccttcaacatttagccttgggaccccattgcttgcacagtggacctattttctaatctggaaaatataagcctgtataccaagaatatattttttgaggctggggagtatatttttttggataagttcactaattaccataataaatagtaaatacaaattttcttgtgatctagtacataagctgggccctgtggctcatgcctgtaatctcagcattttgggaggccaaagttgatggattactggaggccaggagttcaagaccagcctggccaacatggagaaacctcatctatattaaaaatacaaaaattagctgggtgcagtggtgcacgcctgtagtcccaattgcaattgctagggaggctgaggtataagaaatgagaattgcttgagatgttgtaagttttaagcttgagcccaggaggcagagagtgtagtgagccgagattaccccactgtactccagcctgggcgacagagtgagactccatctcaaaaaaaaaaaaaaaaaaaagatctaatacatgaaacctaatttgctaaaacaattatgtttcctaatttctaaagaaaatttttctgtttcatttggaaaaaaataagacagaaagtaatgacagtatgattaaaagttgctttcctatggacaagagagatcgtcattttttttttccttaaaatgcgtttagtaggaataatttatctctcctcttacctcttaaaatattttacttaaatattttggagcagtaatcactttttaacttgttattacaaatatgaaatataaatatttggtatatttgattagtcttcccttagtctgtaaactctgaaaggcaggatcaggtctcatttatcctggcatagccctcagtgcctggctcagataagaaatttagtacacatataatgaacaatcaaatggtgacaatgacctaggctttcatttgattcctagaaaacaacctctatgtagatgttgactaagtcctgtatgttctctgttatgaaaaatactctgtatactactaggcatgtgctatcatccagtccttatattacggcttttcatttagattgatttttatggagcacatgaacttggccctcaaggagcttactctgtaggagaatacaaagtatgaggtgtcatcaaaggtatttcacattgagactgatgttgagatgtttctataccatgtcaattagcaatctagagggtaaaatttatactgagagcaggtacagctaatgttatacattattttgtccaacctaatctttagaaagatatcttccttgccttttgcctgtaactttgtgaaaaaaaaagcattgttaatgggctgggcatggtggcttaggcctctagtccaggtgatctgggaggctgaggtgggaggattgcttaaggctaggagttcgagaccaacctgggcaacatagtgagatcttttctctaccaaaaaaaaaattatcaggcatgatggtacatgcttgtagtcccagctactcaggaggctgacggggaggactgtttgagcacaggtggtggctggggctgcaataagctatgatcataccactgcacttaacctgggcaacagagcaagatcctgtctaaaaaaaaaatcattgttataaaaccattactttcactataagtggaatggtctacacttacctttcttaaaggataaaatagtctcttctcttttctctcgttatagcaaaagtatcagatgattggcctttccatatagttgaaggtcacccattaatgaaatgaaacagaatcaaggtaaactatggaaattacagtaagattgttaaaaagaggcttcatgttgcaacactgcatatatgttctgataaaacagaacatttattgagctctctctaggtcccacatattgttttaaactcttgtagtatctcgcataatccttacatcatcttttcatcataggcatcatcaccacattttacagatgaggaaactgaggcagagaggaaactggggcagagacaattcacttgtccaaggacacaggtgggaaagcagataagccaggcagattctaaagcccacatacaaaactactatctaggtgaattatatgatttcattttcaaaggagaaaattaactttttctagtattaaatttctcaaatcattgagctacataccctgtaatgcaattctttccaaatattaggaagcatttagctctcagttgttagagaaggtaagaagtagtaaaaaattattccggtattgagacacttctagaaacttccagtaagatcaagtgatagcttattagtttgatagacattttagtcattatgggtaaaactttgtagtattacattgtcattactcgggctgtttgcatctgaatgctcctcttcagtttgagaaattcccatcctcttgagtcttcatgggaggcagagcttccctaaagttacagaaactgaaaattccagatgcttgctttccccagctcctttgcatccaaggtgtgggtacatgacctacaatagaccaatgatatatgccagtctcagtctttgctttggctacttgtaacacaaagaagcagcaacagtgaagaactcattctgcaggtagcagtggccaaatggcactcatggaggtttcagcattgtcctcaagtatccagtgctgagggtcaggaatagggctctctgtgccataaagggctcactggctacaatggtgccctttatggatggccttggtggtttgatcttggctgtggtcttggctgatgcttcacttgttcctacttgtcttcctatcctagttcttcacccccaagtttctgtaaataaatcctttcctgtgtaaattagccataattagtttctgtggcatgtaactaagctctgaatggtgggatgtgaggggcagaagacaaacaatcttggttaaaaattacctccatgggggtgggtacaatggctcatgcctgtaatcctagcactttaggaggctgaggcaggaggattgcttgaagccaggagttcaacaccagcttaagcaacatagtgaggccccatctctacagaaaaaataaaaaataaaaaaaaattagcctggtgtgatgccatgtgcctgtagtcctagctacttgggaggcttagctgggaggatcccttgaacccagaagtttgaggcttcagggagctttgattgtaccagtgcactccagcctaggtgacagagtgagacactgtctcgaaaaatgaacaataacaaaaacaacaacaaagcttccatggtaacttctgaagctggaaaataatggtatgtatctggtgaatgcaaatgagtacaaagactgaagagagagaatcattttaacggtagggtagggttattgattacttttcgtgctgctttagaaacaagctccacttctctttacatttctttccactgtaatttctcattggatttctatgttcataatatgtgctcatgaaccacttaaaggcgaacccatgcctgatattctgttgagttctgttcaaaagggatccgattaagccatgcttcctcatgttagagcagctctatggaactttagggactgatacatggagttctgtggaagtgggtgagtcctaagagttgtgagctatcttaaaggtacaaaaagacaagcagaaagttaaatgggaatataatcagatttatgtagaagcttcctagtaataggcattcatttttttctcaggagtatagtaatatgatcctcatatagggtaaataatgtttttgtgctttattttgtatactgatatttctatttatcatctttcatcttttaagggactgtatcttcctttattctttatgagtcttttgtttgtttgcttgtttgtcttatttttcctgtgagttctttttccagtcagtttgttattatagggaactgaattatttctagggtaggagacatccatctcatcttaaccacagtcttagcaagtgaatatgctaaccttcagatagttgggttccagagtatacataggagtataaaatggataagctgattgtttccccatttaatgatttttttaataataatatagtcaatttcaatatcttgtgtggtagcatcattagaatggtattgcttcatcacagttactggatgtcatgatgactgtatatctcattattcatgttgtataacctcaaaagcactaagagaataaaatggaaattaaaacacatttttgaagttccagatttacttacttaatatggcttagttctaggcattgtacaaacatcaatgaaataaaagactttgtaatatgaaaccagagttaaatgaggaacaagaaagaaaattacaacatttgcaatgattttttactgtattctttcagtgaccaattcatatcgagaaaacaaaaagcagtataacttagtgatcacttatttgtttctacagaagagccttcattttagtaaatattaacttgtaaagggctttttattgaagagaaacaatctatgccaatgtattactaatttgagaattagctaagggttcagtgtttttagtttaaaatttggccatcacgtaaaaataattttattaataccattcattttgttaatagaattcactcagttggcctttcaactgagttctataaagagtatataaatttgtaaaatttggaaaagaatctcagtgtcaaactccataggaatttaagaataggaaactttgaaataaatatctttggctaacagacgctcctaggacttgttatcaccgcctcttaggtgaatgtctgttttaattgttcagattaaaaaactactcatgtcctcaatttataatattattgatcagtacctagaacattgttgtatttaaatcacattacaggacacactgccgaagcattatcctagatgggaaaatcaaaggcaagatttacaatttattttattatagacttggccaaactttggcttttgagtccttagtaccatttttcatagtgctactgggagaaattatgcaaactggtatcagattacccaacataccaggaatgtgcttagcaaacaggggcatcaaaaagcatttggaaaataataactctagcaatgtagtagtcatcatgataaaaattagaatttgattgtattttcttccttttttggtagttcagtattggtttaatactgaattataaaatgttatggtgggtgggaatacatgattatgtttttcatgcttagggtcagacacctttcctaaaactcttgatatgcaaattccttcactaataccagataatttttccaaaaggaaagtagtttcttattcctctagacccaaggacctagagatattaccatgtctttgctttcctttctgaagcctgtattgattattgaccatggtttgtttctcctacaaagccaattctatgagatatgggcagttagggagaagggagcttgaggggcacaggttttaagagggagagagaagtcaacaattgcagactggtcttttatggtaggaaacattgggatttttaaatcagttattccaaattcagtaagtacctgtttttagggttttctaagactttccatctttccaggaatgattcttcttaatgatgaatctctggaactaggagcattcactgtggtttgacaagaagttcagctctcaggaatagcacattttcctgtagtactgcatttacttgaaacagctgggtttacatgcagcataaatactgctttttaacattcgaaggcataagaagaatccagtatataagtgccacttttagataaatatattttgtaatttctttgcatggaataaaagagaaaacagtgtctattcctagggaaattgagtgtaaatccagcactccagaattccctgagaagtgtggttgctgtttgaagattttaagctcccccagggatgggtttatgcagtttcatttgtttcacatgtattttgcccagggttggacaaacagataagcttcttaactggtggatttaactgtctcttcacttttgaggtgtcaacctggtatatagtgaaaaatgttaaggataggcaaatgtcgttgggaataaacagataaataaagatgaggtaactttagactttctggcattattcacatttatctcctatctctccctctacacacacacacacacacacacacacacacacacacacacacttgcatatattatatattttgttaatgtgaagtcatttatgagagtgctgatgttggagtcaagatacataaattctgactacaagactatgacatattgatgagtatacaggaaatagcccctcaacccttagcttttcacacttttggacaaattcctagtccttcccactctccttgaaacattttcttggcttatacaacattcctcaagccaaaagtaacttttacctttctcaggtccagatgtcagggggttgtagtgacaattattttggaaataatggcttcagatgtcccctcagcagaggaaagaaggaagggttcccgaaaaaaaaagtgagctggagagagcaattttaaaaatgggtgaaagtgtggatcctttcacgccaagttacacttaagttttcttgcgaaattaaatgtgatgaaggcctacagtccattaaaacttgcacaattgacacattgtgacaaatccttccacatgtctcattttcaaaaatttatttatgaattggtaacacagaaatactcaagtgataaaaacggataggcctctttagaggctattcttataggcaattgtaattcttccagtgatagtttatagaaatatttatatttcatatgttaacctaaatggtatcataccctacacattgtaaagcagatgtttttctacttaatttatctggaaatgtattccatttcagtgtataaggacttgcctcagtttccccccacacccccaagttgcattttattccactgtacaaatatatcatacttgatttagctgctaccagtggactgggggaggttcccaaacactgctgggacctggaccccagctgatgtccaggctcttgatgccattgcaagaaggagttcagggatgagtcagtcagaaaatagtgagagtagagagatttattgccaagggaaaaggacacttaagaaaagggagtggaggcatactcaagagagagtcatacaaatggagtctgggtttgctagctttatgggtttttttaacaaaggagtgcaatattcgtgaaaattccagaaaaagggtggagatttcccagaactgtgatgctactaatttttacaacaaatatgggtgttctgggaactgtcatggcactggtgggtgtgtgattagtatgttaatgggcacataatgaagtcttaggggaaacctaggtcaaattcaacaccatgttggagccagttggtcttagccagcttggcccacaccgtgggttttcagggtcttattagctcatagcctctgtagctattttatctgtttccttttgctagtcatgtgaaattgctgcttggagttttttgttgttgttgttgttgtttgttttttgtttttttgttttttttgtttttttctgagatggaatttcgctcttgtcacccaggctagagtgcagtggcatgaccttggctgactgcaacctctgcctcgtgggttcaagtgattctcctccttcagcctcctaagtagctgggattacaggcgtgtgcctccactcccgggtaatttttgcatttttagtagagacaggatttcaccatgttgggcaggctgatctcgaactcctgacttcaggtgatccactggccttggcctcccaaagtgctgggattacaggcatgagccaccacgccccgccactgcctggagttttctgttctcctgcgaccactctgtattattcctatctgatagctagtggcctgcatatgtagggtgttttgtctttattacaaaccacactatagttaatgtccttacacgtgcatattttcatgaaagtgggaatgtatctctaaaagaaattcctggaagtataattgctgaggaaaaagttacaggcactgagcattttggttgacattgccacatatttctctctgttagttgtgccagtttactctcacaccagcagctcagaccactcagagtcacttgttgcacacctccaggggcctgtttacgtgacggtatctgtggatggagttgtgctgtgtctgtagctcctggcctatccctgcttgatgctagctcattgctcttctgctactggggcccttggtagtttttcaagggtctgggctttctaacttcagatggagtagatggatgaatgaaattctcagattccctcaggcatcctttctccttagggattatgcaccactgcagaaaatagctgtggtaaataaaagtagaaaaatgaactatgtgagtttaatggtacactgaaaacaaagtacagatatccctcggtatccatagggaattggtcccaggaccccctgtggctaccaaaatgcacagatgctctagtctcatatataaaatggcatagtatttgcatataacctatgtacattctcccatatactttatttatgaatttattattattttttgagacagattcttgctcttttgcccaggctggagtgcagtagcacaatcatagctccctgcagcctctaattcctgggctccagtgatcctcccacctcagcctcccactttgctaggacaacaggcacacactaccacagctggctaactttttaatttttcggtagaaacaaggtctcattatgttgcccagggttgaactccaatgatcttccctctttggccttccaaagtgctgagattataggtatgagccaccacacctggctatcctgtatactttaaatcatctctacattacttataatacctaatacagtgtaaatgctatataaatagttgttatattatattttaaaattgtattattttttatgattgtattatcttttaattttatttttttttccaaaggttttcacccctccatttgttgaatccaggatgtggaacccatggatagagggcttaccgtatttagaatagaatatgtgaatccctatatagtaagcccagtcttcattcaccaacactttttttataagaacttcataaaggatgataagaaaatcagattatgaaatttcttagaggtctactctctgagttcttaaatctggcctgctttattttagacgccaaacatatggccatagctcattatatgcttaaatgctgatgcatttcaaaaccattgatgctactctgtgaaggacctgagaggaaattatagtaagatatatggttagaaagatagaagctgtaaagtgaaattctgacctttagaaagagctgccataaactttaaagaaatcaatgtgtttgttaagagctatatttaagtttccttttatgtatttaatatatatcaacatatttgtatatattcaagttgagcatccctcaactgaaaatcggagatccaaaatgctccaaaactggaaacagtttgagtactcgcatgacaccataagtagagaattctacacatggcacattggatttccgatggctcagtatgcacaaccttcatttcatgcacaaaattattaaaagtcgtatttaaaattaccttcagcctgtgtgtatgaggtgtatgtgaaacataaatgaatttcatgtttagacttgtgtcccatccccaagatatctcattaagcatatgcaaatatttgaaaacctgaaaaaatctgaaatttgaaagacttctggtcccaagcatttcagataagggtactcagcttacactggtgtatgtgtatatgtctatttcaaatatacatgcaatgagatgccagagccagcttttattggcccacaagagccaactgttacatttttaggcatttttcttttatttcttttttttcttttttttcttttttttttcagttttgcccaggttggcctcgaacgcatagccttgcctccttatgcgcaaggacaactggcaggagccaccgcagctctcaatttttaggcatttttcaaggagttgtcctgatattcataggttgaaatcaaccaaggtaagagtgtttatataacagaaattggcaaatacttaaaaccagggcgttacttcctggaaagctgattgttaccagcctaccactgtacatgtgtgtgtatagtctatactctatctaaaaatgaagacaccttcagaaatattaaaactaatttgtttttgtttacactgtctgatttccaataagcaggaaaaagtagtaattagttatgttttacttttttcaccaaagccttattaatgcattacagattaattttacctaccacaagtgtatcatgatagtttctaattaaattgtgtataatttctggttgtgaattttttatgctaaaacaatctcttacaaataatacattatagacgcactaacagcatgatttgctaatattcatggtggtagctcatgaccttaacaggacaaaggtcatcaaatatttgatcataggaatcaagaaaactggcagaaatgatgctgtaaagttaagaaacatgtgcttcaaaagtagaaggaggttgagttcgtaagacccagtacgttcattaatacaaaggaggaaagggaataaatactgttaggattcatatggccaatatttaattgcctccatacagcatagcctatgttttaagtgctttgagtttgaatatagaagctgagggcattcgggcatgaatattttgtaatatgcatatacagtttgtattaaggttttctctcaatagaataaggaagaatgactgttattcagttaaatatagttaatgttaataacttgatcagaatttaaggagattaaatgtcagagttaagggcctgttggtaaatatcacttatagaaggcagaaataatagagaattacatatagccttgtggcttttgccactctataagtagtaaaatgtgatttattattctgtattctgtcgtgtatttctcaagaggcacaaagaaatgatgacttagaattcctgcataaaaatgaactgagagactcatgctttctggatatgaaagagattataaacagactataacacctactttagtttattgcttactgatctataaagaaaataacttgtaaaacccaaattaagcaggagtaatgatagttcactaatagcaaaagccagctgtgctggtttcctttaatagtgatattgtagtattaaaatgtggagatttacatgttagatctttgtaaatataaagaagatttacttcttaggatcttgatgaattcaagtttgttacaacctatttcatttaaggataaaaatttttagaaatgcaattttctcttaaatgaaaatttaagattggactaatgtagatcttccaaaaagatatgcaccaatgccattaaaagcattggagctgctaccttgatctcttggatcactcattcatcgttttccacaggagagggtttttttttttaatttactatagactttaattcttcataaagaaattcacgccagttttcctctttatatattggaagattcacgtgaaattacagctaaattttcactttgcatgctagaagcttcaattcctttgcccttacctttgatgttttatttctaaatgatcttatataagtgaaggccctttatgattataaagagctacacaaatgtgtgatattattttcagtcactataaattttctcaatgcctaatttcagaattgtaggactaagatattttatatggtctttggttttgggaaacaatgccaaatattgttgaagtattatctactgctttccatccaaagccaatatgacctggccaaagtaacaggctattagatcatatacctacattttcatcttcttgtagaaacaagagattttatatttttttagggacagatgaaaaagaaaaaatatgcttagatgggcagacatgtagttcttggggaaaaaatgtgtcattatagctctctctgtagagatatatgttgctgagcatgttttccatacttgttaagactgaatactgttttacttgatttactcattcattgtaaccttagtaactagccccttaatatagattgcatccattttgatctaaaaataaatgattatatttgcatagttttctcagggctcatttttagcattttatgtatcataaaaatattttaaagtgggttatatgcatttctatagggaaaaaataattatgagaggattatttgcaaaatagatttatctgttgttgaacatacactgagacactcttaggcagttggtatgtagtgcttggaagggagactttccaatgccatttggtcaagactggtcccgcctgtatgtttacaggtgtgttgatctgtaacgaaaactctgcccagttcatatagacaatctacaaagtagagattatagaaacaagtcttgaataatctccatttagaatattaaaatatgaatatttgagtacccggtcagtgagaaaagctacagaatgtgagctatggctttcagggcctgagaatacagcaatgaatctgcaagtacagttcctgcctgcagggaaatgaagtgtggaagagagtcgatggagcctttcttgctacgtaaagaccaattctcggtgaatttaggaaagagagtagtggaatgcctcctctaagcacttgactaattttatgttagtgctgtttgctgcatctatattggacttctttggaagcacgtgcatatgagcttccttgataagattgcctaagggaagccagagaggtcttttcagaatgtcattcccctggttcagacaggggaatgcctctagaaagacatcattgctcaaccttccactcccaatctgctgaccacaagcccctgtgtcccaagacccacttctatgctctcttctctgcctccctttccttcaacaagttccctgctgtgcattcttcgaatttagctcaagcctcctgttctctaggaatcctgactggagctttgccaaggtcagaacctcttttcttccccttttaaagtcttttctggggagcattagttacgattgtcatactcacacttagttgaaacaaataaggtaacaattattaaatttacaaaatatataaaataaattaatgttttatcattgaaacagagaagaatcaggttaaaggtaggtttggaaagacatagttgacctagagagaagatgcgtttgtctagcaatattattttcagagtgattatgtactcgatgaaaagtttggaggcatgtcacaagtttggaaataatctaatgttgtattgacttttcagggttctattagtgaaaacacaatcaaactaaattttgatatattaagacagatgtataaagcctataatttttgaaatcagtatccacctgacatttatctctcattccatcagctgaacatttggatattgatttctaattttgtatttatcaatataatgaatattgactgccataatgatgtctcaatgacatttcgcagccctagagtaacttacaaataaagaagtagattaaggcctttgcaattctattgtcctgtgtttcttattgtaattctgtctgcctttctcccaccttcttttgctttttctgtttcaattaataacttgctagaagatcaacagaagccaactgtatagaaatatttgtggtaggccggacacggtggctcacgcctgtaatcccagcactttgggaggccaaggtgggcggatcacgaggtcaggagatcaagactatcctggctagcacggtgaaaccccatctctactaaaaataccaaaaaaaaaaaaaaaaaaaattaacggggtgtggaggcgtgaacctgggaggcagagcttgcaatgagcctagattgcgtcactgcactccagcctgggcgacagagcaagactccatctcaaaaaaaaaaaaaaaaaaaaaaggaaatatgtgtggtatgatatgagtaagtttaaaagagatatgagtaagtttaaaagtccccacacagctgggcatggtggttcttgcctggagtcccagtctttgggaggctgaggattgcttgagctcaggaattccagcacagcctgggcagcatagtaagactatggctctcaaaaaaaaaattagccaggcatggtggcatgagcctggagtcacagctacttgggaggctcaattgggaggattgcttgaggccagcagttcagggttgcagtgagctgtgattatgtcactaatctccagcctgggtgataaagtgagaccttttctccttaaaaaaaaaaaaaaggccccacatcacctaagattttatgttgcttctcctcaattaaacatggtatgtttctcactttttctgaggtttaaatatatgagtttatgtctatatatacatgtacataattacatatgtatatctttatagatatgtagataatatttatataatatcaagggttcagagagtgtgcattataaagcaatgtgctttttactccacttaacagagaattaaacattgttttatttctgtatacctggaacatgttttctcctcttctctgtaaattgcttccaaatccaaaatgcttttgaattctacttatagttctcactgaagcatttccagaatcccttatttagaagcctcttctgccttttataccaggctcccatacattttatatctctgtcctagcattttcacattttccttcttttaaaatttatgtttattttcctcaaaaaaaaaaaaaaaaagctccaagtggacagtccccccagtgtgatatgtaaacttttgagctttacagagtcaacaacaacactgcctctccttcacttccatagtttagcaccagatgagaagcagtatagaaaagacagataaatggagattaaagtgacagatggagattaaagctgattgtaggtctgtatttagatcttaggttgaaagggctttctgccaatttccagcagaatttaatagacttgcacccgtagttaatggtacatctggacaatcagaagcctctgctgtgttccttctgggcaaaaagcagaagagaaagcaaattcattcaaggggcagggagtgtttgtgttgcaagcctggttcctacttctaataatcattcctccttccctaggtagaattgactgacagagcaggagagaggcctggcgtattctaacagaaatgtctctacaggaaactttagggctagggaaagaaagttctactccactgtagacctcctatctcttgacctttatcttctgctttgtgtaattttaactcaactacgttacaaaacattggtttaatgatcaaatcttctatttgtctccctgtgctgcctgccctcccccaagacagtgaaggtattgtctggaaaacactgaagaaaaacttttcattctgaaacaactaaggtttaaggcaaaagtattcagacatctttgactatcaaaattacatcctagataaaccctaagacagttgataaaatgcaggcgtgacatgtatcagatacagctttagagtatagatgtactcttacacagagatctaaaagtaaaacatatgactggaaagggactgtataagtaaataatacaaccatgcttagaattcttgaggacgatcaagtgagtggtttaaatatttactttactcagctttttcttgagcttgagcaaatcagtaatactatttattagatacagaagtgaattttgcctggaatatcatagaatttggaaagaaatatgaataaaatatcccaaccttttgagtattccaagtgatgttttataatgagaaatagtaatacttggtagacaaagaactgattttcctttcatagactgttaaaatttaattatagtgcttttcagaataaagaaccaagacttgctgactaccatggcagaccattaattaactcctttagttacttacagtaatcataactaataaactatatgacattacatcttaagttttatagattctggagtcaagtttgttttgtgctgtgctgatgggattatagtcatttattgaatatcaagaggtagttaatttttttttcgcttgtattagggaaaaataagctgtagttttttacttgatatgaattcttcatttgataatggggtaaattggattgtataaactagaccactttggggcatattatttctgaaatgtgactagtttgaataagataattatagttcagtggtaattttaatgacttagctttgggaatatgtaagttgtctttagatggcagatttaccaaatgaataagataaacaaaactaaaactggttagggatttaaccatgatatataaatttattttacattctaacttgccttttaaaaattccaatgatagtcacttcatttgagaaataatttatagaccaatgaatgtgaaaaattttaagcactgaaatttgagaggaaattgaagaatgaggtgattcattgtctgtgtgtatatatatatatatatatatatatataacttagaaaatgtttgaatggtatgattagaatggagtcatagtgttttgcaaaacatggattgttgaaatacaaaaatccaggttttgaagattattaaataattcatgtaagatatcagagtggagctccaacaatttgttctactcttatttggatataatgtctgtgagtgattccgtaaatgaggtcataaatattcatctattttatcactggcaatagctgagaatctctgaacagacagtggaccacagaattcagaccctctatgcctgtgcctatccattgacttatccaactttatttccatgttagataccagcagttcagaaacatttgtatttcccagctgcggaaacagaattatgcttctttctattaggatttgaaaaagctggtatttgattatccataaaatgcagtaaggtggtaggttttattctcattaaaaatgtaggacaaaggaaaaataggcagtgtttaaggaaaagaagttttttacccttctcaacaaaagctgaaatgcaacaaaagccgaaatgacctgaaatgcaacctgtaaagtcaaatgtgaatacactgtatgctagaaaggcaaattgtctcctgaggactaggaaaaaccttttagttctctctgacatctaggaatatgttttccaagtgatttttacaaaaagatagtctgaatcttatctaaatcatatctaggtaaaaagaattgcactttaagagagatattataaacattgaacacataatccattagtattatttcagttgtaataatagacatacaatcctttgctgatagaactcgtttgcctaaaagttaaaaaaagtactgtacataggctgggcgcggtggctcaagcctgtaatcccagcactttgggaggccgaggtgggcggatcacaaggtcaggagatcgagaccattctggctaacacggtgaaaccccgtctctactaaaaatacaaaaaattagccgggcgtggtggtgggcgcctgtagtcccagctactcgggaggctgaggcaggagaatggcatgaacccgggaggcggagcttgcagtgaaccgagattgcgccactgcactccagcctgggcgacagagcgagactccgtctcaaaaaacaaacaaacaaacaagtactgtacatgtcaaagctttactgtttatcatagaaattttaggtattttgatgttgtggatttctgtgcatgatactccctttaagatcaactgattgattgcctcatttttattttttatttttttattttatttttattttttgagacagagtctcactctgttgcctaggctggagtgtggtggtgcgatctcggctcactgcaacctctgcctcccaggttcaagcaattctgtgcctcagcgtcctgagtagctgggattacaggcacgtaccaccatgcccagctaatttttgtatttttagtagagatggggtttcaccatgttggccaggctggtcttgaactcctgacctcgtgatccacccgccatggctgggattacaggcgtgagcccctgcacctggctgattgcctcattttttaagggaaatgagttaagctgtcttcctacagcttaagaaatttaaaactttaaaagcgagtggtaaaaagcagtcacctacagatgtattcattaattcattcaatcattatctactaaacatgaactacatttagggtattgtattatggagtccctaaggtattcattttggtgagcaatgccacataaacaatgagtaatgtgtcattgggggaatgtggtaggttcattcggaaagtgatatgaatgatttattgcccccttaagtgtcctttaagtatcaatacaaaaataattcttctactatcaatatattgaattttatgctataatgaatgaatttcaaaagaggacatgatcctttgccacatagagatttcattctaaaacatttacagtattgctatattcattcacttatttatatattacatggttactacatactaggcattttgtcaggtatcttaaatcagatgtcatatacagagctccaaaaggagactattttcatctgaaaaactattacaaatagaacctgccttcagataattcaagttatttattaggattttctcccttagaagtggtctatgattttatgctatcagaatggtttaatgtatgaaatatcgctttcgtaaatatagtgcaaaaaatatatccactgtttttgaaattttctgaatgagtgttaatggacatgtatattagtaatacatcaaattctaattttgatataatttcctgtgctttcaaagtgctttaacatagtaatgttatatcacaaattagggtcttacctaagattgcataaaagactaaggaaaaaatgttatataaagaattagaaaggatttatggttagacactggaaagactgaatcacaagattacatatcaaaaattgtgagtgcatattccagcctactgaatttaagtacctgggcaaaatattgagaaatattacaggtcctgcttccaaactgggaaagcctcttctgattatagactaacctgtctgccagctctgacatgttgcaaacagatgctgtaactcattgaaactcttttcatcttattgggggaagactgttttaaagttcctaatggttatttttctaaaaatggttcatttaagatcttaattgggtacatgaaatggctttttctgtcattgatcctagtacgtgcacatgtgcaacatgtacaaaaagatccttttgttttagaccttacggaattttatgaggcatggaaatgaggagaagagagcctcattcttcagaatactatgtttgactagatagtaaagagggatctcaacagacctcaaacataatgtaagtgggagcacaggaatcaattagtatattagttttctggagctgccatagtaaaattccacaggctagatggcttaggggacagaaattaatttccttgtagtttcagagatcaaggtataggcagctttggtatcatctgaggcctccctccttggcctgcagatggctgccttctccctgtcctcaatggggtttctcctgtgtgtgcatccttggtgtctgtgtatccaaacttcttctcataaggatgtcagtcaggttcaattagaacacaccctcatgtcctcatcttaacctaatctcttctttaaaggtcctatctctaaatacagtcacattctcagataatgggggtagggcttcaacatatgaattttggagggatgcagtttcgcccataacaggataatttttttgttttgttttgttttgagacaagagtctggctctgtcgcccaggctggagtgcggcggcgcgatctcggctcatggcaagctctgcctcccgggttcacgccattctcctgcctcagcctcccgagtagctgggactacaggcgcccgccaccatgcccggctaattttttgtatttttagtagagacagggtttcaccgtgttagccaggatggtttcgatctcctgacctcgtgatccactcgcctcggcctcccaaagggctgggattacaggcgtgagccaccgcgcccagcgagaatttttaagtattttatgttcagtgaccagggtaaaaccatttacccttagtcaagcaagggtcaaggaaaggcatggagccccaagtggagggaagatgaaaaagaaagtccggaaggttctccctggtcacagactgagctctgggcttaaacttgctcattttggggttttgaaaaagtcaaatgaactaacaaggatcccttttaactctgatgtgaagtactttgagtttagtcaggagcacacaacttaagaaatggcagaagctctggccttttcagagagagagagagagagagagagagagagagagagagtgtgtgtgtgtgtgtgtgtgtgtgtgtgtgtatgtgtgtgatagaggcacaggagaagaatccctgtgaatggatggaagacatgcagtcccggccacatgtgtgcctgggtgtgaaggcagccttgaagaggaacaaatatagggtgggggtaaggcagctcttgggactcggggacggaggtggtgcatggagccaccaggcagtggcttgctgctggcttttatccctttcctcgggagtacctgggatgtgtggggcctgaggcctggtgaaaacctcactccctgggcagggattctgtaaataacagccgcagtccatcctggagcttcttagatgtgtggttcttgtttctttccagcttacttcttttcctgctattctcttaggtgacttgcaaagaatttctattttctgtccatttaatctgccttgtacaaataaaaccctgtatttcgacagtttttgaggcagtagagattataatcaatgcttctaaaatagtcagaaaccagaaatggagtcattacatggtttctttgggagaaagggaaccccagggagggaaatttttcctcaaaattgtctccctgttacatttcctataagccctctgccgattcctaaatgaatcattttcttcttattattacattacttatgatgtgttgcaaataattttaccgtgggtgaaggaatttacgaacacaccactgaggtgaaaagaaagtcctgggtttagtgctggttttacaagtaatttagactggtgaccattactcaatcaatttaatctccctctgtctcagcatcacatctataaaacgatgaagacaatatctgccaacctaattaagagttgtaaggatcaagtgaaataatgtcaaggaaagtgctttataaattgccagacactatacaaatagaaatgacgaatgctggtacagaaatgtgagattatattggaggcattaaaagcttataataaatgctttcacttcacaaaaatcttgtctcatcagactaaaccaaggtgtctttattataacccaattcctcaaatccccatctgagcttgaatttgaaatgctcagagatttctagagactgaaaaatgagtttaagctactctgtggacaaagacagtggttaaactgtttttttcacattcaatttagtaattaactttttaaaaatagaataattgttcaactagacataactttattgtggtaaatatcttttcaatgtactataagttttctaagggcaggaatcacatttctttagaagctgagtgcctagaactcaatagaagctttttgaataaatgatgggagaaattttcttttattgaaattaagggtttttatgtttgctttcctaccataaaattagagtttagtcccttgatgctgtgcccttctctttttaatcatactccttattttgaaaataagtgtatattatatcccagtgaattaaatatcttttccctctttactatagttcctggaaagagtatattgatactgtaataatatttgttttcaacagtaataatttgctggtaaaccttatatttgcgttactggctttacagtttatcttgcaaaacatttgcttcaggatcttattattttagacaacaagtgctgcagagggaaatagaacataaatacctagttccagatagaaagtgccacagtgattcagtttcattgtgtgagctgaatagagatttttttttaaaaagtttgttttatttttaattgtggtaacaaatacgtaacattaaatttgccatcttaaccatttttaagtgtacagttcgatactattaggtatatccgcattgttgtacagctgacctccagaatttcatcttgcacagctgaaactctacgcccattaaacatggattctccctttttcttgcatccagcccttggcaaccacctttctcctttctgtttccataattttgactacttgaaatatatcataaagaaatattcttataagacattttgatacattagtttttatttgtgtttatcattgtcatgtggatcatttaattgctaagtgacgttttcattcttattcacgtacaataaaaccagttaattcttttttaattagtgtcatgaattttgcctgggtaaggataaacagtaaaataataaagcaaagaaaaatattttatataatttgtaaagcagtgggtatatttaggatacaaagtagcagatatatagagtgaacacatctagggctataggtaataaagttgtattatatgcgggattcatgctaaatgagtagattttagctactcttgccacaaaaacaaaaaatgggtaactatgtgagatgatggatatgtaaatttacttcactgtagtaacctttttactgtctataggtatcccataacatcatgttgtatacctaaaatatatgcaacacttattttaaaaaatcataatagatttatgttaaaaaagacgaaatatgatatatttttaaagctgcctattattaaggactcactttaatttgaaaaccttttctttctaagataattatggaaaccatgcttttactcttgggaagagaatggtcttgctagaatatctgtggttctcaaacttgagtgtgcatcagaatcacctggaagcttctgacacagattgccagacctcactgccagaactgctcattcaggtggttttgggaggagcctgaaggagcatgtggattcaattcccatgtgatgttgaagctctgggctctggggccccattttgagaactattgttctggagttaacagatattctagaagacagtaagaaatggtttgtcgagatatgtacattgggtttggaaacgctatacaataatcacctcttagggattcagtgccatttgcatatgaaagatttgttcagattctgccataaaatagcttcttgaaccttatttccaatatttactaaatttacttgattgcagaactatctttttacataacattgattgccttttgagggatactcatattctagtgtgcatattttgaaaaatatcctctaggttaaagaattaggaaagtatcaagatattagtgccacagtagaaaatataggtttatacatttcatggcgaggcagggcagtgcatagctcatctctcttctttagctttaaaatcagtatgatataactctacttactagtgtggacagaaatgtaaaggatgtgttaactaaagtactttaatttctttagagattgaaaatacaaaaacattgttgaaaactttgcttactttacagtattcgttttgaggtttgtaattggaaagttctgtcatagtatcttaaatgaattgtttgggttttgattgtgatctgtgtaaatttcacaataataaacacacccaaactggttaaatgtacgaacatagtgggaaatgcctagcctgacgaaagaattgagaggtataaggatacctgcttggtctgtgttagagggtaatgccaagtcagtgatgaaaaacatctgcaggtattctgtacttcacctgaaggcattttttcaccctgtgtgacatgagaattctgcacatggttatctcctcccagagtcctcaggttcacatgtggggggggccagaccaaagcttactttctaggtactgtaaagatagtctctcacttcctgtttctgatgccaagaacagtgatagatctacattaattccccaaataaattcagctttgcaaacatcccattctttgtatacatatggtaatctcctttctgtaggtttttacccaaggttttttttatccagagccaaataatgtacctggtcagcggggctccacagagtttctacaaagatgcaaactaagcaaagtaaagaatgttgatgcattgcattacatgtcattcatactttcctcactttaagaaaaattcttacattatatatggatatggcacttttgaatacagcttatgtatctgtgaaaatagtagatataaaataaatatcagttgaagcatggtgttttcacattgtgcatgcctaacaaggtatagaccattcatggccagaaaccaagcaggccagataagggaatgccctacatagggcgctttacttatatgtatatgctggcgctaattttttaaggcagtggtccccagtcattttggcacccagggaccagtttcatggaaggtaatttttctgtggacagggccggggatgcggctagtttcaggattaaagtgttccacctcagatcattaggtattagattctcataaggagtccacagcctagatcccttgcatgcccggttcacaacagggttcgtgctcctatgagaatctaatgccagctggcagaggtcaggctgtaatgctcgtcccttgctcacctccggctgtgtggcccagttcctaataggcaacggactggtgctggtctgaggtccaagggttggggacccctgttttaaagcatttaaaaatgttaagaatggcttaataatgtgtccaaagtcattcagcttcagcattcaaatgctgagaacaagatttgaatcaggatttggcctccagattctactatatctgccacaatagcacttactacttggcagaaggactagaatggtgcttacctggataacagattaaagttgcttttttgttgttgttttttaaacagcaacatttatttatttatttctcacaattctggaggctgggaagtccaagatgaagacactggcagatgcggtgtctagtgagggccagcttcctgattcatagattgccatcatcttgctggagaacaaattaaagcattgaaagaagaataaatgctcctgtacaatcaaagggaatgattaaaatatgtaagaaacccaaataattaactgtaatagctcagtgttaaataaatatcaatgttactttgtaaagaatgttactttaaatgaaaagaatggctgggcgcagtggcttacacctgtaatcccagcactttcggaggccaaggcaggtggattacctgaggtcaggagttcaaaaccagcctgaccaacctggtgaaaccctgtctgtgccaaagatacaaaaaaaattagccaagcatggtggtgggcacctataatcccagctacttgggaggctgaggcaggagaattgccagatctgggaggcggaggttgtggtaagccacgatcatgccagtgtactccagcgtgggcgacggagtgagactccatctcaaaaaacaaaacaaaaaagaaagaacagaactccaatatgcacctattctgaaaccactgaattaggaaaattttgaattcaatacgtagacaaaaaagatgaacattttctcacatttgcttttgagtttatttcttgacgctgatggaaaggtaaaaaggtgaggtgcgaaggaccaatttagcctctcattttcattcttttatatgtgtactgataaagccaccctcagtgaaatcgaattaagtaatatttactgcaaagttgttttttggattgaacatttactaggaagtttttacagcctgtgaacataacatccaagttatattatttcttgggaccaaatgttttgaagtgaatatttttacattgtttttcataggacaatcagaatttgaaagctttgtgaagtagaaggtgaaagaaacaaaaattcctttcccttgagctgaagaggcaaacctaagactattttgctaaaattgtccttagcatggagaaaggtccttatctaagggggatccatcagaataacttggggaaaattttcataccaaaccccctcatcctctcttcccagattctgaattccctaccccgcccccagtatgatttgaacctaggaagagagcaggtatgtattgtatgaaaaattccttaatttcccttcctcccaacttagctgatctaatgaattacagtgaaaaaaaaaaaagcttcttgccaattttttctccacttactctccttaaatataagaagaacagagcaaatagggagattaatttttactaaaatgaaggaatattttagttttaaagttatgcataaacacagtttaaataatcaaatattttacacagaaaaatcactgccatcatccctttctcccccttccatggagataatcactttaagctcttttacatggttcttttggtaattaattcaaatctctaaacaatatgctcattttgctacattttgattttaaattttttaaataatcaaatattttacacagaaaaatcactgccatcatccctttctcccccttccatggagataatcactttaagctcttttacatggttcttttggtaattaattcaaatctctaaacaatatgctcattttgctacattttgattttaaattttttaaataatcaaatattttacacagaaaaatcactgccatcatccctttctcccccttccatggagataatcactttaagctcttttacatggttcttttggtaattaattcaaatctctaaacaatatgctcattttgctacattttgattttaaattttttagtattacctattgattgcctgctatggtggaagagggtttagcactgctcatccctgcttgaacagccttcccatctgctctattttttcctatcttatttatctttagttagccttgaacaaggaatgattctttttttctcatagaaaagagctaaaaacaggggaagttgaaattttgcggttgagaaaaacaaaatgttaaggtaaggtcgcataggatggcctcaattttctcaagaaaataagagatgagttcatctgggcttgagctactacgggctgctatcagtaattcattagggagttaacagatgaatatcagcattgctgcagaccagtgagaaatgaccaacagatctaaactcatatgacaaatggtctcacccaaacacagtggatttgcttggaatggtggcatgccaattttcattattggcaaagaacaaaacacccaaaagccaaaagggacaggtacacagtttggtgaatgtgagaaattacatgtgcggtctctgtttagttacacgtaataacagactacagatcacttttgtgaataatcccaaactgcaagtaatacaaaaagttaaaacatttaacttgagaccttatatatgttttcatatatttggatagatatgggtgctgttattacattgattcacatcctgatatttctcttcacttgattaatatttaattggcattcctaaaccccagaaacaacttatggagtggaggggtacataactcagcaaacaggttacagaaagcccacttacaatttcacattccttttggaaaactcacaaagtggataatctaagatgtggacaatctagaattgacaactgtacataaaggctcacattctctcagggcaacacttgtattgaatgttgttagtttactgtgctagctttgtttatacatttgtaataagttgggcttcttgcagatggcagattaaaacatatagtttattgcttttttaagcaagtgcatctgattttatatttaaaagggtgtagttttatggtgcaagaaaataacaggggcactgagttggagtatcagaagaaaatcccttagggcacggcagcagtgcagttagcaataattttaattggacacccaaactaagccagcctcaaatcatgtgtatgtcttacaaatagggtttattatgtcctttaagtccttttagaggcttatgaagatttataccagtagttagttgctttgtctgagctacagagaatatttaatagttttatcaggattaatgaacagaaatgtctcaacaaatgaaattctttagtatgtacactgtagtcatttggtattctctttattcacttgcagtattgtcagtaataggagacactgtttgatatgagcccttgtatttcatatatttgtcagatttttgtgaagctgtttatatagagcatttgtgtagcacttttctaacctcagacatgcccaagaatcatatagtaaatatgtacatctcaaaactgatttaccatataacaaagacattcactccatttatggcaacaaatattcagtgagtgcctactgtgtgccaagtgctggagacacagtgttgatcaaaacagcttagtggaattgatggcttagataagtacaataataatgaacataatgtactagtagatatttcaatcttgctgccccagggaagtagaggataatgtagagtctttatcagaggttgttatatggtctgggaaatgagaaaaggccttcttggcaaagtaatatctttactgagctgaaggttcaaatagaagttaactaagtaaagagggagtagaaggagaagcttcaaggcacagggagtaagagctgcagaggctcttaggctgaatgtggtaaaggcccctttgaggaaatgaatggaagccaccaggattgggactggattacatagtgggacagggagaggtttaagtccagtgagttccggtgagttctgttatgcacgttagtctttatccctgcaataatgcgtgctgttgtaaagaattttgaaacttaaaatatacagagaggaaagtacaaattagtggtaatcctattacccatagcttcttcattttaagacactgtatttttaattaatgaattgtctttcagttatataaagattaaaaagtaaatatgcagacagatactcttttcttgaactgggaaaaatgacaatctttactaccatgccatattactaatatctggaataggaagtaatttcgtaagccaagcaatgatgtctgtgcacactgtagtcctagtttgtcaattagactacaaatcatggttttgtttatatacagtatttaacatattttaccttgttttcaaaaagccaatttgtataatttttccccacccaaaattgagaaattatttttcctgggatgtatgtgtatgtatatactgctgtgtgtgtgtgtgtgtgtgtgtgtgtgtgtgtgtgtgtgtgtgtgtatgtgtttggtggcagtcaaacaacagtaataataattatatctttttaaaacccaggttaaatagttagcaaaactcaggatagctttttctaagtcatgtcaaaaagtatgaaaattataggaacaaaattgctgcttttgaagacatttaaaaattgtggaagtatagatattcttatatagaagttgtcaatattaatgtatactacataaaatcaaacttacatgagaaatacagatttaaaaatttaggagataataggcatatttaaaggtattagaatttgtcagcctgttgagagaagaaacctggaacaccgacaggaagtgttttcagagttgtgccaaatctacaattagtccttgtgttagtctgttcccatgctgctaataaagacatacctgagactgcgtaatttacaaaggaaggaggtttaattgactcacagttccacatagctggggaggcctcaggaaacttacaaccctggcagaaggcaccttttcatggggcggcaggagagagaatgagtgcccagtgaagagggaagcctcttataaaaccatcagatctcatgagaactaactcactatcacaagaacaggatgggaaaagctgcccccacgattcagtgatctccacctgttcggtcccatgacatgtgaggattataggaactataattcaagatcagtccttatgctaacaacctaggcacaaaggatccagttgaattagtgagctcagagaagcagtcccaatgtaatttgaggcagaacaaagctcagaggatatggggagctggagggcctggtattcagatgctgttaatgactctaacacatcttgtaaaatgtctttcctaccaagttgaagaaggatgtatcagtctgtgatttaaacactcctctataatttgtgttctgataatttttacattattaaaaacagaagtttggcattctgtgcatcttatcagagtggtctgaccgttgactccttgtagggaaggggtggcagaggtcactaagttttatatcccaaggaaacagcccaagaagacagctttacttaccagccttctgagcacttagggagtggcggtgaaagtgaagtcattctgaattttttgtccctccttttctcccttccttctttcctgatgctgttagtgtttagtgatacaagttgaacattggcattcccaaatctgatacctgaaatgctctaaaattccaagctttttgagttcccacatgacaccacaagtggaaaattgttagatatagacacctttgctttccggtggttcaatatacacaaacgttgtttcatgcacaaattattaaaaaatagtgtataaaattaccttcagactatgtgtatgaggcatatttgaaacataagtgaatttcatgtttaaacttgggtctgacccccaccaagatatctcattatgtatatgcaaatattacaaaatctgaacatgtctgaaaccttgggtccacattctggtcccaagcatttcagataaggggtgttcaatctgcataagataaaagagcctactgagaaatttaattatagcttcataagaatgtctagatcatttaaaaagtcgccaatgagaacagaggattccataagagtgttttggccaaaagtgagccaatgacatagaggcagggacattggccaccaaggagtgtgaaaagctggttctggggtgaggccgattctcgcaggaggcctccccgcctggtgtctgttctcacccaggaattggccagcaactcatccagatctttctttactcttggaaatgccagtgtggttcttatgttactgggcatgcctttgtttcatcttgaagaacttatcatcacttcaacccattcaaaagatatgagagaggagatgtgcaattgagtaatgattaggaatgtagcacatattgcatttataaaacacatcaaactatttttcaaatattagaaggtgtaattgagtctgcaacacattttactaaagatatttcctttaatttttaaaaccatgtgtattacggggggaaatgagatccatatgtttgattcttgcacagttaaatgatatattaaaggattatttgcaaatgcgttagaagtttattgtcaattaaaataatctacttttaaggaaattatgttttttttaaaggttttttttgttgtaatttgaattttggtccaatatccctgtagggaaaactgtttaataatagcaagtggatatcatcaacgtgatttgctcctaagcaatctcttgatttcattgcattttgttaaactgtttttaagcttcatcggttttgattttaagtaaaatttactaatgtcccttttaataaaatgtatctgtgaattatctagagtgagctgtttagtttcagaggttctcatattccaatcctttgaaactacaaagtaatacttataaaattgaaataattaaaaataattagcagaaactctccaaaataagacaatcaaaaccatctgggcttgaatatattaaaaaatgttgatcaaggaaaacaccttagaaatctgtgtgttatcttgtaatttcaagtgtggatattttaaatcctgaagaaatgggatcaaataagctctcagtagtgttctatatcaactgtaatttaacacatctgtccagaggagtagtgaataatgaattacactaatcaatccagataaaagagatttaattaacattaacatctcctcaaagtctttaaaactttcttttttttctttctgttttggtattcagggattctaatctaagggtcctttgatgatgaaagaatatttttaagagagattttattaaaaggatttgtgatatttagatgtatgtaagatgaaacttttctccaattttttaaaaaggcacttcataaaacataaaaaggctgtcagtattatcacttcgtattactttataaaaatatctggaaataaaagttgttgtatagggaataaacatgctttgccaaattttaattaatatgtattcaaaaaattgatgatgtctggataaccaatgagtgaccttcagtgctttgtagggcaacctgcaggcatggaggctcagcaataaatacttagcccactaaggtgattgaaggggttacaggtgttttctgcaaagtggttaaaccacttcatgagtaaatgtaaatcttcatacagacctgtatagggcagtctacaaccacaggccagttacagtaattaaacaagcaactgaagagttatgacaatgagagcagtgaaatgagaatctgaatatggtcttttcactatgtggggaagtcctcattttggtctaagatggaagcaagagaagagaccagggttaagagtgacaattgccacagatagggatgttatactgacccataactggattttatcggtaccacattgaagccttagtgtaactaatactgatgactttattaatgctaacactgcaacgtctttaatgcacaccagcaggagacaaggggagaaccctaacctgggagtcagaatgcctgactcatattctttcccaactcatttaatctgccttcactccagtactccaattcgtaaaatgcaaatagtagtatgtgccctagggctcaaaagactttcaaaacgtgagaatagagatagatattctggaaatatgatgtcctcaaattgattattttttggtacactgaaagacaatcaaaaagtgaaacaaaagaggcatttaaaagtagtattaggaaaagtgtcgatctctttttaagaaaaataatgcaatgcagaacaatttatatgtagtatataaatatttatatgccgaaattactaacataaatatatgtatatcttcatatccacttatagacaaagatatatgtatagggaaaaatttaccctatgttgataaaacttgtatgcacagttcagcctttcagtttagaggatcaaatcctaccaagagggtcaggcacattttattttattttgagccgtttgagatgtatgtgaattccaatttatataaaaggatttgtttattgtatacagctgtcattgctttcaggagtaaaaggtgagcagcacagtctgaaaataaatattgaaacttcttttacattttctgaattgttgtactggtcatgagaggctgatattgcatggaaaaatagctcctcttttgaaaaatactattttatggcacatggactcacagagtaaagagacattttctgttagtatcatcacttgaacatgcacttagcaagaaactgaatatggtagaatttctttactcagttcaaaggattactcatttttgtttcatagtgtttggtctgggctctaaatgaagcaaggaggttaatgtaacgagactcttggtaatcatgcagaaccatttgctgacttgataaggttcaggtgcaaatttgtcaggtcatctagatgcttgccccaataaagaatgtttgcctgtgacttttttaaaccatgaaaaggacaaatgcaggcagtggctgctgggttaaaatcaaataaaaataacacaaatgaacaagagaatagagggatgatattgtacgctggggcatatcaattaagaactatttccacaatctgtccagaaattcagtgataatatgcactatacaactatccacccttacgttcttatttttctttttagcaatgagggaaaaaatggagacaataaaacgagtaaattggttcattttattgtaatcaaacaatttggttgaagtctcaatgatactcactctgcagttactcaggaaattttatacaaataatgatctttgatgtatctgattttcaaagcaacatagattagaggaatccccttcccctccccattactggaattatcatcacccagcctgactaaatgcatttcacaccagacttctgtgcataaagatatactgcccactgctgtgaaaattagtataactttgatgagtcatttgttccaacctttgaaaaaaatgaaacttctgagaaccatactgatctcatgataactttatctctatacatgatatggtcctagatttgtaacttggccatgaagaatccatttgctaaggagaataaaatgtatttaaggaaatataaaaagacatgcataaaaacagccattatgttaaaaagtgtattcaatattatggttagagcctggttaatgtctcataatggtgatttttaaatgccttctgcatattttttgtaaccagaattactaattacgactgatcatttgggcaaagaaactcatcaaagcatcgtctattaggaaaattaattaggcatctctacttaaaattagacaaatgatggctgatatgaatgctgacatagtatggcattgatgtaggttgaagcaggcagactgacatttagaccaagggattataaactcttttatagttaatagtttgataatttctctctcatccacatcttgatggccagacctctgcttagaaatttgacccataagtttgttatttttgccttagtgctggcagtatgagtcaagtgacagagccaccatctcttctcaaacaatgccattgtctcttgatttcaaccagattttctatatttaagtgtggttatacagtgctgttttgccttgctttacccactgtatcgtagacactgctactcagtgggtttctgaacaaaacaaagaggctaaaactggggtttctcaaagttcagtgtaaaaattcaacctcttcgttatgtatttcttctacttggagccttagaataatttacttattttattatagtttaagtagctcatttcttcagccagtaatttttgtcattaggtaacagcaaattatactagccatcgcctgagtattttaatcccatttgcattttaccaggtctgttcacctgtcatttcatttttgaaatataattcctatagcaatcatattaaaaatgaactaatgttccatcattttctggtcaagttaaaacgagtctgagcaaacatatccagcatataccttcggaggaacaacattaatagagtgtgtagtggtatttcccatccagagagattttaacttggaaaagacatcacttcttttaatttctctcctgttcagcgtttgtatattcaatatgcaaattagaacaaaagccattataaaaattttcagtgttacatacaaaaatataaaagttaaaatgctgtaaatatttaatgctacagtatagcatttaatagttttgttcaatttaagaatctcagttttaccagtttggtttaggaattctaatttgtaaatgagggttgacagtatttcacaatgataaataaatcaaaaggcaaattcatcattgataagccattttgtagcaaacttgccagtggttaactaatagctttattgtatttcaaagtttgtgtgtttgtttattttatgaagagggtggaaattgagatgtcacgtgcccttaaaatgcagaaaataatgcaaggctttccagtgaatgtgtaacttctacctcatgtgaatacttttaggaagattcatgatttggtgccctatgcaagtggcaactcatcttcagtggaaagatctttaagggagagatgctttcttttgagaattgagaggaattctagactttttaagaaatgaaaaggtaaaataataagagtatctcaaaatatatacaacaacccaaacaagaaaatgttaacaattatatggtactcttataaatatgctcacaaatatttaaagaaagcgtttccatgacttggcagatattacatgcttgtatatatgtatgtcaagcagaataaacatattatggaataaatgggttgtgaaatttacacagagtgtattgatgtgtttgtaatacaagtaaatctgcttttctgtagttaatttacccttagtgattaaaatacacaattactttaaatgtataattaccatcattcttttccctatagtaagaaacttaagataattttatacccatattcatttagtattcaaatatacagtatttaaatctttagtaggtgtcaatttctacaattaaccatgtaccagaagattttctagaaaacaatttgaaatgggttgataaaagtttatttgcctcattgactagcaggcctggctaaagacactcatatttaaaccttatctttggccagtgtgtctagttatattccaggtagaagttcctttttttaatttttattttttgagacaggttctcattctgtcactcagactggagtgcagtggtgcaatcatggctcagccttgacctccagggctcaagccatcctcccacctccatctcccaagtagctggaactacaggcacacaccaccatctcgggctaatttttttctatttgtagggacagggtttcatcatgttgcccaggctggtcagaagttcctttcgtgagtagctgtagtgtctcggtattagggggaaaaaaacaattaaaaattatgcctctttacctaacttaaaaaaataacctcatatagtgtttgggaaaccttttctgaattcaataaaaattcagaaaacaaaaatctaatttctataggagatttccttttccagaaattaatctgatatctgtttttgttagttagaactatgttacttgaaacgttgttacatttttaaagattgtttagtacttagggtgagttgttgagtgtgagtagaaattaaacttgtgatttgtgaaaatgtaagattatctgagtaatggacaatttctaatattcattttttaaagtagctaactctgccttattatccccttccacttttcccctggatgggtgatttatataatggaatgcagtgtcattgattgtgtttgaaggaggcacactaaatagcacactattgttatcttgaaaatttgttttattttgtttttgcccattttttaaatcatttcattctatttttgcccatgtctcttgtaatgagctacacatgtaattagtacacagagttctggtgatgtattcattcatgagtttaggaagtgagattttcagcttcatttccttctaagcatctcaactaggagcacaggggagacaaaaaagattgcaacctctttatacagctgtgtttgacccttggcactctattcttacttcaattatcgtccattgtaatgatcccttttcatgtctagcttaaccctaaactgtgagttccttgagaataagaactttgtcacagtgatgttttaatatattctcaccacacaataaaggatctaagtgtgtgctcaataaatgggtatttgttgggaaatttaaacaagaaatagtgaattattttctattcactatttggataccctttctccaaagatattttttatttgagagtatcttatttacagtaaaaatcacaaatattatatatacaatttagttttgacaaatgtctacatttctatcctttacccaggccttcaataagaaaataataataatttttttcccaaagacataatctggttatttggttatttggctgaaacaatgaatatctttgatacatggattctttaataatgaatctgttatttagtatttagtcattacttcataatgattccaaatttcctaataacttcttcccccactatccacccccatcccctgcccctgcaaaaaagacaaaacaaatctccctttccctcaggaagtagttgatttggtgcctgtgtaaggtagttcatgcatttccttcttctgttttgttaccataccgtatgcttggcactcagtacaccaagaaaacaaagaggcattgcctgtctcgaagttgcttagagtctagtgggggagataatgcacacctgcatccatagcacagcaatgtgtacataataacaaagatctgaaaaccccagtcagttttctatgttttgtcctctttcacacccttccgagagttctatctaatgtaactatgaatggtcactgtgtctttatttttggcccagactcttctcaatgcttcagcctcacgtatccaactacctactgattattctgcttggacatacatcagccattttaaatttggcctgagttgaactcattctctttctctcccacattcattgtgttttcatttgttttcttgaaatctcctggttaagtcagttcaggttgctatagaaaaaaattttaggtctggcgtggtgtcttgtgcctgtaatcccagaatgttgggaagcctaggtgggcagattgcttgagcctcaggagttcgagaccagccagggtgattatgaggaaactctgtctctgcaaaaaaaaaaaaaaaaaaaaaaaatacaaatactagctgggcattgtggcggtgtgcctgtagtcccagtagtcaggaggctgaggctgaagatcacctgagtcaagagaggttgaggatgcagcagacagtggtcgtgccattgcacagaagctggggtggtacagggagaccctgtctcaaaaaaaaaaaaaaaaaaaaaaagagaaaaaagaaagaaagaaaaagaacaaaagaatcctatagactaggtggcttaaacaacaaactgatttctcacagttctggaggctggaagtctgagatcaggaggccagaagagatcgaaaaagcaagttctctgtctgtctctgtggtttttgttttgttttgttttgttttttgtttgtttgtgtgtgtgtgtttttgagacagagtctggagtgcagtggcgcgatctcggctcactgcaagcttcgcctcccaggttcacaccattctcctgcctcagcctcccaagtagctgggactataggcgcctgctactgcgctcgggtaatttttttgtatttttagtagagacggggtttcactgtgttagccaggatggtctcgatctcctgaccttgtgatccgcccaccttggggctcctgtgtcatccaggagggagtgcagtgggtgccatgtcggctcactgcaacctatgcctcctgggttcaagccattctcatgtctcagcctccagtgtagctgggattacaggcgtgtgccatcatggccggctaatttttttttgtatttttggtagagatggagttttaccatgttggccaggctcgtcttgaactcctgggctcaagtgctgggattacaggcgtgagccacctctccaggcccaagctccctttttgtaatggcactcactccatttatgggaggtctaccctcatgacctgattatgtcccaaaggtcctcctacctcttaaaacagggggatttcaacatatgagttttgtggggaaggaaatattcagcctgtagcacttctctttccatttctatttcaattaatggcactgccttttgcacaaattaggagcctgagagtcctatttgacttttctctatttctcacatctaatttatgatgtagtctagtatattctacctctggaattcctctgaaaccctccttcttccctctagtaccactgtcactgtctttgtttaggttttcatcttcattttctctcagttggattatggcagtaggctcctaaagaatctttctaccttaatttatcttcttttaatacaatgtcctacataggtgcctgggattgtttgtcacatgctgtgccttgactggattaaactcgtaattactcacccatgcctctttctttcctgcctcctgtacctgatgttctttctgcttgagactctgtaatctggacatgacaaaagccttccatatccgtacctctctcaagggactgcctttcccaccttccctactacagtggctggcacagctccatgtcccatagtctccattccttctcctctacctccagaaacaactaactggactatgtgggggcatctgagccatgaggaggcattacataggcattaaaagatgagctgggccaatcaagttccctttctcttgggactctccatgcagacatctcattctgagagaacaatgattcatggcacagtgacttagtcagtgaatgcctcaggtacgaggtggaggtggacccttcaggagtcgtagccatccaaagttatgaggaggttcaaacatggaggagcagccatgaggtagacaaaagataggccaaatacagggtcagaaatccacttgacagtgaggagggatggttggaaacaactgaagagaagctgagtcacgtgtaggctggagttagacagtgagcccctgtccttcagcttcagccgccagatgcgttccttgaggctgtgtgatttggcttttcttgggttcccttgtatgtgcatccttatattaatcccttactctaccctcctaccttaaaattaattcagtgagactgttcttcacagctaaaagaacctaagtaaaatgtttcttctaggccgggagttcaagaccagccttggcactatgtttggttctatgtttagtgagactccatctctgcaacacacactgtggcctaccatgggggagggcatcaggataaatagctaatgcatgtggggcttaatacccaggtgatgggttgatagatgcagtacaccaccatggcacacatctacctgtgtagcaaacctgcacatgtatcccagaacttaaaatttaatttaattcttaaaaatgcaaaataaaaaaagaaattagctgagtgtgttagcgtgcacctgtggtcccagctacttgggaggctgaggcaggagtattgagtaagcccaggagtttgaggctgcagtgagtagtgagtgcaccactgggcaacagagcaagaccctgtctttaacagaacaaaaagtaaaaagtaaaaaacaaaatgattttccccaccctccccccttcacctcagctaaaatgtcacctcctccagaaattccttatcatttggttgtaccactgtttgctgcttaccactgtcttaagttgtaattacgtatggtcttctctctaggtagggaacaacttgagactaaagacgttgtgactcacatgagtttgtataaatgaagaaaatgcgatgggacataagtagggtgtggggagagccttcatggggagatcatacttgacctgagtcttcccaaaagcaatccctctgtcttacaatacagctgtcaccacaattggcttgataaaatatggagtaacaaatgttaggttcacctagactaatcttcccttcctatacatgaagtacttggaggaaagagaaagcagtaaagtgattttccagagtcacacattctgacataggcagtgccagaccaaaaatcagtcacttcccataaggtggatatgcacactcacagaaagaacgagcctatgcatagaatgatctcattttcaagtaaaataatttttgagatacaaacatcagcaatgacaaccacaccccattccccagatcttgcatgtacccagatttattataaatattttgtgataaactctaatcagagcccagtccctcagtttaatagtcatagatttcaggattttgcttctgcttatcttcccaggctttcttcctcttctgtcttcttatggactggagaagtccttgtccttctagcaggcaggcacaccactttgggtttctgtttgtttttgtgtttttcagacagggtcccactctgtcacccaggttggagtgcagtggtgccatcacagctcactgtagccttgacttcctgggcttaagcgatcctcccatctcagcctcaccagtaactgggagtactagcacatgccactaggcccacctaatattttcttttttcttttttttttttatagggatgggggtctccctatctttcctaggctagtctcaaattcctaggctcaagcaattggcccgcctcagcctcccaaagtgctgggattgtaggcatgagtcacctcgccccatgggtttctctgtctttttcaaaccatcccctgcgtactgcctgacgtggattttctctctctgggagtctaggttaggtatctctcaagctttctctgatcaaagcagatgcaatcccttccgttggtaccacagtagcacttttctcttagggttttttttttttttggaattagtcacatggtgtctcatgtaatagttatttttgcacttctgttacttgcatctattagattgtgcacttctggtggcaggcattttatgcaaccatctggactacagttccttggactcagtaaagatttattgaatacatgatctcatggggtcatttgtttctttcaacatcttgtttccactactctccataaaattcataggttctctagtaatgagcacttcccttttatctcataaatacctttaagtgactatctgccacttgcaaaaatatctaaggaggggaattaagtgattttgacttctaataaattgacagaaaatgttttaaccataaagattcaatcaatacaaccacttttaatacaaactactgttttgaatgtttgtgggcagtgcagagcaatgtaatatattaattcagccttcatggaagctaagtacttagtggaggaactaatttaaataaagtcagaaaacatgaaaatgtggaaggaacagtgatcgctaaaatgacttccatgaattccataataaatgttgctgaatgtctgagttattttgatttacctaaaataatggttaagaattgggttctcctgcagtggtcaaggttagaattcaagaactgccactcacacttgcttggttggattcttctattaagagttaaagcatatggagccattagcacagagcctggcatagtgtaggcactcattacattttctctgctattacttttagattgcaaactcacatagctattttaagagtgttatatgccaatgccacttgtagaaaatttgtaaaacttagttttatttctggtgcagttactctttttaaagttataaattatatgtaattactagtatcaactagaggagatcaagtactgttcttcggggtctaaattaatcgtatgagtagttattctctaagcagatattgcatcatacatatccaacagcctcttaaggtattcagaattaataaagcagggaagatattaatcaaggatagtatctagcagatttgcataaattaattaatgtcaacagctacaacaagctgcagcatagcagcacctgggaaaatctttactcccaatgaaataaggtagtgagcctgcagggcagagagatattctatctccaaatacatgccaaggtcaccgtttacataacacaagtgacaacacccagccaaatcacagtaatgcatgggtgtgtaggaggggtacatccaggaaaatatggtgaatataaagctgtttagtgaaatccttaatggcttttcaggtgtttatattttagcattgcattgagatttctgtttctttgcactacattactgaaaataagtattaaaatttattggttttattattcgtaaattcagcaagttccttttgtgaattgaggtttaagaataggaggctgggcacggtggctcatgcctgtaaccccagcaatttgggaggccgaggcgggcggatcacgaggtcaggagattgagaccatcctggctaacacagtgaaaccccgtctctactaaaaatacaaaaaattagccgggcgtggtggcgggtgcctgtagtcccagctacttgggaggctgaggcaggagaatggtgtgaacccgggaggcggagcttgcagtgagctgagatcacaccactgcactccagcctgggccacagagccagactctgtctcaaaaaaaaaaaaaaaaagaataggaatgaggccaagagtagagacaatagaggtatcagttctttcctttatatagaatttaagaaaactggcttggcatggtggctcatgcctgtaatcccagcactttgggaggccaacgcaggaggatcacatgaggtcaggagttcgagaccagtctgaccaacatgaagaaactccatctctactaaaaatacaaaattatccaggtgtggtggcacatgcctgtaatcccagctacttgggaggctgaggtgggagaatcatttgaacccgggaggcagaggttgccctgagccaagattgtgccattgcactccggccttggcaaccagagagaaactccgtctcaaaaaaaaaaaagaaaaccttgttgcttcacttcttgtacccatttcaaatccaacccggttccattggcagacatttccttaatgttagctttactaactcatttacgcattcattgactcaataaacatgtttgagaacctaataaccaattgttactgtctttgataatgggaatgcaaaactcaggatcctccacttcaaagtgcctggagtctgaaatctcgtgcttcctgcaaacaaataatcacagattgatggctcatgtcctaaaatggtgatgcttggatatgtgctactggtccttcctgaagagaacttgagaagttttcaaagagaaaacaatatttaggaccaatatatgtgcttgactaggagaggtgagaagagagactatttcagagaatgggaccaccatgttaattactcttcatagttcccagagttactctcttcttgcattagctatgctgagcttcctgcagttgttgatgttagttaattttatgcagtctgtgttggtgagccatgaggaaggacaaggagaagtacagaaaggagactgttgctccttctatagtcttgaatactccagtgcccatttgattttggcaggtatttgaacactggctcatttaacctgtttctgtcatctctaggaggcatgtgcttctttatagcttgggggtaactgggaggacatcttaacagttcctacttctccagcctacaaatggagcctttgggagagaaacatcccaagacatgccttgactagtggacggtcttctttgtccagctgggatccaacaccaactgggttcccttgatgtctataaatggtggacctccttggagcaacacgtgaagagccccgatggattatttggcataatgacgagaaattactagtgtaaggaacaagattgtattcacaattttaatacccctacaaagcttcttcttaaggacttggtttagttatacaataataaaatataatttattcaaacttctgaaaagatcacaattgggtcactgtatatttttctctgttttaatacacaaagtgttaatcaaagctttatgagggcctctgtttatgagcaaggatgggatgtgggaatgctgtgaggatactttttttctggctagtgagatgttactattttaaacattaaatcttaaaacgtgtgggatctggtgtgtttcctgcctgagacaatgcttattaattgccctctgtcattttgatggtaaaagtctttaatttgcactggtaaatgatgaaatggcatatggtccatctatttctggaataccatccatgcattctggttaccctctagtcctaacatccttctccaaaggatttccacatgtagtggaatacatgttttaacctggagtatgttttaagaatagcactttgtattcagtggacagtatgcagcaatgtcatttaaataatgaaatgttggcattgtttgggtatagtgtaagtttctaaaataacaatttgatatttatagggctgaatgtcagaggggagttgtgatttccttcacaggatcagagagatctttagcaaaccaggaaacatacatgattgaatggaatttctgaagtcaaacttgtctgccattagaatccacttttcagtgtaggtagaacacctgtagcagaagtttaaaaaagaaatgtatttgtgtgagactcaatcctatctcttctagtggagtcaaggcatagcatttggtgaggagaaggcagagtaccgtaatggaaaaaagttaggctttgccatcccataaattttgattcacttaaagaaaaatccctgagcagacaaagccagctgggcctcctaagtagcagtcacctcacttctacttaggagatttgcaaacataagcaaaacttgagctaattcttataaatgcctatataaaagaaaaacagaacataagctaaacgaatcacaaacagccaacaaacttataattatataactagggactctccagtgggatagaccaaagaaggcaactgtataaccatagactgttaaataagttctttgtatgacttccacattctgtctataaaagcctgtttcttacactacttcaatggagccccagaaccacttttggtttggagctacctgattcatgaattgtttgtgcacataaactttaaaattttactgtccctcagtttaccttttcaacagttcaaattctggtcacaccacttactaccttatgaattcaggccacttactcagtttactcggactttggtttccttaagaatacctatctcatgattgttgggaaaataagtaagttaatacacatgaaatctttaggacagtagctgacaaaatgagtgctagttaaatcattactattactattattagtggtaatatctttaaaaataaattctcacaggtttttgagattatcaaatgcgaataacccaacccatgccaaagctttcagcataaaccccaggtgatagaagacttgggttgaagaagagtgtgggtcaagttttcaatgaatcagaggaagcttgaggttagtagatgatacaacaggtaggagcagagggttcttaaataaaatggatgaattacatacaatttttttaaatacttagataatttaataatggattcacaatacaaagtggggaaaattccggcctcattttctcatcctagggttcaattagggtgagaaaagaacatttgagtaggcagcaaggcagcgtccatagagtttcaataaaggcaaaagatggattttgcttatagagacagtttgggcaatgtagatactattttttttttttttttttgagatggagtctctattgcccaggctggagtgtaatggcacaatctcggctcactgcaacctccgcctcctgggttcaaacaattctcctgcctcagcctcccgagcagctgggattacaggtgctcaccaccatgcttggctaatttttgtattttagtagagacgggatttcaccatgttggccaggctggtcttgaactcctgaccttgtgatccgcctgcctcggcctcccacagtgctgggattacagatgtgagctactgcgcctggccgtagagactatttaatatcattgaaagacattctaaaacgtgtagtgcaaggggaggtgtttgttgggattttgcaggaaagaagaaacactgccatcagtgaaactctatcctagggcttacatttccatgtgaccaaggctgtgaggcatagtcagtgcagccagcgcgaggttttcaaagaattgctgctggcttgtctgctggtagatggcagttgctagccttgtctttaggcactctcctggctttccaaaggccctgctcacagttctggaaaatctctagaatcttccacatttacctctgtcttaacttcctcttggttttccccactttgattcaaagagtctgtggctccatatgtagacttctacctggatttgagttctccatagttttcactatgttttggagaacataggaactgttattgagaaattattctgacacatgttaatgacacaaagacagatttcattcgaggtactgcagaacggaagagggactacttcactatggatctgagttcaattccaaatacaacagagacaggtgaggatttacagctaatgggcagagtgagagtcagtggatagagaattactaagaggatcttgattagatatttagggttgggggatgaggagcttgatgctatgttgagagtgggtgggggattctgattaaaattggctgaagagggagtctttgtctatacaagtatgtttggctttctctgttttggcatcttacctttgtgctggcagagaacctcctgccccacctctttattctatcctccagccttcattcctcaacttcagattcttgaaatccacaacaggatcattctctactttctgtttgaagtcatgcagctggagcaggtgatggtatcaggattcagctaatttacatttgagttccagcaggagctcttaacacggcctgcccatcagacacacctggggtcgtttaaaacaagcaaccaacaagtataaaacaagagtcctctctatctggcctcacctcaggtcaattttatctgtacctctggggttgaacccaggcagtcgttttttttgtgtgtgtgtttttgttttgttttgttttgtttgtaaaacttctctagtgattatgatgagcagcctgctttgaggagcaaagacacataagaccccttgctcagcacctgatgggtatctcagtttgctgtcgtactgggaccacaagcagtaaataggagaacaggattggtgattattgtgaggcaggtgctatttttctcagaacagttaagagatttacagaagatgatagaattagtgagggagctgagagccatctgtttctgatatccaaatcgatgccaactctatccatgaaagagccacggagatactactgatactactgaaggtaggaagcattaagtctcttattttttgaatattgttccatcctaaatgtttattctttgttacagctttcacttcctttcttctagatatgttgtcttgcattagggcccacagatgtattatgaatggcttaaaaactttattcttccaacttttcagattgcattttgtacagaaaagcgatacagatttgattttagtttcctatttcctaaatgactttatcaagcaatctgctttccagatttgcttttatttttctcctgtttttctacatgtgcttatcaagcaatcaactttttgcctcccatatgcactgaactatattagaaaataaaatattaaaaccaaagagcagaaagtgcagattaccaaaagattaaggtagttttaaaatgtgcttgtttcccatgtaaatgaatggagggttagtatattcagtacaaattatgtttagaatattaatccacagagtttataacatgctgtgtatgacacataaagtaattatgcagtggggtactgaacagtcacattccaatgtatgttattgacatctttttcttgttaaaaagtgcaaagtggaagcagaatatcaaacaaaatagttattattttatggtaaaagattgaaatgtaaagacaaatgataatgaaataagcatgtgattaaagctaatgatgagagtaaacactgtatccaaaggttttgctattttggtgaactggatatattttcttagtgatttctgatgattatgtgtgagaaaattctgtctgtcagccagcatataaatagagccaacttgtttgattcattgtttagctggatcttgaatacatttagaaagcccttttatttgactgatttgatcaatctggtgatctattttcctaaaaaaaaagatttcagaggggacaacaaaatataatcactaaatcttaaaagcaaaagtaaacaaatttagtactttaccagaggaaaaaatgttgctaaatatctcatgtaactgattgatctaggatttcacttcaaataaatcctatatcctagatagtcatatgaaattatctgatatttcaaaacaacttaattcatttaggatttaaagaaagctaaatttattgaatcatgggaataaaaggaatctcatctagacatttagtctattcaattttttgaagttacagatcaaaaatatatgtttaagtagctattctttgtaattttgtagcgtgtggttcatattacattttgacacagagcatatttgttttttcattttaaatacgcatgtcccctagcaaactctcggttccaatagggtagggagcatgttctgtctttataaccctagtttttataatggtgcttagaagagcaataaatgaagcttagaagatcagtggtgcttagaatctgctgaataaatgatttttgaatttttatttttttatttcttttctgttttaaaatattgccagtgaaagaggtatcctagtttctattggtaaccaattgtagatttttttcttatatttaatcgactattcattctgaattggagaaaaagaaagatttgacagatacatatttttaacaagatgttgcatatatggcagtagtacaatgtaatttctggtatgggtgaaattatagccatatgtgtgcctaatcaacttaaatcctgcctgtgaaaagtgaatcatgtactcttattgttatttcacatgtatatattaatatatcattatctggctcttgaagttattcagattttatgatgaatcaaatgggaagagggatgaaatttatccttgcttagtaatcttaaccacataggaagttcaagcaatggttatttagtgtgcaaggggaaaagttaaaaatactcaaaatactttataaaatagttattataataattctaattataaaccactcatacctatgtatggaaagagcataaataaagttagattggctctttctattaacaccatcatattaactcagtatgagtttacatatatgattgaggatagttttaaaaagccactatgtaaatgtcatatacgagacatactctttgatcaattactgagagtaatgaggtgtatgataaacttttataataatacttatttttatgacaaaagatcttttgagatctattgtaaaactatggtgactatgttaataatatatttatattcttgaaaaatgccaagagagtgaatgtaaagtgttctcaccacaaaaatgatgactgcaagttaaagcatatgttaattagctagatttagtcattttacaaacatattgtacactgtaaatatatacagatttatctgccaatttacaaaaagaaaataggtcaattgaaaaatggtggccgggcatggtggctcaggccgggcacggtggctcacgtctgtaatcccagcactttgggaggccgaggtgggcggatcacgaagtcaggagatcgagaccatcctggctaacatggtgaaaccccgtctctactaaaaatacaaaaaaattagccgggcctggtggcgggcgcctgcagtcccagctactcgggaggctgaggcaggagaatggcatgaacccgggaggcagagcttgcagtgagccgagattgcgctactgcactccagcctgggtgacagagtgagactccatctcagaaaagaaaaatggttattgttagacaaaaagctgcctgagggcataacttataattacatatccttagtgactgagaagtaactggtgcatagcaagtcctctgacactggctgaaattgttgaaccaaatttaaataattggatctatagtcatgtgttatttatttatttagagattgagtctggctctgttgtctaggctggagtgcagtggcatgatctcagctcactggaacctctggtttctgggttcaagcaattctcctgcctcagcctcctgagtagctaggattgctggtgtgcaccaccacagccagctaacttttgtatttttagtagagacagggttttgccatgttggtcaggctggtctcgaactcctgacttcaagtgatctgcccgccttggcctcccaaagtgctgggattacaggcgtaagccactgcactgggctgtcatgggtaatttaatttctgaaactttattacacataataggactgcatttataatcttaatttttttatggctaagaaaatattaggaagaaagcaaactgcaacaatgttttatatgtatttagtttatttcagtgggaatactgatcatcattgtaggatcataattgaataatttatcctcttaaacattcctgtttgagagaatgctggttcattcattcagtcagtcatccattttttgatttaatgggcacttattgagtaggtacttttttaaggaaactactatagtggaacaaaatactgaactggaacaatgaactggaaaatacaacagatccaaatattttcctcccgtcaaagagacctttatttctttttagaagaccatgctgcctaggtatattggacacaaataattcttgtttacaatgtaaatgatatgctttttgaaaagaatttaaaggttcttgatataacaaattgtgactttttaagtataaaagtcaatattttggtaggtaagtctttatttttgtgataagaaatgactttaaaaacatttatttcactataatatttgaaatataaacatagcgataattcatgatgttgctatttttttggttagcatgaatatacacatttatgcttgttctcattttggatgagtgattctaatattattatatattctgtattattttaaaagcactttgtcaacttaacacacaatgtatttttatatgtatttttctaacttagttatgcttttagtttaatagcatgacatgttttaaacatattttaaactataattggtagaggcagtttaaagtatatacactttagtataaacatagtcatacagcaagtatattaacttgggaaaaacatacagaaacacaagaagctatcattattttcatgaagccataattttgttactttttatttttataaatatagaagaaagaaaagccctgaatggtttggtgatcatgtggggatataatgtacgtagtaatgttacacagtgtaatagttattgtttcttgatggttcttctttacttagacataaattccaatgtaaatcagtttgcttgggacagttctggttgatacttgttgtaccttctaaattgttaagagcatctacttgtattgtaaaaagtgacctgctttggatgattaactacgtggtcactgccatcacaaagcattttgtaagaagggttgtttgtgaatgaactagttgtgaaagttgacagctcctccctagactcctaggaagcctgacgtgactggttactatggtaacagagtactatgtgaatacacatttcacacagtctcatagaatcgtacatgtccaaatctcccattcagtctttcttgtaaatggtgatctggcttccacttgattactctctgtgaccaaatagaaactacaacctccctctgcttctcatctgtatttttcaatgctcaggaaagagggtgcagctggagaaaccgtataaaaaacaatgcagctaattgtttccagtcaagaaactccaccaggcctcatcttccttcttcctgcttccttctacgtcagttcccaagagcttggggttttgacttttttgttgaagcctctgccaggtccatctccgtggagtgagcaaaaccagaatcaccctcaggaggcactttggaaacacaacattcacatttctgtattaccatgtcgagtggttgtcatgaacttgtagtgattggatattaaagtaactagactttctgcattgctcagagatgcctttagtccttaaagcccttcaaatatccttcaaaccagtcccataaggaaaatcctgtatataattttccggttttggaaagttagtctactatatattaaaaattattttcccatggttttattataccataaactttttgaaaatgcgactaccatgtccatggagagaagacgctactttgttgcattctatattttaggagcattgtgcgctgttgtaactaatcataatatgatggctacactcgttttggtatttgaataactgatatgacacattgcatcatatctgtcttctcatcttcctcgcctaagcatttaccttctaactactactattttattataaacaatttttacaaactacgaaatccttttacagtttatactataatgaggacttttatctgatgaaaaaatattgagtaggtagcttacgttatctaagaatatcctttctgatataaaaatgaagagttgggtctcaaaggattcactgccattgtgtcatcactgcctgtggaacccagaaattgcattacccatggccctaaagtctagacctccggcatcagaaagggtagggcaatgccagctgggactcactatgcttatggaggaaattttgacaccttttctatttctggaaggctttggttttcagataatttttttgcaaggaatgagatatgtttacctgtgtcttaacatgcattcattttacatttccctgtgggagcacacagaagaaactaacatttcctttcatgtgatgacccttgagctatttgaatatagctggcattcagtttcttctcccaatccccctgtgaatgttttgaaggccctggactcatcttaagtcagggaggggagactcttctctttcagacataggacattatgcctctactattgcaagcaaagacaccaccccttatttatttcctggttccggtaatcccataatagtgttgacttatactgcttttgaaatcaaccaagccctacacagtctattgtaattactgtagttgaactatgcttcctttaaatttgggattaattttgtgatccctggaacttcatagaaacctagagacatagattctttgtaaacaaataatgatataaatagagaaagatatctccttgacccctatgcagtgccagttttctgtcctgcactatactctggattggtaaaaaggtagtggtggaagcagtgacagaatccaaacctgatgcagactcatacttcaagaatcattaaagtacgtgttcttccagcttctcgcctggatgtcggttaactactgagggtacaaaggcaagatgggtctttggggtaatcaggcagaagcaattttagctcctgatgggaggtaaaaaagaaagaagctaaagagaaaatgcacaccttaacagaataactcaaaaaagttatggagagttatgtgagtaataaacaactcattaggaaagttactttggcttagaaagtacataagcagcctaattatgtagtcatttcacatctatcttatgtgaaattggcagtaccaaacaaacagcttctctttttttcttttcttattccaggtctttggaaaatagtcagttttttgtctgataaattatctcttttgttgaaattgatttgtgttactgcttttcatttttgagcagattttctcattattcgtttatatcaaagtgtcaatagatcctgagaacagggtacacttatgtcctgtgtatatagtgtgcattaaagggccttattcccaagtcaactttcttccacgttgtgagtggcatatgtacacctattgcttgctattttgagttttaaattatctaagcaagaaagcctgaaactaattaaactccagtggtttatttattaatattaatttacaacctgatggcttaatcagtatcctgctttcttttttttctttaaagacttggcataattttacatagccttgtgattgctttgaaaaggctgtagtgttcttccatcattagatgacaattttcttttctagtttgaaaacttagcttaagttctcaagtcaatatgcctatagtgaaccatttattgaaggggtgttcattgcgaatagcatggccaattaaatgaagaataattggtttagttgagcaccttgcaatacttctctggtttagaatactgcagaaactcaatggttctttctcatgctgtgtgtgattttgctttgtttaaaacctgatgtgcctaagtagatttaccttaccagtagatggtttaatttgattttaatgatattctatttggctctataaactgtactgaagccagcgctgccatgctgttaaaaatgtaatctattctataatggcattaggtgataatgaaagcagatattagagacataaccattttcatatttaatagagaagcaatgtgttctaggtaatgaagttaagacttcacatgacattgtcagcacatgttaactctatgttttggaaggctgctttttagacctaagtaaatataattcaaaatgcccctatacttgtttatctattagatgctcttgttttgttttacacatcataactgccaggatcatttatttggcagagcctcagaataaaaacaactcaaaccaaccaaacaaacaacaactaagaactaataaaatctttgaagcttgaaactgtagaaatgaggtaaattttttttttccttggataactacttccaatctagtatttgaatggcaaacaactaagcaacatttgtatgcttttcttttgaagtaaggtggaaacatttttcatcagtttttcaactgttagttggaatatttgtgatcactttaaagtgtgacagtaatatgaaactcctgagatgaccagcagcatagcctttagcccatttgtgttcattttaaatatgcttttattgaataattaatatgtctagacactttattgtgaaaactagaaatttttcctatccactccggtgtaacccgtgtaaatagtttcctgtgtataccctctatacattttccatcatatataagcaagcatgtaatagattttttttttaaagagacaagatcttgatatgttgcccaggctggagtacagtggctattcacaagtatgatcatagtgcactatagcctagaatttctgggctcaaacaatcctcctgcctcagtctctcaagtagctgggactacaggtatctaccattgtgcctggcctaaaattttatcttctaaagattataaaaatgagggaattatactatgtatacagttctccaactggctatttcataaacaatgtactgtgcaaccttttctgtatcaggcacatatgttttctaatgaatgcctaggatgacattgtaggtatgaacttcatgcttaactttagtttgttcttggttgttttccaattttaagtttgaagttagatgcagttacatgaagcaagtgaactctattctggttttcctgcctctaagatgccttttgtcattagttctgctatcttcagagataaacaaatacattttataggcagacagaattgcataaaagaattttttttcctcttggcttatttttttctcaataatttcttttatccctggaaataatacaacgtaatgcatcaaatatatacttgacacatgctttcaaaccaagccattgtaggtgagactgacctggaaaacagatacagaatcaaagtgatcacatcagttaagcacagcaatacaccctcttacagtgaaagacgttcagagcaattcatgagtatgaaggacaaaacacggttaggttaaggattaggaacagatgaccaggttggggaaataaagttaatatcttatactccccacatggtattctcatgtttttcacactccaaccgcctataaaatggcagcacataatttaggccatgagttctgtctttggtatgagaatcggactgggatttaggagaccttggttgccttgtttagctactatcaacagcaaataaagttgcatgagcataactgcagcagagaatgcaagagaatggagttcaggaaaaaatgagggcctaattagatagaaaacaaggaggggtgtgtgtgtgtgtgtgtgtgtgtgtgtgtgtgtgtgtgtgtgtgcacgcatgtgctgagaaatgaggagattggttatgatgttatacagtaaatcattttatagaagaagattaatctgggagtaaattgcaaagccaaaggattacatggctaggctgataagttgtgcttttttgttttgttttgtttgtttgtttgttttttggtaactcagttctgaagttgatgagaacccagatttgtatgtcatagcagtagaaacagagagggaacagtttgaaagtattcaagttaaaagttgaaaacagtacattgttggtttgaaagatggttaaagagctttaatttcctaattattttgatggatgagaaggagggaggggactttttatcaactagttatgtccttttgaaaaacaagttgtttgatttttttattaagatctaaattttaaaacattacatccttttaaaacattaacttaagtttttgtttatttaaagagatatgttgtttgttatgaacaggatgttactatgaaattttttgaagattgtatttctttttctttgccataaaaaatgaatatgatcatattgtggataattgtcctaaccataattatagctctgttttctagggaaacaatgaaatatattcttggaagaaaataagtttagaaaatactctttaatcatcccagtgcaattatattcattatttattttgctttttaaatcagtaaattattagctactgaaaattataattactaccaatgaatagataaggctttacatatttcatcatttaattaatgattaactatttttttgactttacaagtaaatcattcatttttggaaatttaagtcaaccactaaatattaatattctttatataattttacattatttcactaagactaaaagtgtacctaagattggttgttgtgaagttttaaaaatgtgtatgcttttattttaagagattaatattatatattattaggatattatatgagcaaacatgttttcttcaatttttttttaaccatgtatgtagtcagtcattactaagagagagtgagtggggagtcactgccccatccctttatctctgcgtaccactgttctgaagatattttgttgatgacatatatgagcaagatatttggacaaagagtctgttttctgatcctctagctaatatgcatatatatgaaaaaaattaataacgttcatatatgtgctgtcttttgttcatgctcaaagcagtctcaatgattttttcacaggggtgttctcctgtatatacttgaggccaccatcagatttttaaatccaggcttagaatagtgactataaccaggtttatcttcttttatgcatccatggtatattgccttctaaactgtacccaaattctttatcagaatcatttttaacaaagtgctccaagctgtaaccttcatttgatgaaccttgctctttgagtggagaactattttttattcatgccctagactattaccaagcagagagcttgaaggcagtccattgtccagatatactaataaaatcgacattcatggctagttttcctaatgtgtgggtatatgtcattatccattcatggtttgtctttcatgcttttcatacacatcaagccaaatgtctgggacacaaagatgtccaatatttccttaatttcaaggagctcataattaagtgttacaggagaacacatgaacaaattattgtgcaggttgaataaagctattaggtataatgtgaaagtatgctctagggcataaagggaaaaaatgatgagagtgtttatactctaaactgctatcatcattggaaaacagcagcttttaaaccgaataatttctttagcaatcactaaataatagttaaaataaaagaaccatctctttagcccttattacatgctaacacctacaaatatttaattatcaaatacctctttaaaattagccttataccaaagtattttactttgataaatcagagctcatgagccttttctccagactcaacaaatcaaaatcttataatgttatgaggaactcacggattaaatgtttgtttcattgctcagcatacgttttaatgtattttgcttttctgagaaggtgttgtaccttgttttcatttaatttctgtagcatatacacttagtgcttaagctgtcattatctgatctgcatttgaggagcaagctatgttagcactgtgagccattctcatttgcaagtcaataattgtgacagtgcttctaagtatgtagacctgtattataaatgttaggggaggtttagtaatgtaatgggagaggcggtccccattcttatcctttgtgttacttacaattggctgacttttaacacactcatggggtgttttatatgtggtcctgcgttcagaaatcaaattcagattttagcaattctttcattagcattttctttcctattaagaatttgaatgggcacataccaagtcatttaaccctgcctaagcatcttttatcattgaaaatatttgataaacttatcagacacctcaatgttttcctgaacagaaaaagtgacttaatattaatctttacaaccagagatttgacgaaagctctgcttgtattagttggagacctcccatgcttcaaagtgtgttgcttcaggttgccttagtttgttggataaccaggcgcctctttgaattcactgtatgcttgtgattaatgtcattcacacaacttctcttttctttatccacaacccaatgttttaatgagatatgcttttctgttttgttttatgtttctattgttttctaagttggattactgaaagcttttagtctgaaggaagggaaaggcctgtggaatcaatgctgaacctctgtggtgcctacatttacttttttatcaactttatcagaaaactgagtggaccatggtaaattcttaattggttttgttaaaactaccagtgaagagtgaaacacatggagcaggcttgaaacttaattgaaatccaacatcaagtatttcttgttatacagtctgtcttttttccttttggaatttcttttgtctgttactgtgctatgataagctcatctgcgatttcagcactttggaagagatattttacaaaggaggggaggatacaagaggaatgataaatggcaaggaaaaccactcactcttaatgctttttgtcatactcatgtcctcttgtcccgtcaaacataccttttctgcaatgaattcaactcatgttatgtgacattgtcattttacaagggaagactagccagagaatttctgatggatgccaaagacatggagtggtactttacattttgtaggtgattgataggtttagtgtcttgtatctagaaagtggacacatagagtagagcagcttattcgagactcttctccctccgtccatagccaaggaaattataggaagcattctagtttgttgaatggttcataaatatgtgacagttttttttgttggttggttggcttttgttgtttgatactaatggaccaagaagaaaaaaaaagcaaatttttattttgaataatgagggtgaatgagtaatatgagtagtatagttcttttctgtaacaaatttcagataacttgatttaattgggaataacatgttttctaacatagaaaaaagaatattgagactccagttcaacatggtaacatgagcaaatatgtttatctctataccctcctgaatatctcactaaggctaaaataaaggggaaaaaaggatagaaacatacatgaataaagaggattggagaggagataacaatcagttagaaatactatgaatttatggataatataaattagaaggaggggtttctagagcagaagaagttgcatacctagtgcttgcagggggaggtgccaacaagcaggaagcaaaatcatgattcagaacctgggagaggacagcaattggcaatgtgaggaagtgcggaagccagttgtgaaatacggggctgaaacaaggaagtttgttcaaagtctaagtagggtatgttatagctttgctatatgttatagttttgctaaattttataaatgttgctatatgttatagctttccctgcatgaacagacactgactactggagtgcccttactctagtcagaatgaggtttattctatggagacattgaacttagagaggttgcatacattggaacaccatgcacagctgggggtggagtcagtctcacaatacacagtgagatatcccatcaattacttccgatagcactggcagactggcctataactgtcccctcatgcatctctacacagattagtgaaagctaattttctggagaaactggctccagaggaaagagatggtgacatttgaagagtcaggtcacatttgaaaatctgttcactctgcagtgaaaccctttggttgacaagctgcagccctcgtgcatagtgttcctaggctgtttattttctcacttgtaaatatgtataagaatcaccaagtgtttggagtgtgctctgacaagaaataaataggccacaagaaggggaaaaacccactaaaaaggaaattggagaaactaaattaataggtatggatcagaaaaaatggcttaaataagcaagagagaatgttaacttagagaaataaaagttgcatccacaaaacagaatgtgatgctattactgtcagagctaatgaagaacaagagagaccttgtgagaactaaaactttggaagcaggagtaaaataaagagtagaagcatttgagcattaagggtgtatcctagaaaatagaacaagtagaacatatagtatccagcttacactgttttcagaaaaagagcagaacaaataaaataaattctcaaagtaataaaattaagtcccaggacggaaggaaaggtgcttccacatgctgagtgcattgccaaattaatgaaaaatgggtagaaacaaaatcgcaaaatttcagaacgctaggcatgaagaccagatcacagaggcctctagatgagaaaaatacatatgtatttttctccttcatatacaacatatgaaggattaagaatccaagtgacataggatatacatggagcatagtggaaactagaagtgaaagaaaatcgcaaaacaatagctgtttgacagctctagggaacaacaaacccaaattggagcatgagccctgatggcttcaggaagatagatcaactgatatctttgatcatatgaaaatccatactgaaagtgattttaatgttggagaattttggagtctaagcaaaggggaaaaggacaggcaactgttaaatccaggaaaaatataaagttttacaagaagggaaatatcataatagactatttggcttatcagagaaaatatatactcataataatgcaaatactgcctaatacctttaaaaagtgaaattttatatttgttccagaataactgactcttaggagttatacattgccttgcagttattaaggagtaataaattaccaagtatattcttttaactacattttaaagtgattcccttatatatataaattttttaaatgtttagctatttattaaagaaagtgctcaaagtaaaggagagggcttcaattcattagagaaaaacaaataatattagtaaactattggaatcagaatgttttgagaggaaacgaattatcttgttgctgatagatatctcagaattttaaatgatattaagtatatggactaagtggtattgtttatataagaatattgtgactttcgcaaatagtgataaccatctgggaatatttcttctggaaagtagtgtatatattatatatatatatatacacacacactctattatgatattcttttgatgatatgatggattcactttggggctatagccacagaattatgtagtatagcagtaaattgattagcagtttattaaactgcaaaagaaaattctgtaactttcttttctgttcaactactaatgctttacaaataagaaccggtgttcaacaaatcttcatggcggagtacagagtgatttttaagacaggtgaagtattgtgtttctcattgctaattcaacgaatttctattgtaacaatagcggttttttaaattgcaatggtttttgttttttctctaatcagcaccatgctgcttataaatgaaaaggttcactttaaatttttttctgcagtatgcttgattgttaatttccaggtcagcatctagtctatcaaagtttcatgggatgataatttatggttataatggacagtctatttaaaactatgatgaggtcactctgtcttaagaagctgaagtactgtattccattctctcgcttactcagaattgcatcacgttagtttgctaatttcccatctttaaggattgtgttttgttcaaataaaacttcagccttcccagtgcctaatttattactagccattcacatttcattaattgggtgcctgatttattaggcaaatcgcattacttgctttcttcccttccctcccctccattttccttctgctgccctccttaccaggtaaaggaatgatttctctttcccaggtagtgctttcttctgttatttcttggatttgagggttctaatcttatctcgtgctgtatatagtgcagattttaagtttaactaaaaaatccttctctgattccagcgtcaaatatactatttttagaactgtagttgaatgaatttagcacattttccagcaataacaatagaatcagaggttcagagaattagggttgaaatggaccttagaatgtgtttattttaaacccatcaagttcaaataaaaaatgatttttcttaaagcaggagcatttatatttctctctagaaaatatcagtaaatacactcatctaataaataaaagaagttgcatcactaaggcactgccccaaatgctccatatctgtgagcagactagacaacaaaatacaagttgcccctgatcttttaccaagaattctcagcccatttcaacatctagtgtgagaccagcattagctacctgctggatgggctttctggtggggttacatctagaagtacagaacttctcaaactctctgtcgtgatgaatcagtcttcctcttcctcccttcttccccctcctccacctcctgctctcttttttcttccaatccattgcagattggttctctcataaaatacagctaaattaatttatacaattgtataaaaagacacataaaatacatgccccaaattgttattattagatctaatggacaagaaaacgttgacttgctaccaaaatttctaagtttattcttttttaaaacttttaagttcaagggtacatgtgcaggtttgttacgtaagtaaacttgtgtcatggagtttgttgtacaaattatttcacccaggtattaagcctagtacccattagttatttttcctgatcctctctctctttgttcaccctccaataggccacagtgtgtgtatatgtgtcaatgtgttctcatcatttaaatcccacttataagtgagaacgtgtggtattcagaaccagaaaatctaagttaattcttttttttttctttcttcttttttttttttttttttttttgagatggagtttcgctcttgttgcccaggctggagtgcaatggtgcattctcggctcactgcaacctctgccacttgggttcaagcgattctcctgcctcagccttcccagtagctgggattacaggtgcccgccaccatgcccagctaattttttttgtatttttagtagagatggggtttcaccatgttggccaggctggtgtcgaactcctgacctcaggtgatccgcccgcctcagcctcccaaagtgctgggattacaggcatgagccaccacacctggcctaagttaattattttgttgttcttgttgttgttgtttttaatttgtttgtttttatttttttattatactttaagttctggggtatatgtgcagaacgtgcatgttggttaaataggtatacgcgtgccatggtggtttgctgcacccatcaaccccgtcatctacattaggtatttctcctaatgctatccctcccctagccccccacacccccttagtcttagggtctggaacaaagcagttcagtttgagtaacattactctactctgctacgtttgatggccatgtaatgagctttccatttactttctgctaagattggacacatctaaaatatttggcaatacaaatgatttctttatattttctatctgttttggggaccattggtaggcatatttttaatgtcagattatatatgttaaattcattatgtaatataaatttcatagtagtcaactcatcaaagtgtctttattaatatttttgtgatgctcaccattatatagttaagaaatttacgatagcatcattgatgacacattatatgtggacaaacttattaagtaataggaaaagaatgtgggggatgtatgtgtgagatatgtgatatatatcagttttcagcacttatcctaccaatggcctctcatagaatggtctctcctaccatttttcttttcttccttttcctttcttttctgccatccaaacttccacctcatttcttcatgagcgtttcactgttttattaggttatgcctcagttgccagttttcacctgtcttccaagcccagatcccattttgtgtggggttagcaagttccgcctcctcaacaggactatgcctgtgtggctcttcttcatgctgttttacttacattatataattgttaattcagtatgaagtaccatgataaatatttgggataaaaagaggagagcatggaccctgcacccaaggacttagagtttggtaggagacagttagtaaattgttaatagtagctgtgataatagtctttataaagtatgatgaggacataaaagagggagcaggtagtttcctttgggaataggtcaagaaaagctttattaaattatgccagttagtacaaccactaaggagaacagttgggtgattccgcaaaaaactaaaaatagagcaaccatatgctccagcagtcccactgctgggtatatacccagaggaaaggaaaccattatattgaaggagatatctgcacaaccatgtttgttacagccctgttcacaatagccaagatttggaagcaacctaagtgtccatcaacagatgaatggataaagaaaatgtggtacatatacatagtggagtactattcagccattaaaaaagaataagatcctgtcatttgcaacaacatggatagaattggacatcattttgttgagtgaaataagccaggcacagaaagataaacatcacatattctcacttatttgtggggtctaaaaatcaaaacaattgaactcatggagatagagaatagaagaatggttaccagaggctgggaatggtagtttgcaggggggatggtaagtgggtacaaaaaagatagaaagaatgaataagacctagtatttgatagtaaaatagggagactatagtcaataatttaatttaaaataactaaaagagtataattggattgtttgtaacacaaaggatagatacttagggggatggaaaccccattctttatcatgtggttattatgtattacatgcttgtattaaaatatctcatgtatgtatgtgtgtatatatatatatgtgtatatatatatacacacacatacatacatatatatatatatatatatatataaaatctctgagcagcctagacaacaaaatatgtactactatgtacccactaaaattaaaaataaaaatttttaaaaagtgtgacagttgagctatgttaagaggattaagtattggaggatgtggctgtctcatatggggggttggggttgcagtatattctaaggcacatggaatctggaaaaggcattgaaatgagtaaatgttaagagatttcagctttggagctatgtgttcagacacccacagtttatacagcttgagtggtggccctttgatttatgctgtttttaggcccctctagtaggaatcaaaagtgttttttactttttaagactcaactggagccagcgtgaaacctacccctctaatgtatttgcctggaaaaaacgaaaaaaggaattcatgcacagcaattgagctattaaaattttgtaggcatttctctatgttttggaaaacttaggaatatctctggatgaaagatgaaaaatttgcatgcttaggaacatgctagacattaagaaggtgtttcagacctaatttatttggatttgtatcattataatttctagccagttagtccccacataaccccccacaataaaattaagaggtggttttatactggtgtttggtttttgtagttaatagctgtttataggagcatatttgtgtatatttttaattttcatgattaatggcagtatttttaaggtctaatgtggcttttgtgaagggtacatgcaatgcattgctttatacttacagacaataaggatttaatttatcccaccttggttaggaattcagatggtagcaatgggtagcttatactcagtaagagaggaacacaggtgatgtggtggaggcagatgagtgagacagtgagtgagatgctagaagagtaagcagtggccattctaaggtgctgcagtttgatttttaggctatgggagaccttaaagagttttaaagagtaatggaggaaaatcacttactgggtacaatgatcactactggggcaatgagtacactgcaagtccagacttcaccactttgcaatgtatgtatgtaacaaactgcccttgtactccttaaatctacaaaaagaaaaaagaaagagagaaaaaaagagtgatggagggtgtgggtgggagtggagcatcttatttgtgttgtagatgtatccatctggtagtaatatgtactgataggagatgaaatcaaagccctagggactaatgaggagactctggcagtgtggatacagaggaggtattcagggccctgcctgcatggttaccacttttattcattcaacagatgttcattaagttccaactagtgactaggtactgggacataatggagagtaacatagtcgtggtttgtacctttagggagcacagggagaattatctgacagcttccaggtctctgtttaggtgactagatggaacctagtgccctgagtgcactcagcaccacagggaaaacaggaggagaaagaggctgtgtgtatagttgaggggtggctttgcagcagttgtagatgacattgggttttggataaactgagctaaagtagtttgagaggctgtggggttgagaggtataggccagtgcttcttagaccatagtgtgcattggactatctgggcaatcttgttcaattgcaaattctcatgcaataggtctgggtggggcttgagattctttacttattactgccaggtgagctgatgctgctggtccatgggtcatactttaagcagtagaagtgtagttaagaagctggttaagaatatctacattctctctctggctacacacacgcacacgcacacacacacacgtgtacgcagttcaagctttagaagaaacttataaaaaatctttgggagtagaaccgtttacagattggggagtagctgcatatgtgtacatatacaagcacttatgataaaattgcttttgcagaaagtccataatctctaggtcatctggaaaatatttctttatgtcaaacatgtacagaacatattttgttgactttgcttgtggctgtcaaaggggaatattgaactcatatttacagataaccatttccaaaccatactttattttcaagtgttgccttttcaactctaatccataaaatctgaaaagtggtaaaaaagagaaaacaaaatgtccagcgaacatttttttaaatactgtgcttctgtgaaggaaatactgtgtagtgtctgttgcctgaggggaagaagatagcaaatgtcatttgtggaataaatatatataattgcatgtcatattctgagcctgcactaaaaagctgtaggtgttattggttttcactggttgattgcctcgctagacaaaacagttgagaaggaatcttcagcttcttgttctcttcattttagaaaagaaaaaaaggatgagaatacagaaagtggctttgctaagttgcagagaacagggaggtaggatttttttccggtagtttttgatgtgttcaaatgtgatcaagatttatgtagtaactaggcgtttgacttacctctatctttttaataagccttagttacacttgtgatgactggtgatcattttatttgttctaagcattgttcaaataaattattagggaattggagcaaatactgcttttccagtgtggttatttctctgattgtgatacctttctttactgtgactgttgagatgatgtggtctgtgtgacagtcgaatatactgtatgaataatactttccacttcttagttgggtttgcagttttatttccttttacacttgttcattgactctactttcatttaacaggaaaaaaatcaattgcataggagaaaatagagatgtttcagtctcgttaatagattgaaacctcattagggagacaatggttatgtaatgaaaggtgcttaacatcagaagacctggattaaaatcctggctcagatcctggctagtttaggaaacatctcacagtctcagtctccttggcttggaatacaagcacaggcaaaatgcatttatgatacagtaataagtgtgccgtgtgaaaacattctcatgtagacagcattcttagtgaagtgcttcaaattaaaattatatataatatatatatatgtattaaacggaataagtgtcttagctaatggcatgaaatgcaaatgtctaataaaatgttaaactcatattttaagccttctaaattttcagacttgaaattggtggcaaaatgaatggtcaatgccttgaccaaaggatcagacactctctgtagaactgactcctcagattcagggaagataatgcagagctttgaggaaatacataaatataaaaaacaactttaaaaaaatggccattttggttttatattttttatttttttccttccaaatgattacatatttttattccttccaaaccattatgtattttctttctcttgcatgattctagtaaattttacttttttgtaattttctacctcaggaacctatctgaagacttaaagcaaattcccaggaacacttacatgcatgatgtttatagctgctcatgtactatacttgtatatattagatactagaaaactcttgtttctccagtaatatttgtgagagaatatatgtgtatgtgtgtgttatattctaaagaacaaacaaaataattagctacagtctatagaggttaccttggttgtttgtcttaatgtttttgctcaaaaaatgtcactcagggctgggtgctgtggctcactcctgtaatcttagcattttgggagactgaggcacaaggatcgcttgagcccaggagttcgagaccagcctgggcaacatggcaaaaccctgtctctacaaaatatacaaaaaattagcctggcgtggtggcatacacctgtagttgcagctactcaggaggctgaggtgggaggatcaattgagcccaggaggtcaaggctacagtgagctgtgatcacaccactgtactccagcctgggtgaaacagcaagaccttgtctcaattaaaaaaaaaaaaaagtcactcagactgaagggaatatcaaaatttgaaattaacccaatcactagcgagaatctatgaactattatggcaaaaatgagatgtttatttgccatgtatttattaattgctgaattagtattatagaaggactgtgtaatattggaaaacttaggaatcttccctcaaaagttgaccaaatacctctacagtttctgttgatagccttgaaatgccaggaggtagactcctgtcagttcaagtcgtcagtttagaactcagggctgcagattctgataccctatataggtcaaagaccagggtgaggttgttggatctgtgtgtttttaaacatcagagaaaatcattatgaattatcttgagtaaaatcatctgtaaaatttcctctcttggtaacctagattaaactttggaccttgagaaatcctagctaaaaatagctattgaagagtttgtttattgcacttaatacattggccccagagaaactcaggcactcagattccctaggtttcgtggcaaacctaactgcccacagataaaattttctttctttcccttctgattctgatcctaactacaaacaaaataatttatggcatttaggcaacagcttgtaaaagccagtgaacccgtcactattggcaacttttataaatcactaatgaattaaaatgttcataactatgtaaaagcttagtttttttcctttacaattcaattaaaaacagttggttactatgtaaacactatctccctacttctggctctgttgatcagctacaatgtaaaaagttgtgttgcttatttaaaaaggttttgatagctaatagggatttatgttatctcctaaagtttctaagattcaactttataagtgaatagtctctctttcagtagttaatggtgaacagtggtttaaagtgtggagagcctggatcactagtcttgcaggaagaatggagtatgctgttgatgttttttgaggtcccttatggtagtcttccaggcttctccctgaaacaccgcaagcgtaagtggaaatgagttccctagtgttatgtgtccatcaaacatcatggtctgtttttttcctttttccccattaccttaagcccaacaaataaatggatgaacaacaataacaaaaaaaaaacccttgttgcaaaggattaataacatttaaatctgtaagaaaatgaaattataaataaatacattaaggaaattcaagaagacttagatcatgttttatttattaacagtaaagttattcacttcacaggtggacgttttacaagtcttagaagttgtactttacttatcatattgaacaagaataaagaccaaagtcagcataaacataaaggaagagaaaagctcatagtgtatatacatggatgcattttgcatttgggatgaagtaagtcttcattgtgcaagaatgtcttgcatttccttggatgttctgtatcttgggtttctactcactgagtgctattaatagtagagcctactgttcatagtgatcatgaaaaatgctcttggttgggtacagtggctcatacttgtaatgccagcaatttgggaggccagggtaggaggactgcttgagcccaggagtttgagactagcctgggtagcatggcaagatgccatctctaccaagaaaaagaaaaagccatatgtggtagtgtggtatgtgcctgtagtcacagctgtttgggaggctaaggtaggagcattgtctgagtgtggaggttgaggctgcagtgagtcatgatggcgccactgtactccagcctgggtgcagagtgagactctgtttcaaaaaaaaaaaatgcttttgcagatttacaaatgctccctatgaggctgctacctcatacactgaaaatcactgccttatcatgaagacatacttggtcttatttaacttatcatgcatcattttctcacttgcgtaccccagctcctttcttcccaacagtggctgatctcgattctattgccttccacttcctcattccagcatttgctttatcaatgaaaaattctcttgcatctttcattcttccatctctgctggcttctttctttcaacatatagatataatcttttatttctaatcatacgcaaatcccaacaaaatgattgacatgcaaataaaattttgcatcctaacatcatatcttcttacagttctatcactttttttggctatagacttttggaattagcctgattatcataagcctcaccataaaggtaaaggggaagtaatcatgtttgcttaatggacagatgaatgtagcactgataactatttgatgggattcatatgctcactgtatttccaggaggtctttgggggctctatttggggattggattttttggctttgtttcagtcttattttttattctctaggatgttgtgttctgctaatgataagaggtgtactttgaagttcctttcttctctcttcctccttttttctttcttgctaaaaatactcatactacatttttatcaggtactaagtagccaagtttaattatatatccatcatttctgtccttcgaaaggaattgtacttatcttttgtgtaaatgaaaattatccattctcactgacatcttccaaattgaaattttcctttttctattatatttctagatacgtgtttttaaaaaatgatgccctttggctctctttcttaagaagcgtggtagagtatgattcatcaacttgagaaaggttagctatggatatagtttacctgagaaatatcaattgctttttatcaccttttggagcaagtatatttgttttttatcttatataagcatatgcatatctggagaattgatatttttctaatatggaagatattttaaaacgtattttcccctgaaacattgttttttcatctttttttttctgtcatttgttgttaaatttcatgaaggaatggagttgtaactcatattatttgtcctttaccacctggggtaaactctatcagtttaccctgctgcttcaaaatatgctctgttaatggttaactgtagtcaccctactgcactaatgaacactagaacttattcattctatctaactgtatttttgtacctattagccaacctttctttatcacttctcccctctactctccccaacctctggtaagcaacatcctactctctacctctatgacatccatttttatagctcccatatataagtgataacatgcaatatttgtctttctctgcctggcttatttcacttaacatgatgtcctccagatcatcccttttgcaaatgacatgagttcattcttttttaagactgaataatatcccattgtgtatagataccacattttctttattcatttattcgttaatgaacacttggttgattccatattttagccgtagtgaatagtgcaacaataaacatgggaatgcagatatttcttcaacaggtggatttcctttcttttggatccatacccagcaataggattgctaaataatatggtatttctgtttttcttttttttttttttttgcgaaacctctgtagctgttttccataatgactgtgctatcttacattcccacgcaacagtgtgtaggaattctctttcctctgctcccttgccagtgtttatcttttgtctttttaataatagccattttaactggggtgagatttgctcattgtgattttgatttgcatttccgtgatgattagtgatgttgaaaatattttcatatacttgctggccatttttatgtcttttgagaaatgtctgttctgatcatttgcccatttaaaaaattggagtatttatgtttttgctattgagtggtttggattccatatatattcttgttattaatctcttgtcaaatggatagtttgcaaatattttctcccattctgtaggttatctcttcattctgttgactgtttcctttgctgtgcagaagatttttagcttgatataattccatttgtcaattttgctttggttacctgtgcttttgagatcttacctcaaaaatttatgtcctgaagtgttttgtttgtttgtttgtttcggtagcttcatagtttcaggccttacactgaagtatttatttaattcattttggtttgatttttgtattcagtgagagacatgggggtttcattcttttgcatatagatatccagtgttcccagaactatttattgaaaagactgttgttacctcaatgtattttcttaatgcatttgttgataatgagttggctgtaaatgtgtggatttatctctgggttcacaattctgttccattgatctatgtgtctgtttttatgccagtgccatcatgttttggttgtgatcgctttgtagtatatttcgaattcaggtagtgtgatgtctccagattcttttgttcaggattactttggctatttgaagtcttatgattctgtatgcattttaggactttttttctgtgtttctatgaagagtgtccttggtattttgttagggattgcattgaatctgtagatcactttgggtaggtagaatggatattttaatggtattaatttctccattccatgaacacataatatccttgtattcttttgttgttatctttaacttctttcatcagtgttttgtaattttcattgtagatgtttcatctctttggttgaatatattactagttatttgattttttttgtaactattgtaaatgggattgcttttctgattttcttttcagattgtttgctgttggcatataaaaatgctattgaatttttttttttttttttttgagacagggttttactctcttgcccaggctggagtgcgttggtacaatctcagctcactgccacctctacctcctggctcaagtgatcctcccacctcagcctcccaagtattgtagctgggaccaaaggcatgtgccaccattcccagttacatttctctattttttgtagagacagggtttcaccatgttgcccaggctggcctcagactcctgggctcaaatgatctgcccacctcagccgcccaaagtgcttagattacaggcatgagccagtgtgccaagccaccaaacgctactgatttttctatgttgattttgtatccctcaactttactgaatttatcagttctatctgttttttggtgtagtctttaggttttttaaaatataagatcatgttgactgcagtgtgtttcttttctaatacatgttttttgtgcatatagattaggaaattcttccctgtcataagttcacaagtatatttaattatgactttttacattgtttatgaagtcaagatccattttcatttatttctatatagacaacaaattttcattactctttattgattagtccatctgttccctacccatctgtaatgcctgctctgtaataaagttttcttatatatgcctgtttgtttctggattctgttctatttgtctttttatctgaatgtgtagcaaaaggacataattttaattactatagttctgtataaaaatcttaccttgttcttcttctggagtgtcctggtttttcatggccctttactcttcaatatacatcatagaattgactaatcaaagtccaagaaaacccctgctaagattttgtttaggattatattgaatctatataataatttgggggagaatcaacttcattctgacattgattcttcttatttatttattttttgagacagagtctcactctgttgcccagactggagtgcagtggtacaatctcagctccctgcaacctgtgcctcctgggttcaagcgattcccctgcctcactcagcctaccaagtagttgggattataggtgtgtgccagcatgcccagctaatttttataattttgctagagacagggtttcaccatcttggctgggatagtctcgaacccctgacctcaggtgattcgcctgcctcagcctcccaaagtgttgcgattgcaggcgtgagccactgtgcctggcctattgattcttcttcactgaaaacttacctatgaagtcattatttatttatattttaaaatgtcttttaataaatgtttatgaatttttgtaaaagacttgcacagaaaattaattccaacctttaacataatttatgagtcttataatattttcagatattaactttgaaaattatgtattttactttaatgtcatttgacacctcaaataaatataattgccaacaataaatgaataattagtcccacagatttctccctttcctccacagggcaatgtttcttccaactgttgatgcatcttgaaaatcattcctcaagtttattatcacttccattccccatgtcagtggcatagctaattatttagaaggcaggtgtctctaggtaattatagttagttctgtatgcaattatcctttctgaaatgtgtgttgtatgccgtaaaaatacctgttacgttatagaatataacaaatagctaacacaatagttaatacttagttgatgctgactatatataattctctagtttattatcataataatacacctcacatcattgaagtcttttacagtttaccaagttctttcattcacggtgtttcatttgggtatcccaacaacattttcaaggcaaacgtgttaccatccttagtttgaagaggaggaacctgaaacttaggaagactaaataacttgtaaaagatcacagaagtgatatctaatagagacgagcttcaaattcaggtttattgaactcagaatcaatgctcctgccccctacctctcaggagtgataatggtaaagattgggggactgtaggccaaataggtcctctgacctcttttataattgtcagcttatctaacgtgaatgacttagataggccttgcagattgagtccttgggagatttcctgcctctgtctagtattatacccagcccaatttgtacctgctgaccttccaagttcctgtgggcatttgagtttctgacctttgcctttgaataagcctgccatttcctatagcatatgtgcattttttgcttcctggaactttctactactttatatttgttctgattacttatcagcaaacaaatcttttagactgccttgtagttctattatggaaaaagtgagaaattattatcctaagaataggcacaaaacatataatacagtgccttgcacttaatgtgtgcttacaaaatgttaattgatgatgaaaaagatttaaatcttcctctaaataataagattttatagttatccatcaaaatctaattatgctgaagtcacttcacatcatcataaaaaagtgtttaacactgtttatcaacagataaactgttgttggcttgtaaaatcaaacttgttctgcacttggaattttatcaagttatttgttgggaaaagtttggattatgtggatacttttggtagaagcgttgtgtaaaatgtgtggagtaaaaagtttttgcagataatgtgtttgacataccatattattatattggatgagactttcttccacctgcagatgtttctctttgtcttcccctggtagggttccccttatataataatattcctaggagcaataattgttcccccagatttggatgtcttccagtagttcagagtttcacttagcaccaaaaattaataagctttaattaaaagaagtgattattgctgaaaatgatgacctgttaactccagaaaggcagggtgcttttatccattctcctccttcaaggttggcttttgaattctgaaccatggatttcaatgcagtccatcctcaatttgtaggaagcgttgttttatttggaatttaaaaaggaagctctgttaggtaacattgcagcacaagttctttttaatgtaagtccatgtattaatcaaaacagctgtgagggttactaggtagactgtgacaccgggtggcaataaaatgtcttcctcattacaattaataccgatgacttgcagagacctcctgtatgtgatggcctttctcgatgggcatcctcacttggtggtagggaaaatgagtatgggctgtatgaaacaatttcagcaccaccctgagcttaatagagccgtctttcattgcctgttaacaagctgtgctgctgccataaaatgttcaagctgacaaatgctgtcaaagctccttcaatgcaaagattttctgccgtatttaacatgttaacttttattttaatgatgccaaaacacacatcagttgtttgtgcaacatccagtgtggtctctggagccatcccattagctgaaaagtatagtcagtgtcctgttccagtggccattaatggtaaaattcttcaattaaaaactgtggagttatgctgattcaaccattcactctatcccagaagtaaaatagatatacctacttgctgtgaaattattgagtttgtttagcttgattttctgtgcattacattagccatgagtgtattatagaggctaagaatgataactctatgaaggtttattatgagattcccatatttggctcaaggttttatacaacttgatatgctacctactactagtcttccagttccactattgcaactagttaacacatacattgtacttattgtgtgccaggctctgttctgactgctttatatgtatctactcatttaattttcacaacagtcctacttattaagtgccattgtcctcacttaaaggtaaaaaaaaaagaaaaaaatcagaggcacgagatattcaataatttgtctaaggccatatagacaggatatggtagaggctctataagaatgcagatattctgattccaaaatatatgctcttaactaaaactaatgcatcaagtcgactgaaatgacatcaaatacatccttgacactaaagggagcacacaaacggaatgcctgcctttctggtggagatgcttatgttgcagctaacaaagagaacgaattcttttataaatgaagtttaggatcacagggtttccactacccttctggttatgttttccaaggctgaaaatggagaacagtttggagcaggaagagtggaagtttataggttctgttttccctctttttcttcatggatctttcatctccccacacactattgcagcccgcaacctcagatggagtgaaattctcagcggaattaaatttcagttgctacccttaataactgtagagaacccctttggaaaggcctccctattacccttttttgtttgttcatttttcgctaaattaaactttaatattttataacatcacgaggaagctactgattttaggaatttggattcatgttttcttcttccttttctcttctatacctataaatcagcaagtaacaaaacgagtgatttccactgcaaagtcattatccccggtgagttgaatatgggcattgtaattcaccagcagctgatgactgagtggatctaaaggaagaatgaaaaggtagatcttaaggatgaattacagctgtaataataatttattccacaagattcacatggaactgaaatttatgacaggcagccagaccagaaaatcaggaagtttggattttctcttcttcctaatcagtttctccacatcttgttctgattagtgccctcgctgagtctccttacaggtatctctgacccatttccagtagaccttttgaaattccactgtttttcaggcagtgatttctgcctttgctggattttagaatataaaagtcattcatctgtatcttagaaggatgattcacatatttatgttctagaaagtaggctgagaagaaaaatgtggtactttattaattagggccctttaacattttatactctcaagcttaatcatttgcttgtttgaactaaagtcatcttccttaatcaccatcattagtggctgtccatgaatgattacctctgaattttattaacatgttattatttaatgcattttacattccccattaggaattagatatcatccaatattttactatatcaatatatttttttaaagcatgagattaactatgggaatgggctacctccatcttcctgctccctcagtggttctgaaattgatgtggaggtggtgttgacagggcagagagagcaattggaggaactagcccatctattcttggtgctgttttttagagcttaaaacttgctgggtgatgtcaaagcatttacgccccaaagatgagaaccactgctctaatcttgaacgtttccagtgatgaaaggcttgctcacaatcatttggaaatagcccattacactttgggattcctttgacaattcctctgtatacctagcagagtgactcattatggtcactagttcctagttctcatctttaagcaaatacagaacaaatttgttcctcctctatctgatggtctttaaaatatctggagccatcttaatattcctactgattattcttgcatacatagattgggtcatgccacaatttcttatattccatattttgaaaacctctcatgatcatggctctccttctctgtattttctgtgtgtagaaataaacaccatcatctattaaaaaaaaaaaaaaaagcaccacgtatacttgccatcaagtgctcatttattatctttcccctgagtatctcagaagctccagtcaggtcagcactgactttatttcttgttgagtcctcagtcccatggacagtgcttggtgcacaatagtgacttagtcaataattgttgaatgcatgagcccccaggtctacactgaggttaggaactgacagtgaattggtcgtaaggggtggaatgaattttagtgcatgtaagattggtcagttttgcataatgttcaataaaatggttttgcaagttgtacactcatgcttgtttgtattgcttgttagtgccaacggcttcccgggcttaaaatgactaccagaatgtcctgcacactcaaaagcaataatgttttgtgaaatacaggcttacatcaaaaaagctctgctttttataacttatgaagttgggagtttaagaaaattacttttgaaaggagtattaatctaaatggataaatgagtcatcgtattaaaatacctgtgggaaaactagaattaggcacattacaatcaggcacaatgtttattgtataagtgtgctaatgtatggtttagttaataataatccattcaaaaacaaaaacaaaagttttctttctttttttttttttttttttttttttttgagacggagtcttgctcggtcacccaggctggagtgcagtggcgcgatctcggctcactgcaagctccgctgccaggttcatgccattctcctgcctcagcctccagagtagctgggactacaggcgcccgccaccatgcccggctaattttttgtatttttagtagagacggggtttcaccgtgttagccaggttggtctggatctcctgacctcgtgatctgcccgcctcggcctcccaaagtgctgggattataggcgtgagccaccgtgcccggcccaaaagttttctttttaaatacctgttatgtgttgcgcattttcaaggctcttgagatacaatattagggacaaagtccacacttttataggtcttgtattttaactgagaaacacagacaatagataattgaataaataaaagaaagtaattttggataatcataagtgaaataagtgtacagagtactgtgctaaagatccgcagtgaggaagtgagggatgggatgaggaggcagccatgcaaggtgctgatcatttcagctgatggaaggaagcacaaaggtccttaagtgggagagagcttggtatgctcaaggaagatagggtcaggtgagctgcagaagaatggcagctggagtttggggataaggttggaggcctataggcctcatcatgatacccttatggaccatagcgaagaagacttatgaaccatcgtgaagatttatttttattttttttatttcaatagttttggggctacaggtggtttttgactacatggataagttctttagtggtgatttctgaaattttagtgcacctaccaccggagtactatatactgtacccgatatatactcttttatctctcaacccccttccaaatttccccctggagtcctttgcaacctcataccttagctccgacttatgagaacattcaatatttggttattcattcctgagttacttcacttaaaataatggcctccagctccatccaagttgctgcaaaatacattatttcattcgtttttatagctgagcagtattccatggtgtatatatagcacattttctttatccacttgttagttgatgggcttttagattggttccatattttacaattgcgaattgtgtgctataaacatatgtgtgcatgtgtctttttcatataatgacttcttttgggtagctacccagtagtgggatcactggattgaatggtagttctactttttgttctttaaggaatttccatactgttttccatagtggttgtactagtttacattctcaccagcagtgtttaagtgttccctttcaccacatccatgccaacatctattgttttttgactttttaataatgtccattcttgcacgagtaaggtggtatctcattgtggttttaatttgcatatccctgatgattagtgatgttgagcattttttcctaagtttgatggctgtgtacatcctcttttgagaaatatctattcatgtcctttgcccactttttgatggagttatttgttttattcttgctgatttgcttgagttccttgtagattctggatactagtcctttgtcagatgcatagtttgcaaatattgtctgtttactccgctgctttttttttttttcttttttttgctgagcagacgctttttagtttaattaggtcccatttatttatttttgtgtttttgcatttgtttttggcgtcttagtcattatttatttgcctaagcgaatgtccagaagatttttttctgatgttatcttctagaatttttatggtatcaggttttaatttaagtcattgatccatcttgagttaactttttttttctttctttttttttttttaagatggagtctcactcggttgcccaggctggagtacagtggcccaattttggctcactgagtagctgggactccaggtgtccagcaccacacccacctaatttttttgtatttttagtagagacagggtttcaccgtgttagccaggatggtctcaatctcctgacctcgtgaatcacccacctcggcctcccaaagtgctgaatacttttgttataaggtgagaggttaggattgagttgggcagatttttgatgtaggttcttagggacacagggttaaactgggagacccatagaagactgggagaacataggtgtattagtccatttttatactgctatgaagaaatacctgagattgggtaattaaaagaagaagaggtttaatggattcacagttccacatggctggggaggcctcacaatcatggcagaaggtgaaggaggagcaaacccatgtcttacatggcggcaggcaagagagtgtatgcaggagaactgccctttatgaaaccatgagatctcataagacttactcactatcatgagaacagcatgggaaaaaccctcccccatggttcaattacctcccatcaggtccctcccacgacatgtggggattatgggagctaccattcaagatgagacttgggtgggggaacagccaaaccttaccaataggagttattggaagtaagctaggagagaaacgatggtgggttggactagtatagtgataacagtcgtgaagagaaatgagtggatttgagatacgtgttggcattagcattggcaggtcttactgagggggactggatgacacattgcagcaggaagagaggaaataaggatggaacttaaatataatggcaaggagttaaggaaaagtcctactaaattctgtttctggaattatcaatgctattgttttatataaatggacattggagtttatgatatgatattgtcacttggaagtacaaccacacaggaaggaaatttgtgctgggaatattaaaaatgtcttatcacttttcctatcccaaatgtagacacaaattcagtcattgatacacactggatattttttcttttgcaggtctctcttatctttactcaatgcactaaatatataaataaatagatgtggtatttgttgttccttagtaatgggaaataatgacaacccccgccccccaccactggccagcatttaacctgaatgtctgtacatttgcttagctttccaaaacagtgcaaggtttcacaaagataagacagttcatttacataacccggaataatttggctggcaaactcaaggagatatagtatatggatcaagtttaacacattcatttggattggctgagtcccatacgttccttgtgcttgcagagagggtcccatctgttcagctcttggccagagaccatcgagcctgtgagcattgaaatttcttattgcaaaggcccagtatttcataactggtttatggtaccccagatactcaccagtaacattgttaattagtagcaacatgagtagccattattctagaactgttacctgcctgttatgaatgtatttagatagtttcaaaagccaacacattcctttcttgcatttatttccccttttgcatcatgtttattttattactcaaagattccttttccattgccctccaactagttagcccagcatatgaagacccttttaatgcctctacaatatctcctatagaattgtcattccttagtctctgagaagacctctctttgcccgttgaattagactacctgacgtttctttaacacatccttattttctaccctttgcagctttgctccttgggttctttctgtttggaattacctttatactcctctaatccccacctgtcacaaattatgctcattgcaaatgcttacctaatgctccatcctttgatctactcatattttctttcttcctctctttggatatttcacttctaacttctcatccttgctatatatccacgtcacctcttcaaatttcctttagtgtcaacagggtgccttacaagtaggatggtgccagttgggatttgatgactttaactgaaattttgatatccagctatcatctaaacatgagcaacagtaaaagaaatcatttcagggaaaaatgtggaaataacccacctcctccacttcctacttcccagccctaaagggatcatgctgccatcaaggccattctagccttttcatctttgctgttcttctgtggtcaaactggccccgcctctttgttttctgagtggaaaataaacacaaagagggacatttcctgcaagtgggcagggccagaagaggccaggtatagcttcagcatggctgcctccagagaacctagtagacttgtcatatcccaaggcaggctttttcttggattatattgtttccctttgaattctccaaaacctgtcagtgttttcttccttatctctcttgagggcagccagttaatctaagattagcctgacagcccctattttccaggtctctggtttcatcaataaagtaggctacatcgtttctgagccccatttcctcctctataaccctgctctcttcatccatattgtggtttattctttctacagcctgctccatccatttttggttctgttcccgtgtcctatttccactattgaataggagtatttaattcaataattgctttgactgtaaaaggttgacaatccctgagccttttgtgcgatattttcacctcattgctcttctggttaccaccagggactttgagatgaatgagtcgagtgaccagcagcctcactcaggattgctaataattgtcatctttactttctcagtgctaatggtaaacttataaaagcctttcacttatcacaaaagcctattttctagggaatttaggaaaggtaatgaagacccctacttttttttaaactagaggcaatatgcctcagtggagaatgcataaggtaattctttctatttatgttgatgtcatgcttttttattcctatttttatatgctttaaaaatgtgtatgaaatattagcctagtaagagaagaacagaattataaaaatgcatccactgatactgaatgctcaagatgatttcattgagaagggtatgtgattaaaatgttgagggcttgctggatttcagaacatcctgtctggagtcagacctggattctcagctccttgccttatcagtcttctacttgtgtgactttagaaaagccctttagtctctctggggcttatgatgatcaccaccaaattgaaagacaaactgtttcacagggttgttaaaaggattcagtgagataacacatgtgaagctagcaagtacctggcatgtatacttgttactatggttatttttgttgttgatgatatcagtattgctgttgctattgtagtattatattttgagtatagcagggggcttgagcctatctgcatcccgagtaaacagcatctcataccaaacacatggaaaaaaactctaaatgaatgaaaaaaaattaaaaattaaaaaactgcatgcacatactctttcccacatcaaaattaagaatagtaatatattttgtaatgtatttgcataacttttgaaagaaaaggaacagagtcattcattggagtttcatacacccacacaaaaataaaaccccaatgaatgcataatgcatgcaatagggccattttgttggtaaaattagctgatgatggattttctttggtattttcaccacaaaacttttaaagatgatgtttatgataaacctattttttattaaattttaccacgtcttgtttggctttaaagtgatgttctggtacaagatatcttaaagaataaaaagcttactgtgcatttctccagcatgtttgctgagatctgaagtgtgtaacagaattcttcagtgaggtaaagaaaagttcaccatagtttgcaagactggttcatgtggaatttataagaatggactgaccagcatgcccttttaaaattccgtagttaatctctttattgaaagctgctggactacttgattaagaaagctttatggaatgactgcttttagtgtcacacaaatgaagctgaactgttgctaagtaaatcactgtagatcaaagtactttgtagtcagagaactgcagttcatttttttttcattaagttttaaagagaaggtgaagggttgaagaatgaaacacaccaaatttgacatctatgatgtccatttacattcatgcacttctttaagcatctaatctgagtgattaggcaagtagtgcagtaaagcataaatgggcaagtgtaaagctgaatgaattaatacttgtttcctgtatataattgcccagatccttcctagccattaagaaatcagtaggcaagtagagaacacttcgggtgctcccaggaaaactgaagtggcactactgttgacttctccatgctttaaaatccctattctcatatttacctgatctgtaagtgtctgcaagaccatgggtgacagtttccctgtgatgtgaggggttccagggaatgatatttttgccttttatgtccccaagtgtagaaagtgcatctctgttgccccagtgtctaaagtagcgtatgaataaatttgggtggaataaatgaatacatgaacctatgttttactggattaggatgacaatgaggaaagaagtgagaaaaaaggacaaaaagaatggacagaaaatggaaactgaatctaccataagttttctacatgggttttagttccatagtttgaatttacttgctgtgaaaagttcaggcattgctctgttgaaatttttggatagtgtatagcattatgtagatacatttagtcatataatttctaaataaaaatgtcatgaactaggtatgtttatttctataagtttgttatgttatcatctttgttaatactttcaatgtatccattcggttgattggtcatacataaatgataaatcaaaactaatttcttatcctacatgttccactggtgataagaactgtagctaagaagtgtcaaaattttaaagatattaaatcttagtcatttattgatgttctttttgaacatgtaggggagaggatttacagaagcatcaaactgaaccaagtaagactccacactaaagttttatagaagtatgtatgaacaaaataaattctttaatagtgaactaacttatgaaatgaccttacattgcattagatgaaataaacggtctaagtttgggattatttctgctaacatgactgggtcagaaagaaataatgtcttcatgcttgaccatcttcaagttttgtggtgagatttttttaagttatcttcctgatgttgcaagatattacaaatgcattagcaaatactgtctaatgtgaaatgcatagccctatcataaaacatgtggtgagagaaatgattttagccccaagtcttcagtatcacagtgaccaaagaaatggtctctcagttgttatttttgtcatgagagggcatgagaagcaatctccccttccccttcccgggaagccccaacatcgagtctaatgcttcctatatcatgcccaatcgaacaaacgtgctagccagtatggaaggtcttcctttcttcatctttagaaatggtgcacttgctactgtagaattctaatccatggcattctgcagcctgcaagctttgatctttattagtttcataatcataacacaagtcttcaatgcactccaggctcactccaatgagaggtgattatatgaaagtagtaaatgctctgagtgactgagtcctcccaaaagcttgctggggaagacagcagggcaggctttccagtgtttttatgaaacatgagtcatcctgagatggactatgcaaaagcaaagtcccaggagtaaaccagtgtgggcaaagcttcaggttctgttttgcaggatgcacaatgccttccccaagtaaagatcctgagatgtcctacagttttaaagccccttgacagtttattccctactgcacaacatttttcaccatggaactatttcctctggcataatgttttttaatataccatagtttggaaaacactctcttgtgaaggatacaaaaaaggaccttgtattttgggcccaagaaggtgaaccaaagtccccgtggtgttttcttcagcatgtaggtactaattgggcaacatgactagtatgtggtttgttctagttggatgtaaattgcaaattaatatacagtctcaacatcattagtaacacatccttataaacaagagactcaagtttgagaattaaagaacttcttcaatgtcttgccaagtagattgtgaatttttgtattagataaaagtcctttgcaattacataatcattgtaggcttcattatctacattgcatttttcagtctttctaacccttctgccctcttacttgcattatttatttgtatgtaaagattttgttcgcagatgaagaggatgaggttaattgttaccctgcctctgattaaagtatcaggcactgcaatccacattagtgttgttcacatgatttggtcaagcattttactctgtggcacccagaaacaatttcagaaacaaaaagcaaacctgctctttccctttctgatcaaagcagtttggaaaagattttgtcttttagtgatgcttttgatagactgcaaaaatataaagttaagcagatctcagttggataaaacattctgtcatactaactttttttcttctactagcagcaaagaaagcccatacaaatttaatgaatagaagctggaatcacatttcttcttagtttggtcttttatttcctcccttaggcttagtataaatgagtagagtcacaaacatgggatatttttttcccctccatagagaatacataggtcactaatgttaccattttgtgtctgaaataacattctgcttagagatgcttccagtcagtcaccatcaaagcattagccccagtttgactgtgtctgagtccttgaaagaataatgtgccgagatgtaacattacttttactctgtatgatatattctgggtatcaacataatttggcctttactagttcagaagagaaatgaattcggtcatatctaatgtgcactgataactgctctcaaattaggaactcatttgacaagttctttgaatcttttgccaaaatttaaggagtttgttgatctttgtagtctcccagaacatgttagcttttttttccctgtaaaagtaactaagttgtatcattgatgacatgccatgaagattttcaagaatctatcctgttttaaataataatgagtttcagaaaaattgattttgctttgtgcacaaactataaaaagccttattcattaaacagattagttcttcctctgcaggctacactaaatgttgggtataaaaatgtataatgcctagaaagtgcattttagatgattattttaatataatctccgtgtgattaatttgccaggctgactatgtaggctgatacatccgatctggagatataccaaagtttaaaacttttaagggagcatatttagaaagtttcagttaaatcttttaaaacatattaatcttttaagaatatttacaatagtactaaaagatgcttcttcactctacatagaaaaataaatattttaagtcgagtgagttttggctttctttctcattttaatattaatgttccttgtatcagacaccagttttaatttttccatccttatactaatatgttgcaaatatatttgtgccaaaaatcaaagacaacttgaattcaaactaatataaaatataaatgttaattagtgaatcatattcaatggccattaggcaagcctataatttatgtcaagtattgggttaaatgctaactgataaaaattaaaagtcatataaatgagtgctctcttgaaattgtatgtgttattgtgtttttacttttgctttattttaattttcacaacagtcttttgagacagtacttattctatttgtccacttaatagatgtggaaataggctgatcccagggaagtaaaatgggtatattatataatcaaatcatttttggttttaaaagaaaataaattcttggccagatgcagtggctcacgactgtaaccccagcactttggaaggctaaggcgggtggatcacttgaagtcaggagtttgagacaagcctggccaatatggtgaaaccccatctctactaaaaatacaaaaattagccaggtgtggtggcgggtgctttagtcccagctactcaggaggctgaggcaggaaaattgcttaaacccaggaggcggaggttgcagtgagccaagatcatgccactgcactccagcttgggtgacagagcgagactccatctcaaataaataaataaaataaattcttaaatgtcttagtagctatgacaattaaatattttggttacagagtctgaaatacaccctttaaagcacatagtaatttgcttggacagataattacaaagcactaacctacactatttttaaaatatcaaggtgatctggaccttaagggcctaaattatttctgatcttaagaattttcccagttcatttctcactgtggtctattagtaatcacagctgcattgtagaatattttatacgaagacccagagaatcttaagtagatcaaaatatatctggactataaaccttaagagaaaagctagatcaagtattaaggatatattaattcaccttccattcaactatgtctatcagattgatgttggtctatcccttaggttggaagggtctcactaatttgtgagttttgttttatatattcttttctttttttaacttttcagatgatgacaaagagtcacacacacatacacacagacaaaaattcacagaggcacaggtatatagcatataaatgaagtagttgaaccctgaaaatttgaatcaggaacttcttttttataaagtataacaacagtaataaacacatgtcttaatgtaatactacttggtatggacagaattggatacagaaagtaaaaagacattttctataataaaacagtggtattatgcttaaaaaaatttgaatacaagtatgttaaattagtctgataaacaagaaacagcattcccaacaggtggaatattaatttcatcctgtttataatagtagttgcagttaaacaaactaagctaatattattatattctcaatgattaatatctcaggcattttgctgtaaaataaaaatataaaatgtgtagggcaacattttggaaacattttgctaccctgcaaagtggatgataacaattataaggtgattattttaaacatgatttagttgtcaaaaaagagtctgggaagggtagggggaaggcagggacagggagagagttgttaaaggatacaaaattacagctaggtaggaggaatacgttctagtgttcaaagccattttaggataactatagttaataaaagcacattacatagattcaaatagcaagaaggaggatattgaatgttcccaacacaaagaatggtagatggacaattgagatgattgatatgctaattacactgatctgatgactatatattatatgtatggaaatggcactaagtactccataatttgtacaattactatatgtcaaacaaataatgcttaaaaattaaaaatataaacaaaacaaaacacaaaaagcccatctctaattggaaccaccgttgattacgttagctgctgcatttgtcttcacttttctgagtaacacttgggatttgaaaaccatgacaattaaaaggtaattattaaggataagcataacatttagggttcaaatctattagaagcagattttttcagtagaaaaaattcaagtttttggtccgtatataaccacttgttcttggcagcgtaaaaggaaacctgcaaaactaatataaattatttaatttcacaatttttgacaacccactaaatggtggcaaataattggaggatggggaaatcaggagtaattacttaatgtaattaagggatgttcccttttgaggtgataagaatattttggaagtagatagaagtgatggttgcacaacacggtaaatttacggaacaccaatgaattttcaccttaaaatagctaattttatggtatgcgaatttcactttagtaaattatcttttaaagaatgcatgcattagtattccaataaaattttatttacaaaaatttattctttttaaaattgagcattatacacttcataaattattgttaatatagcaatggggattgtttaaggttatgtttagattatggtagtttataatttcttatatgaagtacctaacatttcaaacaattgaaattctatttagcttggtaaattctggccatttatattttacgaattttgttgtgcaaattgggtttgctgaatttgaagtgcttgagcagatgatgcggatgtctggggaaaaatcattccaggcataggtagcatcctatgaggtgagagcctgcttgacatttttgaaaaacaccatggggatcaatttggttgggttggagggaggagtggggagtggaaggaagagaatttatagagaggtaagcaggtcccagatttcgcagatcttggaaggcctgttaagtccctttagattttattctaaataagatagcaaatctcacggtgtctgagcaggggagggtcttaatcagatttacactgcaaatacaattgctctgattactgtgtgatgagtagacttggtgaggacagagtgggcagagataaaatcaagaagacaattaggaagcgcttgcaggagtctctagctccttgtgtggtcatggaacagacattatctccaggtgatttatacaaacattcaagtttgggaagtactggcataggtaagagtggcttcggatagggtagtacaggccaaggtgttaacaagtggtgggatattgcatgtacttctttacattatgatttgctgatgtattgtatatgggtgtgaaatttgggaaggataaatggaggtgctttttactaccaaagaggaaactgaggggtttcttggagggcttggaaatcaagaatttggtttgagatgcctttaggcatacgataaagtaatttggaagctgctagcatcatgatggttttgaaagctgtgggattagatgccttcacctggaggagtagctagaaaacagtgagtctgaggactgaattctgaaacactccaacagggcctcagaaagtagagtaacatccagaaaagaacactaacaatgagtgccaagtgatgtttgtggcataataactaggagcatgtggggtcctggtgtccctcgatgagcatcaaagaactcatgaacttctcgtgaaattatcagttgactcatatgtttcacccattacactctgagctctttaatgcagtgtctcaacaaagtcaggcattcagaaggtgtttaagaagaagccagcagataaatgaagaacaatcacttgttttatgatagtatattacttggcattttttggactcctagatttatgccttggtgaaggtaatttttcagcacgtgaggctgtctgggtcatctgtttttttgctcgtgattactcacctaagtactataggtaagttgggcggaaatccttgctgttatgtttaatgtcccttgccattttcactgcattagtgttccctccttgctatttggatgtaaatattcaccattttcactttccctgctgtactttctcatctgtctctgacaaaattcatatacatctttaccaggaaagcatattttatctaaataatagctttagtcacaaaggtgtgtttttttgatagataatctgagagaaatgagtggaactcttgatgttttccaaggaactgatttggtaaatcagatttactatattatgatctatttttctaaaaatccgacaagaactaagaagcaagaaaatgcactcaagtctaaccctaagcctttatctgaagcacgtttgctttgaccattagtttacctcccatagatttagggtagaggtcccaggtctgtaacatttggttatggctatcacttggaaaatggcgactagcaatacaggatgatgtactgatcggtggctgagttgttcatggtaaactgctaccctcagattttctttgccaagataaccttaatataatttaaaagacaagtcacaataagaagtgcttccgttggtagatttttttttttttttttttgagacagagtctcgctgtattgcccaggttggagtgcagtggcgcgatctcagctcactgcaagctctgcctcccgggttcacgccattctcctgcctcagcctcccgagtagctgggactacaggtgcccgctaccacactcggctattattttttttttttttttttggatttttagtagagactgggtttcaccttgttagccaggatggtctcgatctcctgacctcgtgatccgcccgcctcggcctcccaaagtgctgggattataggcgtgagccaccgcacccagccttctgttggtagatttaaggtagaaaaaaatcctaacgtgttatatgtttaataaccaaggttggttagaataagtagtttgaagaccttcaatttgtgaagaaggttgtcctggcatttctctgtccagctgtgcgtggacagagaatccacccacttcaagtgggacaaagagatcccaggaggggagccttaaaaagcaagtggaaattcccaggaaagagaaatcccaggaccagcttaaccttcctgtgtttttatctatcaaaaaattaatgataacccttttatattcaattcaacaatctaaaaagtaattcttgatgagctcttttgttcacaaagctttgaatgttgcagaagctataaggagtcattgactccaccacctggcctcaagttgattacaggcaggagaggcaattcatcctcttcaaaatataagcagccattattcatatcttgataaatattaacgttcctctcctgtttttctccttttgctttctcttctcctttataatttgagttgacttaagtacttattgtactcaagataaaagcattttcgggggataaatagccattttctgctgacgtgtatgactgtcacttagaagtgaaaggtgtgtgctactgtaaggctacagggtaagagcacacatgacactaggtgaaataggatgtgacataagctaagtgatagattcaaaaagagggcagctgtattattccagtcaagtcaggaagggtttttatggaaaaggcagcatttgggttggccttaaagaataaatagggtttgggaggtaagaagagaagtcagggaaagtgagcatttagatgtttgcatcaaatgagcagatgaactcccatggagagatccacaatagaacagtttgggatatggataggcagacaaagaattcacctttatcaaggtgaagtgtttcttaactccagaggctctgaaatgttttgaaaggctttcagcagagaagtgatggaactagaactatgctgtaagaaaataattgtgcagcagtgtattgactggggttctgtgtgggagctggggaacagggaggtgttgtagcagtccagtctggaaatggtgatgttctggggcagggtggtgctgcacgttatgggggaagggaaataaaaaggaagtatggggtgcatgtgagaaatgttggagaaagacatggcaggatgtgagaaataggccttggtagtggttgggttaggggacaagcaaataggactggggcagtggatggaggctctgtgatattggacacagggaactcagagaatggtggtgtcttagctcgaaatagagacgccatgaggaagacctggtttaaaggggaggaggagtttaatcctgaacttgtatccaaggcatgtacaagtaggaattttccacagccagttgtaaatataatcttggcctttgcagagagaccagaggtacagaaggaaatttggtcctcatttgttgcaagataataaacggagctggatgaaataatatcacccatttaggtgaattcatacaattaatcttctagctcattaaaagaaatctcagactttaagcaatacattctgagatacgacacacttattttgtctccagtagagcaagagttcaagataattttcttgaacaaggaacaagcaagagctctgttgaaaacagattcagactttgtgcccataatagcaaattattccataaatgggagccatgatccagtgaagaaggcatttccctttcaggcatgacatatgtttgattaccaagggcaaggttcctcatttgattgccaacctccctaattaggaggccttgaagatcattgcctgaaggttgtccaagctgaaaaagcattcgcaagcacaaacatattttatgtccagtaaaagtcactctagttgactgaatgcggttggttatcatagagacttacttgttagctccaggcaaacacggccagcagcattggtattgaagacaaaagacagccatcagtataaattcttgtctactatgcaaggtgtatcttttgatcttttcagaaagaactagaaaattggatggtatttgcaggagcctttcagctgagaaatgtcaataatgtaattgtgttgagaccagtacatggaattgacttgttgggagatggatacaggtgcaaggatgaaatgtgtatctgattactatatagaactgagtttgtgcatgagatcatgggtcaccaggctacatcagcaagcattaggagaatttaatgaatcctctatagaggcttctgagtgccaactccaaatctgaagtttttggaaaacagcaagaaataaaaaagtaagtttcctcctgctatttgcatttgtagtgtataacccagtttcctccatttggtagataatgtgatgactgtaaaatcaagacaggtcattccatttccctcaagcagagtgaatcaccttcattgtgcactgaatttctgcaagctgggcaagtaggagttttaagttgctcttaggtggtttttattcgctgcaggttatgttagcttattttaaaaggtatctaaaatgagcagcattggtgaattaaattgttcaattttgtaattgtttaaatgtaccttttggttttatatttttccccttttcatttattcagaactgtaattaaatttgttttttattatctgctattgagttatcaatgaatagaaaggagatggggaaaatagattataggatcctaacaacattaatttgtttaatgcttgactccatctccatggatagataacacttttggcaccacattattctctgggcaaaataagtattttctatttttaaaaatgtaaataattggccgggtatggtggctcaagcctgtaatgttttggaggctgaagtgggcagattgctttagctcagatgctcaaaatcagcctgagcaacatgacaaagaccccatctttacaaaaaaaaaatagccaaacatggtattgtgtgcctgtggtcccagctactcaggaggctgaggctggaggatcgcttgagtccaggagattgaggctacagtgagccatgtttgtgccactgcactccagcctgggcaacagcctgcctccaaaaaatgtaaataattgtatatcacatttcttctggttacactagaatatggactactgtatgttggtgttatctgagaatagatggtgtcttatgcatgtgtatctttgaagaaccaggaagtgactgcttacgagtggtctgttcatggatgcctcatgggatatggcataattgaacattctttttcttagaaaggaatccatgcttgcaatttttgtgataatagttaacattggccgggtacggtggctcatggctataatccagcattttgggaggccaaggcgggaagatcacttccattcaggagttagagaccagcacaggcaacatagcaagacgctgtctctacaaaaaatgaaaaattacctgggtgtgctggtgaatgcttgtagtcccagcactcaaaggctgtggtggaatgattgcttgagcctgggagatcgagcagtgagctatgactgcaccactgtactccagcctgggcgacagagtaagaccttgtctcaaagacaaaaaaaaatggttaacatttattgagtatttacagtgtgctggagactgttgtaagtgcttcttatgttctctcattttatccttacaataccaagaggtggctatcttccccctttatgaatgaggacaatgagacacaatgaaatgaaggaaccagccacaggtcccaccgcccttaagtagcagagtgggaatttgaacctatgcagcatgactctaaagcctacattgaaaaacccatcttgaagcaattcaaatatgtctaattttatcatgtaggaatatgcagtcatcaaatttgcatcttttgagcctttaataccaatcatcctatcttttctcaaaagaaaaaattttggaagatgatttttttcctgtatttgttttcattcatatcttttgggaacataaatttaactatatattcattttatgtaagtggctccagcacgagtgaaaatgacttcagagcaggggttttgatttttgcaggcatgtctaccactccctgtgatgttcagtgtgttactgtgtaatagatgattaataggggaaagtgttttaggtgattgttatgtctgtcaagctcaaatgcagatagaaatgtattgccttaattctctctctctttttttttttttgttttttttttcactttttgcccaggctggagtgcagtggtgtgatcacggctcactgctgcttcaacctcctgggctcgagatcctcccacctcagcctcccaggtagctagggctacagatgcgtgccaccatgctaggctaattttaaattttttatagaggctgggtctcagcatgttgcccaggccagtctcaaattccttggctgaagcaatcttccagcctaggcttcccaaagtgccaggattacaggcatgagccaccgcacccaacctaatattcttgtgtagaaaaaaataataataataactaattgatttttcttatgtcatcacattgcattacctttattctactagctctgttacctcaaggaggccatagaatcttctgttactcaacttcctcatctgtaaaatgggataatcgtacattctgtgcctgtgtatccatgagattacaagctttgagtgacaaaagttatctacttagaaaaataaaattatatatgtatatgtgtttataataaatatacatatttgatatgtgcaatagttgaatgtgcaaactgcaatggggaaaatattaaaactgtgatttttctggaccttaaatatagttaagtatattttaaaatgcttttgaaacatggaaaagttttctgaggctttggaagtatgaattcaaaatggtactgctaatgagagtaaatatttcaaggtaatgtgaaaagtctgagacagaggttattggccagtaatttacctggaggaaggcaaggtaagtctgcaaacatagagcatgtggatctttctgtactatgtcattctgttcatataatctgaacattttttttaatctccatgcattactatcttgaataaacaaaataattaggcaaagaaaacatattttaaaaagttaaaacgtgttggaagagaaaccatcagaatataagctgttatgccttcccagcctctgtattaaacatggaatttttactctttaccctaagtcattgggagaagatgaaagttttttcaaaggggaaactcaggaacatgattgtaaagaaaatgtctagttcctagagagagccagtaaaagaacatcattccacaagttactgcctccaatttaaaaacatcaaaacaggataaagagtgtctcctactgagcggaaagtagagaccagaaggtttgttgaaaccccagagtgaaaaccacttagagaatcggaatcgtcaagtataaggttgtgagatggattcagagaccagactgaaatatgtctctgccaatctgtgcagtgaaagtggatgacaagggagatgggagacaggagtcagaggtggcagaacaggcattggcctccctgagagatgtccagggcgtgagagtgaatttgtgagtaggtgacagaggcatgtcacaaaaagcaggcacagagagcaatacagaatgagaggtcattttactgtagcccaaaagttagtatggtccacggataccagagcctataaaataatatcatggatttatgaaatatgagaattctattgtgtgctgtgtgtgtagataaaaaaagtaagtgcctacaaattagatgtgcagcaaaatagaatcttttaagttttctataattgatgtgtttacttttgaatcccccacccttactggtagtgatggttggagtgggatagaattgatgtatgttgatgagttatcagtggattatttttcctccaaagtcgcttttggtttccaaacactttctgttagaaatatattcaataggttcacagttcaactcctgatcagttatttctatccttcttcccttctgaaaatctatgtttgcaggcagacttagaggcttctagtgtggatgtggaagcctttaactccgtgaccccactgtgtggccagtgcttgagttctagggtatgggcctctggatctattgtgcagtgtttggtctgattctgtcctctggaatcttactcgctttttttgtttttcaaatctgcaaaacgcacccctctcttgctgaccacctcttgcttggtgctacggatacctcctgaaatctggctgctgtttatatttgttcatcagctcaagtggcccatgctttagccctaagctgctgtgcccttggttcctgtcacagttcagaccttatggattctccttgctgcttgcctgaagctctgaaactttcttgccatacataggccctaggaaccaagatgagtttcccgctcaaacagagaaaatgttcaaaaccccattgcttctgcctgttcccacctcatttccaaaaattaggcaaaagttgcaaagcatctggcagcctgttttccctgtcattgtctctaattccttcccacaaacccctaagatgtatattgctccatcctgctatgtaggacttatcctggggcataaaaactttcttatccagagaaataagcatcatgccatagatgttcataagatatagaacagacattcatagccattatctacaggttgcaagagattaaatatttcctttattcatttaaaaacgtgtattttctaaatcttctataataaacaggtactattaatacatatattcataaaaagaaaaagtgtttacaaattgcacaaaataagatggaaaagaatcctggtttttctgcttaaaggagtacttcctattctattatgagatgcgagaccctgcaaatgctaacagacagagataaatgaaagatacaggaacagcagtagtggttaggcagaaaaaaacctggaccttaaaaacccgacttcagtaagggcaaaaggagtttctagagtccctgggtccgtgcagtcaaagcagataatcacaactgggagaatttcaagagaagacagattgttcacttgcaggattgcaactgttttgtttactcttggttgttgatctttcacttgtgactggatgatcatacaaagactccagcctcagtaagtgatgaattgttagttgaaggagaactgtgttttgtaataaataaggtaactctttcataatctctgctgtcaggatgctctggggtatgttttggggttcattagttctataatatctctgccagttcacctctacatgccactccaaataactaatcagaggacagcttgtgtgcttgctgtgcaagctcagtggaagcactcagctcctcaaacatcagattgtctctgcccagttcttcctggagagaatttctcagttgccctgtattcttccaaggtctctccagcatgttttggttcctctgaatgtaaccctttgcttttgaatttctgagtggtagatccattttaccatctccttacagtattagtacccataaagacattacctgtgattgagtctctttgatcaagggctgtaaacccatccaaggtgagaatgtaagggtgggaaaatccatttttctgtgacatcaggaccaaataactgcaaaggaaaggtgcccaaatatattaaatattgtcttagtgacttttactaaaaaacataactgtgagatggagttctgctcgagtactgtcaggcacttaatatattccaaataaatatggctggagttagattgactgaacttattcacagagggagagagtttggaagtgacttactgataataaaaaaaaaaattttttttaaagggtttgaggtgaggtcttacataggaaaagtcattttctgatgttctaacttgctttactaatcttcaggaaacaactgtggtacattttgtcctaaataaatgtttcttaaaggagtactcaagtggttgttaaagttttaagcactctgcatctttttaaataaatgcattgcttagcaagtacaaatgtgagtctcccagattccatcgccccactgacttctgccaaacagtgctagtattaatttttaggtgaaaagacaggtcagaacagtctgaattcaacattatactgatgaacgactattttttaaatggctgcaaaatgtattagtatctctaccaagacgtttcataagtactaaataatgtcagtaggttttgtgtctttttttttctttcctttttttttgtttttttttttgttttttttaaaattattattatactttaagttttagggtacatgcgtacaatgtgcaggttagttacatatgtatacatgtgccatgctggtgtgctgcacccactaactcatcatctagcgttaggtatatctcccaatgctatccctccctcctccccccaccccacaacagtccccagagtgtgatgttccccttcctgtgtccatgtgttctcattgttcaattcccacctatgagtgagaatatgcggtgtttggttttttgttcttgtgatagtttactgagaatgatgatttccgatttcatccatgttcctacaaaagacatgaactcatcattttttatggctgcatagtattccatggtgtatatgtgccacattttcttaatccagtctatcattgttggacatttgggttggttccaagtctttgctattgtgaataatgccgcaataaacatacgtgtgcatgtgtctttatagcagcacaatttatagtcctttgggtatatacccagtaatgggatggctgggtcaaatggtatttctagttctagatccctgaggaatcgccacactgacttccacaatggttgaactagtttacagtcccaccaacagtgtaaaagtgttcctatttctccacatcctctccagcacctgttgtttcctgactttttaatgattgccattctgactggtgtgagatggtatctcattgtggttttgatttgcaattctctgatggccagtgatgctgagcattttttcatgtgttttttggctgcataaatgtcttcttttgagaagtgtctgttcatgtccttcacccactttttgatgggattgtttgtttttttcttgtaaatttgtttgagttcattgtagattctggatattagccctttgtcagatgagtaggttgcgaaaattttcttccattctgcaggttgcctgttcactctgatggtagtttcttttgctgtgcagaagctctttagtttatttagatcccatttgtcaattttggcttttgttgccattgcttttggtgttttagacatgaagtccttgcccatgcctgtgtcttagtaaatataagcaataaaattgtcaaaaagattattcttggtggatgaagacgaaaatgatttttggtttagtcaccacgtgtcataagcagagctgaacagtaaagttcatggagaatgtatgttatctatccagaggagatgtaagaaaatcacaatgatgcacggtgagtcaacagtttttaaaacactacagcaacgttagtgttttcacctttcatgaaggaactgtcatgtgaataaagcctctgttgaggattagtcgttgatgctatatgttgctgtggtgtgtcatttaggagcatttttttccttatttttaatccataagcagtgatgggatagtaaaagctatgaattaagtgagccttgtttgaaataaatgaattatctctaaaacaatttcatatatctcagttctccttgtagtggggtcaggcacacaaatatgtgtgtgtgtgtatatatatatacacacacacatatatatacacacacatatatgtatatatatatgtattttatatatatgtatatctccaatgatcagactacatatcttgcccaattggctaattgtatatgattgaacatgcatcaaggtgtattgactctccttctcctctgtttctctgaagcactccatattattgcatacattacaccttcacctccggtctgtctccatttatggatcctccccatcttgtctttggttcttcttccttggcatactccttcacactactggttttctagtgtaatagtcttagctccatgttcttctttttctacatcttctgcatttagatctgatttttctttctacctccacatcacccccatgtcaatgaaaagtattcatatctttaactctagtttctgccctttctctgaagccatggaccagcatgtttgactggctgatgcgttcccacagtaaactgcaagtttatccattcaaagagggaacccgtgacttgtcttccactctccctgacactcttcctgatataagtacgtggcatttttcagcctctcttcctggcagtggaactctcctggctcattccctccaatatctagtcatatgctaagtttgatcaacctgatttggtaggtcctgtataagattctcaaactctcatttccaacccactttcttactttttcaatgaccatagtcagatattttgccttaacaacagctccatagtaccaatcactttgccttgtaggggttttaaaaataatcattcttttccaacctgcttgaaatatgacagctcctaaatcaataaactagagttaggtggcaaaatacttgattcccaacaatgaaactcaggtccagagtagtgtcacatttgttaatgtaaataccctcaccatatgtgcatatgtgttttaatgaagattagaccccaaattttagggcaaatttatcataattattttaggggaacaattattgtgattctggcagtgggaaagtgatctctgaaggaccagatgactgtgtatggtactgccatctatcactttacatggtagactcctaccaaactttcttcctgcactaagctgacactatctccttgtggaatatgtagagtgttggctcttctctgattccttcagttccagggaaaaaagaggtttccaaatataataaatatttcccatgttgaataaaatattagcagaaaatattgttcatgttctattctccagctttaggattttagtttcatagtcatattttacatatttttactaaggtttggtaacaagcatcaaaacaatccaagtagtggggtgagagatacactatatatctctggtcagagtgtcaacctgatttgtatgcagcagaacacaatttgtggtctactgaatccccttgtaattatgctctctttatatatctcaggttttctttaaatcattctttagtagggcattgtatttatagcagtctgtaaatttacatggaaaaaccccaataaactttacataaattgagaaatatttgaaagcaaatagaagtgctagacagtgcccttagataccttgtagtttaatgttaacaaaataaaatacaatcaaccaaattctgatggagcagcatgtcatcaacaatgacatttccaaacctgatgttactgataggggttttattagttaattaaatgtgtgcagactacatgcagtgttgcagataatgtagaagaggacatgcatgcttcattgcagctcaatttcctttctagaagttatgacgatattaaattatttaaatttctaaaatgagccacccacattcctccaatctttttattgtaaatttctatccacttttcactaagatgaatttgtttacagtttatttttgataagtcttgcaatactttttggggagtgttaggggaaagaaactcattcaaattgagcagatttccaatgatttgcaatccatttatttgggtagacttgaaatacaacagggacattcaaaagtttgagcagtaatttatgctatatttatacataagccagatttcattcccagaatttctgtctctcctatggttttttgctctgatttatgaatttatttgtaataaaatcaggtaagtcaagcatttattctaaactcctagtctgttttttataacttacacaattcgtacacttccaattattaattacttcaattattcattcagcaaatattgactgtcttagagatacagtggacactattcttaatgctgggaatgtgctggtgattacaaaaccaagtcgcaacacatgcaaagctcatttactctttatgcttttcaaccttaaaattttatcatcaccaaaaaacatttctttgcttagttgatatggcagtaccagaagttaggtgaaaaacaggtgcacattcagaatacctactgtaagaaagagcttaccttacaaaatactatcagaaagaaattcactctttgttaaataatagtgtcaattgtgtggacaattattctgatgctagtgatgaaatatcaaaaagagaagcaaggaatatccctagtttcatttttggcattatttttgtcatacctctttttatcattgttagctttgctagaggtttgtctgttttattgctgtttccaaagattcagctttttgtttcattgataattctctattacattactgttttctatttcgttggtttctgctttttattatgccctttgtttgtcttatttaggtttacttttctttttctaggtttttgaagtgggtgcttagataactgatttgagactttcccttttttcagtgtatgcatttcctttcggcagtgttttaactgtgtgccacaaatttttgatatgttctattttgagtttaattcaggttaatgtaatttttgatatctcttgcaactaactgcctctttgacccatagattatttaatagtgtgttgcttagtttccaggtgttgggagatttctttctgttatccttctattcttgatttctagtttgaatccattgtggctagagaatatactctgtatatatttaatttgtaaaaatttgttgaggattgttttatgacccataatataatccatattggcatatattctgtgagctcttgaaaagaatgtgtaatctgctttgttgggtatcctataaatgtcacttcgatccttttagttgataatgttattgatttattctatatccttgcttattttctgtctagatgttctatcacttgtgaaaagatggttgttaaaatctcaaactgtaattattgaattgtttattttcccattctattgtccttttgcttcaaatacttttgtagctctgttttttgttgcaaacacctctatgattgctttgtcttattgctagttcttttatcattatgcaatgttcttctctatgttcaataattgtctttgctctgagtctattctatctaatattaaaactccctccgtccctccctactcctttgcctccctttcctccctccctccttccctccctccctccctctctccttccctccttccctccttccctccctccctgctttccttccttccttccttccttccttccttccttccttccttccttccttccgtccttccttccttccttccttccttccatccttccagcacctttattaggaagactgaaatgatagtatgctgtcttaaaaagcttggttgtaaaaggaaggacttgaaaatttcctttctcatgtcctcaaagacatggatttcatttatatgcaccttggtctttcctcagacctctaacttcagcctggagttgagcagaaacccagcttagtttccctcaaatcattcttattctccagacatggtgctgcacctttgaaccaacaagcaggttactggtagtatacttcttaattctgaaggcttttcattgttatacaggaacaagctacacctgaatcagaaaattatttagttagcaaagcatccaaaacagccaaagctattctacttatggttgttaatggacagtctaagaaaagctaagcaaatgtcatctgtaggcatttgctgtacctcagactcttatgggacaggtttgcagactgtttcccagttccccagtgggttcataattgctgactctttgcactctcctttgattaatgtttgcataatatatggtgattgaggtttctggctccccatatggccttcactggcaccataaaaggagagatgtccctgtaactgctgagtggtgatagaagtgcctactctttactagacattgtctcatacctccctagtgagaagagagaggggtgcctcattattggtgggtgggggtagaagtatgggctcctcgtgtagtctccattgacactacagattatgctctaacattatcaataatcacattaaatataaatggtctatatattaatatattgatgaaaagccagagattgagagaatagattaaaaagcataatccaactttgtactatcagcaaaaattcactgcaattacaataaataaacttgttaaaaataaaaggatgggaaaagatatacgatggaaacattaatcaaaaggaagcaggagtggctatatcaaaggataagtacatcaataaaacagcaatcctaaatgttcgtgtatcaataataggatacttttaaaacttttctgttgtgacttacattgttttattgcttttcaaaagcaaagaaaaaatggagtttttgttggcatagtctattatttttattacaatactattagtagtcacagcatgtaaggctattaataaatgaaatactcgtaggtgataatcatgtttggatattctagtttgagcagaattagaagctcaaaagtatgctgagtttgttcacatttgctattgttttaaccacatttgaagcaacagtttaaacgtttttttgtcacttgggaaaactgtcagtactctataaggaggaatgaaaataccagaactataaaaagaaatgttcaaaagcttcaatcaacttttataatatttccagctttaaaattatcattattaaattcatatctatcaagacagtgtatttcaaatcatcagttttttccatggcctgctgtattcaagctaactgacaagtgattatgtaggttgtatcattattatattttttaaaatgccaatagacatccccccaaagcagcaaggaactacttttcaaattcacttaaatgacacacgttattctgtctgtctctggcagctcttcattcctgcccagagtttatgggtagatgcctttaaattgtggaggagaccgagtacaatgctgcattcattattccagacagttgtcatcatactgaaatgaaaactccttttaaaattttaattaaaatcctagaattggcatgccctttgggtttctagataatgtaaaggtttttgaactatctggaaatgttaaaaattcatgcaaacagaggtcccctgataaagaaatagagccttctgccgctattctttacatatgacaaacataaacaccccaacttaaattttcccttttcttccttgaataaggcagatttataaaacagtctcataactggaatgtatattaacttgttagaatcattgatttaaaactgttctattctttacgcaagggaaaaataatgctggatttctcagtttcaagtacagaagatccaactcaataaggatgtttattgttaaataatcagaaatctagatatagcaaagtcccagggtcagttaattcaggggttccatgacttcttcaagaatccaggttttgttaagtttggaatttgggcacctgttatggaggaagaggctggtgggaagattgggtgagcatccatgtagcctgccacatacagcaggcaaattaccagggattatgttacatagatttaaatagtcaaacctggttaacttagagtgtgggaaaaccttttctgtaaaaatgaagaacaatcttgtttattgtttatcaaacatttcacatagaggtatcattgcgttgtaattcctcctttagaaaacattgagaatggctcaatactttctacatggatgtttatatagaccaatgacatttatttccattgtattgtcatgcttccatagccaattagaatgattcacccttttgacaaattgaaaagacggtttgtggaaataaacaagttaggagaacgctactggaaaacaaataatctcttacttttgttaatgttgacaaacatagtccacagctatgtggatggttgtgacagatgttgtattctgattttgaaaactaggttgaaatgtaacatagttcttgacatatgcatttttccaaaggtcattgggatcaggtttatggctagagagttaatgattcgggaaatattttcattgaggatgaagcttggcaggggttgggggtagtatagccttccggtaggcatcatagagtgtgtcacatacaccagggagattacaaaggattatattaaataggtttaatcagccaaatctagttagctcagattttaggtaaactattaatgcaataatgagagataatattggttcattttattaaacaatatgatttgggtgatctggaaaaaatgatctcaaagaatcttgcaagttataaagtataatcatagaaaaaatgcatttttgtttagagtttcttataattcgacctagcaatggaccatttcagtctgatttattcctttaacacatgtgtgaggtactaggaactgaggtacacatggtgaacaagacaaatacttctgtgctctcatggagcttacattgtagtgaggagttcagacaatggacaaataaacacctaaaaatatcattcagtatcaggtaagcagtaaggctattagggaaactaaagcactagtgtggataggcagggagatacatagtgcaatgccatatagctcctgagaccttaaaaaaaacaaaagctaatgggcgcatctctgtgtataggcaaaaaaagactcttaggaatagagacctcagtaaatctaatgtcatagaattcattgttagccttatccatattaaaccagagcccaccattggagatctctgttccctttgttccattgtcccattagccaattttaactttgggtcttagggtgcatcagtcccacgttagtgaaacatacatcttattgggttattcgattggcctatttctgaagtgatgagcaaaagatacactttgggattagcttaactctgatggactttgctttcattaattcatttatacttgcatcttttcagtatgtatgtgtatcaaatgcctgttatacacaagaggctttatagtagatatgtgacttagacattgcttgcaaacaggttagatataatatctaaaaaagatttgtagtaacaaggcagagtttcagatatcttaagagaagcagaggtcctgcttcttttgagaagatggcttattggctatgagtttgcttggtcttggctgttacaaaccagtctctctgggtctgtaaggctctattaatatttcagcattgagaatgattggagtgccagtgaaaagaaattaatgaaacaggttctcagctggatctacttgttattgatacataggtgtcaggagatctgggttgtaattcactgccatctaacctctttgtacctcacttagccacagaatgagagttatggggtagatactattttagattctttccaatgcaagttattgtatattctattactttattcatagaaccaaaacaagcacagatgaatttaaatgtaggcatttggtttttcattttgcctcccccgttcactttttaaaatatgaattcaacctttatcctacaaggcaatattttctatacaattatggagtctattagaaagacttcattttggttgaagctttataatatcagacatactgttgttggtaaagaagatttaaactgagtctattagcctgtatctgagaggtagctgatagaatgcatataatgagaaaattgttcttgaaggacacactaaacaactgtggtttgtatttgtttgtaattctgttgtgaccagacagatgggtgactataaacaaaatatcttcctattcccttctgagacatatgcagggtcgtctttccttcagcactgtcatggagcagcacgcaattagctacagaatgttagccaccctgctggatgcaactccacatctccctctgtggtgtataatagtacaaaagtgacattaaacctatcaaacaatcgtattcaggcagcatggcatcacacaaccccagctgtttgtgttagtgattttgtttttcaccagaggagatttttggggtgaatgtaatgaatggacaggctatgcttacttttaatgaaccccaagttaatgcttcggtctttttctgtccatttaaatgcaaaggagcacatttcagatcataatgaaataagcacactaatacacaacctcctttcttcattctgagcctctgcttccagaattaatagcttcctggtagggcatgtttgacattgttgctaaactctaaacagggatctaattcagagacaaatttacatcagcttatattttgacttttaattcctctggcaaccaaagaacaaacaagcaaaccaagaaagtataaagagtgactttatgaagataaatcagaatgacctgtatgttgaatccttgagaatacatctcttgtggtttcattatacttagattagtgtgtcgtctgtggtgatactctgtaaagcaaaaaatataggtcagattaacaaaatgaatgcaaaaatcaatgcctgcaagaattagtgattcaaaagatagtattaactaaacaaatttatgttaatcacatagttaattcctgatttatgaattatatctctgactagttaaatctgaggtcagttttatgtgttgataattacatgatgttaaataaagaaatcattttgcgtttattatatatattgtttcttttaatataactcagtaacaaggaaaaatgtgcaaattatttttagcagatatttatctagtactttgcagttacattactgagtgcctcaaatgtcctgagccctgtatagtgatttctatataaaatataattgctgcccttatgggctttataatctagggatctcatacagtagtggacatctagtggatcatcagaatcacctagggatcttttagaaaatgtttcctgtagctatacatagaggttctgattcagtgggtccaagtaagaaatctgaaatcaatctttaaagtttcttccctaatttcagtaacacacagaatcggggacttctgaggtaagtaaagtactttcaatctgaaaaagactttagaaaacacccatctattctaacaccttcatggtaaataaaaccctagggattgcggagcaggtgggcagaaccaaaagtagaattaggaggcccgattaagaacattctccatgttcaaacacaggcccccatctttgccgcagctgggaagttgatgagtggcaaggtgatgcacagttctacctctcttacggggtatcctctcctgcaacagagtctttaccctgtgcgggcagtgtgggtgatccaagataccaattaataagtacgagtaatattaagtcatggaaggaaaaataagaagggcagacgggagagaagacatggcttcgcttaaatactactactgtggcctttgcagatatttggaaacttggatttggcatcaccaatctttaataattctatgtctttcaaagtccttctactattttcaaaataggttgaataaaaataggtaaacaaatagagaatgagaaacctaattaagcaattactactatggtagctattactacctacctgttttcttcattagctaagtatggatatggtaatcatatttttaatgttgttgttggtatatgaagctgaagataaagataaattcagaccaaatttcagtcttctcataaatataacattttttcttattcaaaatttaccttatggcctgagacatgaatcatgttataatgcctttggtctttgattttatctctaatcatcctgtttttgaggagtaccatggagtccaattagcaactatagtcattgataagcagtcagttcttccattcgtctgtccctttaattgcttcgtgccacttctgtctttgaaatccatgttatcctggccttcgtaaattaaaaatagctcctctccaatatggtatcaggcctaattaattattcatacattattattttcctaattattcttcttgatgtaaatgacattaaaagtctgggtctatttttggaactcataagaccaaacaaaacaatggctttaagcaaggtgaaccagatgatgcctttgtgtgcggtaatgtaataacacagcaaagccaagcgagggagagagattattccatcagcattgaggactgcttaaagaacttgtattttccaatctgcagaagcagaatttcttttaacctcagctttacttcactatcagacggcgtggagtggctaaatgctagtacctggctgtctaagtgggtctgggccttcctggcacttccctccccaactccccactgatatatacaatggtagaggggaatgcgggtcaccgtaaattctccagtgtactcctgccaccgttttactaccagaggaaagaatgagtcttctcattttcactcctcccgatggtagcaacttcagagggcccttcgcccagtggccattctggctggacaacctgtacaacaagaacagggacctgacagtggagtgggcagggactcctggcagctctgcctgcttcccttggccctgatttcatgacagattcctgtgccaggccaattaattttaagacttccctgcaatggattgcagaagttggagaaaatgaggaggccagaaaggtggttcttccctatttctaactttcctaaagcaagaggaaaatatataacggaggaacctcaggatcttttctgttcattcttgagagtaaaaataacaatttttaaaaaataaaatgaactttaaagatttgtttgcataacatcaataaatggtggtggactacctcagagtccagttggttatttgtgcaatagatcatgcatctggcactttttttttttttttttgatgagggagagagcttcctgaaacagagaggacatggagtaagctggaggtgtgctcctgaggttgcttgcagatgttgtctacacatgagtggaagtagcaaggtcagaggagaccccttcatggaatatcagtctgtatcttggatgttgttattttgagccccagaattaggaaaagtcaagatattatgggctggttttactgaactcatgtaacccagcctcttttattcacaatatccatattttaaagcatatagtcatataaaagtgagtgaacacagtactagatatcgaaaattaattttaaaaacacattcagcattgggttttccatctttgtagtgaaacaaagtcagggtttatataattaatatcaagcaggttaattctgctcaaaaactgccttagtcagtggatagtatcacaattattgaactcctgtgaagccctctgtttcgctttggctgtgcttgatatagccatctctacaccatcagagctctaacagtaagacagacaaggcttgaaagaacagaacacccgacatgattgtaaatgttgggtagacatctttaattgcagacctaattaccatgtgattttggtttgtattctatggttagtaactatatgaaaacttacttttatatcatttttcagtttgaaccatcctttaatttctgtatttacatattcttgctcactttttttttttttttgtgagcagtctcaataaatgatatatataaaatgtcctggctgtgaccagtttaggcatttccagacactgtcatgtgcacagctattattttctgcttcattcgtgaatgcttatattaggaattgctgaaaatatgtaagcaattttaatttaatatttttagaagtgtacttgatttttgtcctttctttttcccactaaataatttatgttctgaaatcttgccttcaaattagtttaattttcctttctaacttagatggtttcacaaatgcacagttgtacaaatgtacacacatacacaatcttctttcacaaagctcagcctggctacaagtgcagaaagacaaaggagtatttctcagtagctctggagtgtcagagggtacttcatgcttagggtaaagatgggccagagaaacaccagagcattgaagtgaatctcccatgatgtcctaagaccacatccgtatgaaagtccaagaagtcaggagcagaaacttggaaggagcaaagtcaaagaggttatgaagctctacatcttggagacgagacacacatgtgcaagaaggtttagtgccaggaaaggggctagaaggtggagagtgtcttgcacaatcccctagactggacaactctcagagtttacaacttgcttttatgagccctagagggatttgttggtgggagggtgagcctgacttaaaggttcagggtggaaaggacgttggtcttgtttgaaaaacgttgataaaacaaaaagaagtccactactctagagccctcgttgttggcagctgtgccccagtagcagttctaggagggggaaaattcttttgttaatgctgtggttccttgacttcagtttggtttgatgcaaataaattctttcatgtgtatctcctgatgaacaccctgattttaaatcctctgttatgatcttaccaccaatcttctatttaaaataggagataaacaaaatgcttatgttatagaaaagagaatgtttgtttgccacataatttcctagagaaacttccaaactgaagtctattcttcaaaagaagcaccttttgttacaaaggacataaagaggtagggttgaaaagttaatcatacaaatgtgtattttaattcaagtaaatcggttgtattttcctgtggaataacattttcaagtgaatatttgtgaaatagcactgtagatttaagcccaatatttctttttctaatttgctttttatttgcattcaaaatcatggccttgctttgaacattctaaggtattttaaaagcctgtagtgactgagcctttgaaataatatagtaagcaaaatataagtattaagactttagtaattatcctggcaaaggattgtacataattatatagttttgaaatcagaaatgaccaaagaaatgattctgctacttgatggcttcctaatggctagttgataagcatgaaacaccttagcatgaagtaaggcactagctccaaactgacatatttaattcatcctctggctccattgtttgctccctgcgtttcttctatgacaacatgatgccgctgttgttcttcctccagcactggttggcctttgctctgctccatctggaaatccccactcactttcaaagactagtttccatataacacaactcttaattcctcagttaattgctccctattttgtgtccctaaggcactttgtacatggtgatattttagtacttgtcatactgtatttttatgtgttttcatgtctatccctgtagacttgtggttctcagccccagacccaaagtatcctttttagaataaacatttggtaatgacttattatgatcttgacataaaatccttagatatgtcacttcacctatccttattgtttttaaaaatcagtgtaaagaagccgggcgcggtggctcacgcttgtaatcccaccgctttgggaggccgcagcgggtggatcatctgaggtcaggagttagagaccagcctggccaacatggtgaaaccctgtctctacaataaatacaacaattaccaggtgtggtggtgggtgcctgtaatcccagcccctccagagcctgaggcaggagaatcgcatgaacccaggaggcaaaggtggcagtgagctgagatcatgccattgcactccagcctgggtgacaaagcaaaactccatctcagaaaaaaaaaaaaatcagcataaaggaagaaaaaaatagtttataatatacttatacaataaattatacagctcaagaatgactttctaacaaggtagaatcagcctctacaaatttccgtaatgcaccctaggagacagtatcttctcctgggcttaggtaatcctcccacctcagcttcttaagtagctaggactacatagcccagactatatgtacataattttccatttatcccaggacctatatagtgagcaaattattgtctataatatcagactgagaattatctgaaagtgaggctatacatcataaatacttttataacctaaatattaagatacttagtaattgcagttgattatgtctagaatgttggactgattcatataagaaatctattaagaacttaagcagatggatgaaaataagtgaccagtctatttttaatccatattataccaatagattcatgtagatttcttatatatgccccattaacttttacaaaagaaggaagagtaagtgaaggaatcaaaatacatgggatgaattgtcatttttgataatttcatatatgccttgaatttagagaacctagaattcagtcttcccaagtcacttttttacttccttaatatgtaggctaggaaatctctcgtaataaaatgctgttgaatacaatgaaaccataaagaatacccaaatggattgtctcgttcgttcagtggctgcattttttcaaatactgttatacctgatttttaagcagtgggaaaataaatatatgtaacttttattaatcccacgtatttctcataaactgtaaaaaattggtatatggtcaattaatgaaacaaaaaggtgctatcgtctttaaaaatactgggattaaataattagaagcagccaataaatgttggttttggttatagaatagttgaacagcttaaattctgtctcaaaaaaaaaaaaaaaaaagagccctgcaagtttctctttgtccatctcttagcaggggtaaggcgatgctgggtgatattttttcagtgggaaaatgctggtaagggatatttacattttatttatggtcttaatatgcaggagaaaatatctctctgattgtctatgcttatcaagattaaaagttactgatgagaaaaatggaaaaatatatagtaagttttaaatcacagaaattatttcagccaattaaattagaagcctaagaaataggaaaatccattgcaggagaccaataaagacagaatttgatgggtacctagatataaattttgcagccacttactgaaatgcattgatgaccaaggaatattggggaaatagactcaggataaattccgaatagactgatatttatggtttgtttagaaataaaggtattaatataagaattggtaaggtcatataaatgttctagaatacatcccagggtgatgcgtaaagagaagcttcctcattaaattgttcttcatgttttcaaagatctagagaataggaaatggaattcctttttaacttgtaggataatcttgttgaatgtttagaaagagcattttgatttgcctcagatgcagcagtccttatggggttgagtatctagagatgattgtatagaaaatagccagtcactgtctttagatataggtaagggaactggggtgccactgtcatggaaaagcagtcaggcaaattgttggtgatattaatactctgcactatatgcctctacttttcttctctttgtcctgttccctctttatgtttttctcttttcttactcattgtcttagattgactctagcaaagacaccccatgcaatattggcgcacacatttattcaatcagcaggtatttattggtccctgactctatgctcattgatttgtctccaggtagagagtggtctagattaactccagatagttgcctaaaatctcttcacacaccgactggcattctactaaactatttaagatccaaattttattttaagtgtctcattttaaattcttaatctgaaagcataaattgtgagtcagtcttaagacttaattgattgcatgctagtaagaaactgactggatttttttaaaggacaataacctgaaataaagctgttatattagctctaaatcatatcatattaaaaatgaaatatatagacaaataatacaggaataagtgtgtgtacctgaggttatgatttattcctcagtgtttatgatgtcttattttctctacacagtggacattgtgctcttactcagaactgatagtgtcattgctcaaggcaaaatctttactaagataatttagggtggagttgtttatgatgctatcgacttgagatggacattctacactttcaaaaaaaagggaagaattgtcagaaagcattgtctaatatgccaaattttaaatcataattattaattcttcaaactaatttctagaggaccaggatgactgttagctcatattcaggtctctgaaataagaattgagcattgtttttattgctttagttacaggagcttgtgggcaacatgtctcactgaggcatttataaggtaaaacttgccttctgtctgggaacgtgtcattgagtcattgcaatggaagaaatctcataaatcacctagctcaattttctaatttcatagaggaagaaactgaagtacagtggatttcactgacattgtcattccacaaggttaattacacaagtggcactagaatataggccacctaacttctattatcatgactttccaccacatcacactgcttcattcattctttcttccatccatccacccatcagttcaacctaatgacacatacatgttgttgctgactacttaccagtcataattacaggggtttaattgatcatttaaagtatgttactttttaagattttctccggagaaaatattcaaaatacttcagttttaggagaacaaaagcctatgtccaatttgaatttactttaatgaatatatatttaataaatatacagatattttgagatcttattatacaattcaaataaaggaaaagatttcaacttgtccaaagtttgtacgagatcatcaggtagttcttccaagtgatatttttgactaattcctaaagctgatattgactagtgttgcaatctaacttgatgtcagcatgcataactgttcagtgtactgtaatagacgcttaacatcaggctttctaattatcttgaatcctagaaatgatataatagaccattcatttttattcctccttaagcgttgtaattaattattgatttaaatgggaatgtttcacaaattttatttcaaactaggaccgcatcacttttaacttaaaattgacttcagctttttcaatcgatttaatataattcttcatcatagttaatgtagactttttctccactttgtattaatgactttggtaccacaggatagtttaagatttatattattattatttagcccatgattctatgagaatatcattggcaattatgttgttataatttctgcaatagtgctaaggaaaaggaaatatctgatttgtgaatccttaggtttctagagctatgttgccagtcaaataatcttataaagacataaaaggtgctgtgcatttgtacatcttgaaaattgacattatgccattactttcattagtgggaatatcattcaagtctttagaaacaaattacatttttatgtctagcattgtttctcaaagaaacattgaataatgctaagctaatctttggggttatctcatttccttttcaacactttatacattgtccctacttccctaaagcaatattttcttcattctcttgtcctttggcggtttctctctacacacatagtccttcactctcttctgcccccacccatcctttccctctctcattcctctgatataaaagttggtaccatatttccaggggttcaaatcaatccataattgcggtctagagtcctgtgtggaaagattttgagattacagctcagatcaatgggaaaggctgctatgatcaaatggtgatatctgccctaaatgtttgcttgaggagtggtagacttttccagctttccttgaaacaatatctccagtgcatttgatacctccctaacatcatgacgattaactaatctgaaaaacaaatctccatatatttattttgagatagggtctcactctgctgtccaggctggaatgcagtggtgcaaacatggctcactgcagccctgacctcccaggctcatgggatcctttcacctcagtctccggagtagctgggacagcaggtgtgcaccaccacacccagctcattttttaaaagagttttttgcagagagggagtctcgccatgttgctaaggctggtctggaactcctggcctcaagcaatcctccggccttgccctcctaaaatgttgggattacaggcgtgacccattgtgcccagctgaaatctctattgatgtactgaaaaagcttggctcccagcttctcatttctcttctagttaccattacttatgtgtagtttaatactgaccttctgaagaccatgtcatttttttaaagctatttttggatagtgctgggaaactgaatttcccctaatcatgctactaagagaagaaactgttttatgacccttaggtattatgcaaaccaagaatttttttttttttaatagggagactgaatacactttgagttttctgacattttaccctttggaattggaacttttatatggaagtctatttaattgtgctaaatgtttatgttttcactctttctgaatattccatcatatcttcttcctttttatttagtcttggtacctaaactatatttatatttaacctttataaaacaatatattatatttcacctttattcttaagaaatgaatgctggcaaatgctattataatcttgatttagtgttctctcacttattaaaggcttggatcataccaaagacatatcagttattttatgatatttcttagattcatacatcaactaattgagaaaaatgaagacaatttgataataaagttaatttatgtgaaaagtgctttagaatgctaaagcacactttctggatttacttctattattaaaatatttacgattgatatttattcagatatctaagagatttttttaaagtggctacatcctgctttagagacaaaaaggaagtcaggagaaaggagatgagtggcctatgtgaagggatcatgaactttctttctaaagatatgtgaggatattttgttttagatatttttttcattatgagtttcaacctgaaaaccgttttttttttttaaaaaaaaggcaaaacaaattaattctggttggtaatcagattagtaacgtgattggatcgatgaatatgatgataattataaagaattgctaacagaattaatgggttaaagtggagaatatgaggtgaaactcataaaatttgccttcctatacaaagatctgtaactgtaaagtaatgcactagaagaaagatatagtgatgaaagaaaatgattctttaaaacttgaactgatttgagtgacactgcacattgtgttcaacataataggaagttaattactgtttgtgtatttagtgtttgaagatttgagtggtgaaagaggtatgaatacacatgtctatgaacactttcatgccaacagatagcaaacaagttgggagtgttgttcctgtggtatgagataccctcccgtggtttagaaaaactgtcttttttcagcatacattttcctaaatttaaatcatttgttcattcatacaaaaacgcatcttctgagtgctggccatgtgccaggcactgtgttaggcactaggtatcccatgttgagggaagcagatgtggtaactgccctcagggagattctcttctactggagagaccagtagaagggaatcaaataagcaagtaactcaaactaaaatacacttacataaacacattgggaaaagggtgttaaggaataaacggtgctgtgatagataaaaatgttactgggagacagtcctaggctgggaaaccatgaagagggaattggaagaataaggaaccagacacgcaaagagagctgcggcactgaaggtagctccgaggtgggcatgatccagaaactggtagcaggacagtgaggctggaggagtggacaccactggagaaggggaaggagggaaaggagatgccataggcgaggttggcaggggccctgtcatgccgcctttcataagccggggcaagtgctttggagtttgcacaaaagtaatgggaagcccttgataggctttaagcagagggtgacttaatctctgtgatttatgctttgaaaagttcattctaacagctgcagaaaaaatggtttagaggcacctaaagaggatgtggagaaactgttagacaactgctcacaggccagggccccgaacagtggcagtggcagtaggggtagaaagaagtggacgggattcagaactcactcatgtttaactcgacaatctgaaacgtggagaaatgacagttggagaacacgcctttcagtttatattccctactgtgcttcctccctttctctaatgcctaaaacatagttacaggcttctaatgaatgctttctccccagattttgtttctaagattagtccccctgttgtaattatagtttacatagtaataagtaaaatataattttatattatattgtaatttatatagttgccattttgggttcaacatggctgaatattgttcaattcgtatgattcgacccaacagactcagagttttacaattctcatttaaacacttggctaacacggatgtattctataaaaaggaaaataatctccttttgtatggataaataaatgaagggtccaatggcatttcagtgatgaaagatccattactgctgttcctcagtccctgaaacatagagcaccctcactgggtaatctgggatacagggggaatggaatgaccactttgttaaaaaaaaaaaaaaaaaaagcccacctatccactatactcagtcaaattctattatccttttattactctgtaattttgagggcaagttcagcgaataactgtagacgctattaagagctgtcatggaaaatgtatctgtccttaaatggaagggagaaacattactgcagaggcagtgctgtttcaatgtagataattctccccttcaagctttttaaaataatgtttattgtttcctacgatgtctccccagaccgttctaacacttgcaattgcagtcctgcctttttcctcttgtcaggaataaaatttatggaagaagcatggcccacgggaaccaatcttgtttcatgttagtgtctacactaatagtgcataacaagggtcaatagtaacttgcaggaaacattgttaaatctacccagcttcttaaagggtaaaaggcccagaaagaggctctgacattcttttctctttagctttattttgggcataagagagagaaaatgtggctggtagaagtcatcataacacatgcaaataacaatattgtggaaaatcactgtattattgccccatggttgctacaataaattgtcacacactaggtggtgtcttaagacatcaggaatttattctctcacatttttggagaccagaaatcagaaatcaaggtgtgggcaggactgagttccctccagaggctctggggtggaatcctttcttgcctctttcagtttatggaagctctatgcatgccttgttctgtgactgtttcaatccaatctctgcctctgtcttcacacaacctccttccgtgtgtcttcttctgtccttttctgtcacttatgagggcattctcattggatttagggccaatcctaattcagcacgatctcaactaaatccgtaattacatctacaaagaccctatctccaaataaggtcatatcctgtggtttcaggtggacataagctttggaggagagaatactatttcacacactatggtcactgacttgatggtttctttcttttttttttttctttcctaattccaatttttattttattttactttaagttctgggatacatatgcagactgtgcaggtttgttacataggtatacatgtgccatggtggcttgctgcagctatcaacccgtcatccaggttttaaggcccgcatgcaccaggtacctgtactaatgctcttcctccccttcccctccacccccaacaggccccagtgtgtgatgctcctctctctgtgttccatgtgttctcattgttcaactcccacttatgagtgagaacatgcagtatttggttttctgttcctgtgttagtttgctgagaatgatggcttccaacttcatccatgtccctgcaaaggatatgaactcattcttttttatggctgcagcctaattccagttttatcaacttttaaggaagctatttattctcaatgctttgcctctaaaaataagatgggaaaatgggataaagacagttgattcataggattgtcagaagatcaaattaccaaacgatctctatagacattcagtaagagaacataatttaatatggaaatatttgatctaattgtaaaatgctattaatttgctcaaccaaactcttgtgatggagactttgaaagaagtacgtttccacatatggtctgaatttatcactttttcatattactgggcttgaagtgataggttcttgggcatagattgaggttctagcttgaagaatgtttgccttttatgtatttgtataagtttctatttcatcagttttatttatactaacaattttagtttggtcttagttcccaatatatatatatatcacatgtgactatctgaacgatcatcctgtatatctctttctatggggcaggaattctgccaaaattccatccattatactctgcaatcctgtatcacaacaggtctttgaatgagatatgattgtccctgctttagagatgatgaaactgaagcttaactgacttgtgccaatacatacaggtgtcagcaagataactgctatttaaacctagggcttcttggctccagggtgcaagcttttgaccactgcctaatgattctctttaaggatgtgcatcctgagtttgggaggaggtctacacatttatcagctgttaatccagtgttacctcaagcctattgcgttcctgagacctgaagcatctttctgggtctcagtgtgcctggcccatgaccttacccaaggagggctcaagttcaatcccttgggggctcaaattgtttcttcagactcctggcaacttggagcagaagcaactgatattgaatgaggagacagagatcatttgccctagcagtatcattcaccttcaactaagatttccccctggatgctatacctattcagaggcagactaaggtcaccaattaagctgaatagagtagctttctctcaagctgaggtatatgccagattaaaaggtggccttacactcaaatgatgcctccttagagctgcccacctgacctctgtaagggacatagtctcttccaccttccccgttactttctgtcagcttattctattccatttttcaccattgctcttatcaaaacctgatatatttttatgtttattcctttctttattatctgtctaccactagaatgtaagctccctcaggccaataacttcataggttttacttctatttccctggcatctaggaaagggcttggcaaaatgctcaaaggacttatgagtgtgtgagtgagtcagtgaatgcacagcgttgccatggttaaaccagtgattcatacctcatttctttccccttcctcttttattttaaagaaattataggacaccactgagccctaaacacagataaaacatcagtattaagatatctattgagctgcagtattcttacttggtgtaatgatgtggggtgagatttatgattactattgggtgagtttcataagagaattaaaagaaaatcttagagctaaagtagctggaaggatgaatgggtagaaatactaattactgctagaaatactcgtgactgaataaaaatatatgctgccaggcacggtggcttatgcctgtaatcccagcactttgggaaggcgagacaggcagatcacgaggtcaggagatcgagaccatcctggctaacatagtgaaaccccgtctctactaaaaatacaaaaaaaaaataaatagccgggcgtggtggcaggcacctgtagtcctagctacttgggaggctgaggcaggagaatggcgtgaacccaagaggtggagcttgtagtgagccgagatcgcaccactgcactccagcttgggcaacagagcaagactccatctcaaaaaaaaaaaaaaaattatatatactgtgtataatgaatatatgtaaatggtaccatttatatgtatgtatgtatatatgtatacacacagaatgtatgtatatatgtatacacacagaatgtatgtatatactacctttaatatatgttaaatatgtacacgtttatatatgtatacacaaacacacaggtagtttactatatctatttttccttttagtaaagggaaatcagcatggaatcatgttacatttatttatttatttacatataaatgtctaccatcagaaaaaaaaacagttgggataaattgttaagccctctaatttagaaggatgggaatgttttttacatttaatcattgactgccaaaaaataagagtctgcacatgatattcctgggtcacagactttaaaggaatagtgatttttgcttgcttttactactaatgaatttcaagagttagacaggatgtgtaatttgagtgggatgcctaacattatggaaagagagacaggcattttttttttttctccaccagaagcctggatctcttaatatggggatatgctgtgtttaagaggaacttggagggtgacaaacagaggaggaaaatagaccgaatttgcttaaggagaagatagatgaggtggaaagtgaaaattctgttttttttttttctttttcctttgactagaaggtttagttttccaaactgccttgtaggattgagtaaagattattggtaaaccgttctgggaacttcaatggagaaggaaggtcaaagcaccaggggtgaccagtgggagggaaaggagacctttactgagggctcagctctgtgtttctactgctggtgaatgtctatcacattatgactttctccttttctgtaatggcacttatagagacaatgaaaaggtaatgggacctcaatatagtgtactctagagacccagctgaagtggtgaagtagcttctaagactcaaaaacacatcaaatggatcacgtttgctgcctttcggtgtgttatgggcaggagtggaaagagactgagaatgttcaacaagtagctccaagaactttaaaggcatttagtttccatttctggggtgtctgctaagttacatacattagtcaatgttttaaagccatatttttaaatcctttttttccccagaagattgatctttattatcttttaatgatatgtgtccaaaatatgtttgttaaaaatagccttttgtcagcttgcatgtatagtttttttttctttttgtttaattactgtcattaaaaaaaaaaaatcttggggacattggtgtcttagttctttgtttccttataagggcatttaccttcacagccactcaggtcactgctatttttatataaactctgtggaaagtcaccagtatatcacaattctcttggtctcctccttgagatctttttgtggctacttaaataaatactatgtgtcttttattatggggaagaatctgctttatcatgggtagtgtgcctggtaatcaaggaacaacttttaccaactttgctatgtgctgtatcaccaagtttgttataatgatatagaaaaaagggagttcatcatggagcagtgctaaaataccagaaattataataataatatactgccatttaaattaggagcagtgtaatttagagccatagggaatatgaaatgttatttagaaaacgattatcctctcctacaagtctaataactatcttctaagccataactttagtataaatttaacttgtcctttttcagggacgtagtagagagattttaaatgatataattacaaccaatgtcactccccataactgatgtctacctggatcagattgattgtgagtcttgatgacaaatgccagctacttttggtcactggagaaaggccatatttctcaagtatgatttgactttcagtaaaataaatccacgacttggttgtacactaatggaaagacctttcaggagtaagtgttgctttgtacagtacaggtttttaatttgatccttttcagatactaagataaatacataagcatatgcattcgttttgttaaagagaaaacatttaagcataattcaacatgcacttcttgccatggctctttttgagtttcaacttgtctaatgattctgccaccccctcagggtgggttttcatttcttggggttctttttcttagcttttaagatttagtggcctatactaaggggcacttatcttgctacaagatagcatgtttcattggctacattcactctggcagatgagttacggcagattctttaatatatatattttgcttttttcctatagatggaccctcatagtgttttgacagttaaaaaggatggggggttattgaacgtctagtttctcagctgctgagctgtattttttgagctatatatcagcaaaattacccagctctcttacagaaggtgttctgttgccagatggtactctgtaggaaacaacttcttagttttcttaaatcaggatttatagtgaaatagaataacacttacatataggaggcttaggtgtctctggaaatcttggagtctcaaatatccttttctctctctgtcttcattgtatcctgttcaattaagctgataactaaatgtctacactgctattcaataactgaggggcgtattcttagcaattttcattgtactgcctgctttgtgaccagactgaaaggttcagctccaattgcaacattagcctggcaactacgaccaatcattaccaatgatttttgacccccctaattgttttttactttattgagcttattcggaaacaatgaaactccatcctgccttttcttaaaagatatttgcacaaagtgcagttgctgtttcttctataaactcatcagcattgccttaaggaggccccttaattatcgattttctactctagctaatagatctcctaatttgcagaaataccccaatgcaaggttttaacaattagaaaattacaaaaggaagtcccaaaggacccttagcttctacacatactgatggctcagcatcatacttcctgctggaagctggggaaccagacggccagggagagaatataaaacacaaaattaaatatatgggcaatgtttccttttttcccaagttttgcacttgtttcaaagcaatgtcttctcacttggattgaaaatggcactttttcactaaccgtagtgaaatattttttacatgaagtactatggtagttattttacacccacatccataacacagggaagacaccggtcaggtttcactaaaccctttgggaagatatgtgtgattagctgttacattcttccatgccttaaaatctaaacccgtgtattttaagcaaatattgattgtttttcataatatcaaaattgtcttgggctgtagttttcatacagaagattcttggagtttagaacatacctttctatgctgcctaatcatttattgttaattaaatttgagagatatagatagatagatatttgagatatatctatatatagagaaaaatatgtatatttgatatatatatatatatatatagagagagagagagagagagagagagagagagtgagagtctctcactgtcgtctgggctggagtgcaatggtgtgatcttggctcactgcaacctctgcctcctgggttcaagcgattctcctgctccagcctcctaagtagttggaattacacgcgcccaccaccacacccagctaattttttgtatttttagtagagatggaatttcaccatgttggccagcctagtctagaactcctgatctcgtgatcgtgatctgcccacctcggccgcagaaagtgatgggattacaggagtgaatcaccatgcctggccaaatttgctataattttgtgacccgtttgagaacattagcattgccagagtaccaagtattttagtaatacaacattcagttttgacatcttttaaaatgctagtttgcttgtgattaaatcccaagcttgaaaatatatgttgcatatgttagaaagctattgcacaaataaggacttagacctgttctctctctctctctctctctcttttttcttttttgtttttgctcatccccagattccctcaattttccacctagaatttgtcatattcttttttgcttaatgatcttcagcatgttccattgtccctagagaatggcattcaagaccccatgatatactcctgccactggaaacactttctctccatccctgcccacgctctcttaagagttgtggttcatagaaagtcaacattaattttttttttcttattccttcctcactttttatatagcaaggctcagcacagtgtgttatgtatagcagagactcagtaaactttggtggaacttaaaaaaaagagttgtctctctttatgacattttcattttagtaatctctgatattaaactcacatttatgctgtttagtcatgttctcctgaatggaaccccttcccctaacttttccaaacatcgaaattgctcctgcaaggatcctttcaaatattactacctctataaagttttatttctacctgtgattttatttcaccagaaaatatcattttctttcttgtattctaatagcattttatgcttgtaactgtcatggagctcatggaatttgatcatcagcatgcatttacttgcacgccttccacattggaccatgagttcctatagaaagtggcccagccttactcattcttaggtttcttttatatggcttagaaccccacacatattatagtaagtattcaataaatgctgattgaaggaactggaaccttggtgattatgtggttattgcctttattgttttgtaagtgaataaaaacaatgttgctctaagaattcatttggtgattacctcaatgtcctcatcagcccctgatagttcctctcttaggttattggtttcttgctttctattcaaatgtaatacaaacttaaaagttaatgaaacatattttcaagttggtgaggctgataggtccagaattatttcctccattttacagatacaggataaaaggctcaagtgatgcaaaccaagttataggtagaaaagcaagtacttgagttaagacctgctctactctaacccttcagagtcatttagtaatcactggaagttccactgtgaatctggtcttgtttctccatgtggtattaggtaattttatttatttatttatttatttattttagaagacacatatattcagtgtcatgatcagactaatacatttaaaaatcaacagcaagggcacaaaaaaatctacattgaaaccctttgtcagaatattctacacttttccaaagaacacaaacttaacactttccacagtacagaaacagaagcaaagtattggcctccactgtcacaggggcacagcttatccctccaaagtgtcctcccttcatgggtccaaaatgtgaagactgactgttgtaattgccaaaatcattgcagattacacaacttccaaagttgattccatcattaccaaatccataacagccatactcactactaccatatccaccaccactatggctaccatcaaagtcactgcaactactaatgtttcttccatgatcaaagttgtcattcccaccagaaccacttgcacaaccaccactaaagtttccagaaccactttgacctctttggctggatgaagcaccagccatctcttgctttgacagggttttcccaacttcacagttgtgtccattcacaggatggtatttcggaatgacaatcttatccacagaatcacggccatcaaaagttacagaagcaaagccccatttcttgccactgtcttggtcaatcattatttcaatcacatcaattttcccatactattcaaaatcatttcttaggtggcattcttcagtgttttctttgatgccaccaacaacaaatatattcttcacagttaaatgggcacctgctcattgagaaccttaatagctccctttggtcccacaactcttccattcactttgtgccaccttccatgccaccttcttcacagtggcatagatgacaaaccaaaatcccctgagtgtttggaactctcattaccaggtagtctgggagctgttccccattgctcctgaatgtctcattggttgtttcaaagctcagccctctgatgaagagcttctgcagctgttcggactttttaggagagtccgacctagacatgatggcagggggaagagagacttcaacaatgtgggcagaaagccattagggaattttagatgtcttactggtaaagtataacttttaattattttccaagctaaaggaagagtcatgtgttaatctatccctgatggaaaataaatgccttagggaacttgtcctatatagtttgggaaaagtagcttagcctttacacctactttatatcctggagaagaaattgaggtagaggtgaacttgacctactggtatcaacatttgctcccatcccgaactaaacacacaatggtaaaggtcatctgaaattgttagtttttatttattttttagtaataaaacatgtgtttattgtagaaatgttagggaacttaagaatatttaaagaattataaaatgttaattatccatagataggaattcactattaaccttttaataataaaactagctgggcatggtagctcacgcctgtaatcccagcaattttggaggccgaggtgggcggatcatgaggttaggagttcgagaccagcctggccaatacggtgaaaacctgtctttactaaaaatacaaaaattaaccaggcgtggtggcgggcgccagtaatcccagctactcgggaggctgaggcaggagaatcgcttgaacccgggaggcggaggttgcagtgagctgagatcatgcctgggcatgatactccagcccgggcaacagagcaagactccatctcaaaaaagaaaataataataataataataataatagaactataagctctggaactaggcttccaggctttaaatcttggctctgtgatttactagtttaaggacaatggtaaagttacctcatctttctaggtttaagtttacccatttatacaatggaaataatatgattgcttatatcagtgattgcttaatcttgtgatgattaagtgattttataacatagagcacttacaatagtgcctgatcacatcatatgtactcccttaactattattattattccatctccagtctttttatttttatgcacatgcttttaaaaatttcacaaccttcccttattatgcaacttttcatcctacattttccatttaagggtataacaaagcatactttacatactaaatattctttagaatatgaatttaattacattaagccatcatttgcaattatccttcatcatttgtttccaacctttgactattgtaaactatactttgataaacatttatacttatatttggatgatgtgcttgggatagatccccagaggaattactggatcaaattatataattattttaaggattttgagttatttatatttaaaaatatccttattgaggtataattcacatcctgtacagttcacacatttgaagtggacatttcagtccatcattttccatttccatcagcaatgtacaaaggttccaatttatccacatccttgtcaacacttgttattttcttcctttttttggtatagccatctaataagtgtaaagtgatatctcactgtggtttttatttagatttccctaatgattaatactattcaacattttctcaagtgctgagtcaccatttggatatctttcttgaagaaatatctgttcatgtcttttgcccattttgaaacagggttgtttacttttaaggaattatttgtaaatatttaccatagaaaacattttaattgccttatattttgtacttgtaacctcttttgctagtggaattaaagttcattagggtcttttcttcataaaatgagcaccctttatgtgccaggtactgtgctgggttacaggacacaaagtatgtaaagctttccaggtgaccacagcctagagttgtctggtttgttcctattgctgactagataaccatgttcttttctccctcctctttttttttttctctgctcaaaagctatttttttttcctaaaaagtcctactcaacttggaagcctgtcctttgccaagtataattatatggtattttatgaccctgtacagagtgtgaaatgtatattcttagcacaaactggcagcattcctaacactgtaagatgctgctaaggtatctgaaagggattatatgaaactaagcatttttaatactttggaaccagtgttgattcttccaatagtaaatttgttctgggttcctttctggtttgctctgtgccagcccccatttcagcactttcaaactacatttaggcagtagcttttcagtacaccttgaattagtcccaaaacacactggagcatggagtgataatgaaatagtataaccagagagaaagatagcatattaatagaaccacccacaagaaagaccaagtccactgaagcaaaaacgtatgttctttttatgtttaaaaatctcatcacagtctctcccattaagctttccttgcagagttttcaaactaaggagtcacatttggatctggtctgggatggagtgctctctggggaggcaagtctgctcagaatgagtaatggtgatttgagaagtggtgtgctttgtttcatatgctacaaactccacttgtcttttcagaaatcaattgtgcaatatcttcattttctttcttactgtcttctggctgtagcaagggaggagtgttgaggacatgagtagtctgctttaacttgtgaatctgcaccccttaccctgagctagagcaatagccaggtgagtgcagggtttgtctcaagtatgacattatattagggtatggcatgtgtggaataatcattaattaatggcagctagcatgcactgaacacttgctataatttaaaccaggtcctatgccagatacttgacatgaattatctcatttaatgttcccattaccctcgagaggcagagagttactatctgcattctaaagacttgactaatgtttctaagatcacaagatgatgaggtgatagaattgggattaaaaattgagcctgtctgagggcaaagcctgtgtacttgactatgtattagacaattgtcttcagagagtgcttttgttgattcagtcccactggctactaatggtattccatgatgccaatcttcttttagtgtttcgcaaatcattatctcaggccagaaagagaaactgaagaaacctttcttcaatggttaccgtgatcagttccctctccccacatctctctcctacacacacacacagacacacacacacacacacacacgtgcacacaagcaaggaatttctctcacattcaccgtggtctctcattctttctcttttcatgtgcatgatctgaaatacccaaggggagtgtccttgatggtgcgtgttctgaatggaaaacctgaaagtgccggaaactgggagtgagcccttagaagggcttgtgcatcttctcttcatacacctattgcaatttgtaatcttactctttgtgttcacttgttttaacactgttcttctttgtcctgtactgtaatctacatgaatgcagaaaccatgcctgatttgtttcccctatgacccagtaccttgtgcagtgcctagcatatggcaagtacttcataaatccgccttgagtgaaggaaatcaataaatgaatgtgtgtgttctctctgagaggatacaacacaggaattcacatccaggcttaaaataattattaatatttcctacgcatacacgagatgctgaagtggacagaaagtttcaggtgacaagatcagaaaagaaatgtgagtgtgactcatgggtctgtcttttcatgctgttgaacatatttacacaggaagaatgaatttcttccctcggtaagtccagagactgtgcaaccacgtggacttggttctttctgaggtgtgccagtgcccctcaaggcagtggtgtttgatgggctttgtacacatggcctcctgcccacaccttccgagcttcccaaatcagtgctgcctaaatgcctttgtccaaaaatgtgtggatctctgtcttttgcagaggactgcatgtgtgttctacaagcttcttttagctcagaaggaataaatatgttgctagaacttagggagtttcaggtgacttgaatactgatcagaagtaggcaagatacaatgggagtcttatgtatataaaactcagtaaattgaaataatcgcataaagctacctcccatgaaagcatattctgattgaacatttcaggactggctgacaaggtgttgacctgcaggtcttaaagtggttgacggggagatgcagctagccatttgagggcttggggctactgcaatctcttagagatttggttttctaagctcacctcttccgacccgaattatgaattctttcttcccttcctttttaccgtcttcctttccttttccttcctttccttttcttcttctcttttgtccctttctttcttctaccattcaacacattttcttcagtgccaacaaaacttggtgttaggcactggtcaaaaaaaaaaaaaaatacagagtccctgttctcataggacttagaatccattggggatactaaggatgaaataaatcatcatagaaataattgcagattaccagacgttaggaagggtagtggcggggacagggtggggggaggtggggatggttaatggatgcaaaaataaaaagaatgaattataccaggtatttgatagaacaaggtgactaccgtcaaaacaatttaattgtgcattttaaaataactaaaagagtataattgggctgtttgtaacacaaacgaataacacttgaggggatggatacctaattttctgtgataggatcatgcattttatgtctgtatcaaaatatctcatgtacctcgtagtatacctactatatacccagaaaaattaaaaattaaaaactaaagaaagaaataattgcaaaatgtaataatgtctttgaggggaaaataaaaacttcagtgaaatactctaagaggggtttgatgcagagctgggggatgtgggaaagtagagataggaaagttgaggagggagggatgggttacagtttgccaaggacagaattacttgagagggtgggagcaggacacacatgtcagggcctctggaacaggaagaggttggtttatggcagaaattgaaagaatgctctcatacacagctcactttcctccttgctttttgtctgcatagcattattcaatatgtagcataatataagttgaaatcatatatcacctttgtggtcttctcccaccagaaatcaggcattatgaaggcagaagggcagaggtatttgtcgtgtgtgtgtgtgtgtgtgtgtgtgtgtgtgtgtgtgtgtgtgtttgacttttgtatttttgctgccgtattcctggtacctggaatagcacttggcagacaaatgtatgcaaagttattcaaatccagtgggaccagaccacagtgaggacagtcaacaagggagggcagggaatgagcgctgtcagggagggtggagtccaggtcactggggttgctgtaagcatgttctgaatttatatgttatccaaagtataatagaaaacactgcattaaaccagacatgtcatatagttaccatcttttctttttctaaaagagaattattgcaatttatttccttattaagtcaatttagattaggttgcactaaaaaaaaaaagcgatattgtttcagacactaggatctactctcttacacagtgtgattagaaaccagggaggatggggttagaagggtattgccaatgcggtaaagagctgaggagaaatcagcttctgagtgttatttttctgtcttcttcatgaatggactttttttttttttttttttttttaatgagaggcatccaatttcaagcttttggaaagcattggctagtttattttttgtgtgtatattaaatgatcatatatagttatttatttatatacctgccctttggttaatatccattaacacggagcactagtcagatagagtaggttttttccttattttgcacatgaataaattaagaataaggttgggggaaggaaactaacatctgagtgtctaccgagtgtctgatgttttacatatttgtctcatttaatcctcatgaaacgctttgagaaaggcgagcattatctcccttaattggacaagagagtgaatcccaaattggttaactaactggtccagtgtcataggacaagtaaaaggaagagtcaggatgagaggccaggtgtttctagtgcttaaaatccatgatttttacttctaggggattttttaacaacttgtgggaacagcagtgctaataaggaatgcaagtatgtatggaacctgggtcttctgactcctgaaccattactgctttttttccactatgagataatacatcagttactgcttctaattaattctccaagtgccgagccaacttcataagcgctagggcaatgcaggagagagagcactcaaacaaaactcagtgtttgtagcacgccatcccagatgtacagtgcggcctttcaccttcttattcttaatgaatgattttctaatctgtaaaagcaggcccctggataagatgctctctggggtcccttttatctctagtattcaatgaaatgtaaagttagctgcatttgatgcatgaaatatattcagttttggaaacagctgaggaaattgccatggccaggccggtctgaatttagggcttgtgtccttagcgctacaccgtactgacagtagccatatgtgccttgatttctatctggaaagctcccaaaatctagcaggtttgattgtatactattcaactaacagccttaaaatatgtgtgagatgagcctttccctcctggtctattccactggaccctttttggaggtcagtgcttcacataatacatgctctacgagaagtcaatctcagcttgcttattggacccattttccaatgtaatataaatagataacttgatcacttcctgtttttgtgcctcctcagacacttggataagactatggaaattgtctactaatgagtatacatatcttgaaaaatcatcgctttgagataatttttttaaaaaaattatgtggatagtacttttaattaggaaaaatacacatttataaatctaattctctaaccacttaagagttgattgaaacctaggcacattctcaatgtcaataaaaataaggatttaataaaagagacctgttaaatgcttcaactccttaaaatagatcagatatacatagaatatttcaatgatctcatatcttactattatactgagaattaaaccattacaaagatattgacactttgggccttcaaaacaataatattctctcaagccaaggttttaggttctgatttaacaagttgattattggtctgaaaacaagacctggtttcaccccagggtgattcaatttcaggtctacactggttggtctggctcttcttttagtaaaagttcaagagcggttttgtgaggcttcctgaagctattccttttcttgtgccttcacttccttactccataatccgttaggttttgaccacggataccgtagacagctattcatttcattataccttattaatacctcatcataattagtggactcatatagagatgtcctctcctaagatggcatagtcaatgctcttttgtagatatttggttaaatttgtagatatttggttaaactactgtattgcaatccaccactaaacactgtttctgtctgattatttcatgtgatcatctctgctgaccactttctggtttataatacagttcttggttttctagtccagcttggctcgctcatgcctcagatattgtttttaaaggcaattggagccttctttgtgagtttaatcaagctaatttttttttctctctctctccagagtttgtcattttatgaattacatatttagttaattcaacatgagctttgtggttgaaaataaatatacatttaaaaattcattttattagatagacctttgtcttaatatacctttcttattggaaattttgatttattatagaataaagatgctttctgtcttcatggaatcatcttgatattatgaagttggcatattttttgaggggatgctgttttcctgggagagagctcagatttctcttatgagctaagagacaaaattgtttcctgttacctcaaatgactaaactttgtggtgataaaagatctctatttaggcttttacctaatacctgtttaccacaattaaactttattttcatttttgaatattaacctcaagagactaaaaaataaaacaaaccaactataacgaagactggagttctgggatttgatatattttggggaacaattaggagggtttgagaggaaaaagcaaacaaacaaaactatagccatcaaggagaacctataattaagaaaaactgaaggcgtggagtgtggaccaggttacagtaaattctgaactaggcttttactcatggcagtggttgccatcataaaagtgttaagtctttacatttttctttgacctcacattgccacaggagtgttattccagttaattttgtaaaattaaattatattagaatatactcatttaaaatataaacaagcatctcaggacgttttgtgtagaaagacaaattcttggtagattgcttgattgattagcttcctaaattacattttaaaatcagtcttattttctgctacatgtattcgttaccactgcaatgattaaacatagtcaggaaaaattttgggatttcccaaaatcttttgtcaaattgtctttcttacggaggtaataaaattcctattccctataaaactttatgataacagaattaggttcaacatttattagattggtagatttctatcaatctgatatttatttatttaattaattagattaacaacaataacagttatgacagtctggttttctttaaaataaatactatcacatagaagatttaaagctcattctggttaatcacctcattaatcaaatacttgaagatgagaatagcaaggcaaagattaaacatgggaatttctttaatgaaatatgaaaattaatgaatattgaggaaagctattctatttaaatttcagcgtgggtatgattattcttttttaatcagttgggtttatttttatttaggaattcctagggaaactggtttataaagaagcaaatatacaagaagaaaaggtagccagagatgctatcattcttatgatgtcctgtgccaccccctccttcatcttgttttcatcttgggttctgtccacacgtgttcttttttgaccaaatccactgtgtggatctatctcctggcacatacactttaattaccggatctgagatatggtgttgcggcaccatcagagtgcacacaaggtatgggattcaaaaatggaccagattcagctatgttctggcagctgtattgaagaatttacagaaccagaattaatgtctagctcactgcagtattagagaaatcctttcgccgctggagtcatcagttctctcatctttataatgaaatgtttgaagtggtaaaaagtcatttccaggtggaatgttcttagtttctaatgtaatgcttttatcattttgtccgtgcacactggggtgcatttccttgaatggaactgagagtgccaatttgattctatgcttgaatcttaccactgaaattttctttaacctcaatataatccttttttttttcttcaaggataagtaaactgatgtttgtcagacttaaaggagacaatgaccagggtaaaatgaaacaaaacagaacaataaaacagagatatgttatataagttatctactggtgtgtaataaactacttccacatgtggtgccttttgaaacatcacacatttatttccttcaatactgctggacggtggggtggatcctctattggctttgcctgggccccttcatgcagctgcattcagccacagggccaattagactggaaagtcctagaggccccactcccatgtctggtagttggtgttgggtgttcagatgaggctaaggctttattgcctgcagtgttagcacagaaggtgaagacataagccacaagtcttcttgaagcttagattccagcatttgcatagtgtcacttctacattctattcattaaagccagtcaaaggacagcccaaattcaatgtttggtgaagtagactctgcctcttggtggaaagagtgatgaagaatttgtggccatgcttaatgtatcacacacaagctatcattttcttcctgcaaaactcatgccacacgatcagttaaaacacttctcaagcaaaattgttgtgcagccttagaatccttttaaatacagtgctccaggcagccaccacaaatcagtcagaactgccacaagaaatgaaatgtttctgccatctggactctgcagtgagttgttggtagcgcctggatggaaaattcaggatttctggctctcaacccagcatcttttctgtccccattagtctgtctcctcacttctagtcagttcattaacatttattaggttatattagaaaagtaatttacttctataagtaaagtttataaaaatgtgcatccttttttgaacaataacttcatgtatgtgtgttttagtagactaacataaaccactgaataacaaactcacagaagtgagacatgaattaagaattaccaatttgtataccatcttattcaatgctaaacttgcatcagtccaagtgatcacatttggatgaaaatggggtactattgtcttgatgtgtctcttgatgtgattcaatgggaagtatgcaactcccatgtaccattcttgccaaatctactcattaaggaaccatcagagaagtacggagcatgagctatttcacgaaacagctaacctgaaatatttaaaaagtgtcaatttcatgaaagacaagacaaaagtgaaggactgttctagattaaagaaaactaaagggacatagcaacaaaatgtaatttttgattttatattggattttgatttttaaaaagaaaatttaaatgggataattgggcactctacgttagattgtatcaatgttaaggttgcatcaatgttaagttgtatattattgttgtatcactgtattgtatcaccaatgttaagtttctttatgtgattaatagtttggctgttatgcaggagaatgtccttatttttggagaaacatgatatgtttagaaggaaaagtcaagatatttgcaacttattttcaaataatcagcaaaaaatgaagtaatgtgtaggtatacatatgtatattttttatttagagagagagagagaaaaaagcaaatatggcaaaaatattaattgacaaatctaggtggtgggtcacatcttccttgtacttttaactttcttgaaggttagaaaatttttagattgcaaagttgggtaaaaaaaaacaccaactcattgtattttatggctgagaccgtgcctgactttgagttattatgataaagtatccaatgtcaaatatctgattaaattctaagggattcaattgcaaaatgctgcatttctaaaaaggcacattttctttacttacaggcttacacaaggagaaaaatctcaagtacaggcagttgtttgaatatggtaattgatagaaaagttgaccaagtagaaaactgtaatatgtcataataaaagatgttgagatatgcctgtatgttatgtggcattatggttcacagagttatatattatgccagaagccttggatgacaagggttccatctcattctgctcagattctgtgggtaactttgagcaagtcattttaatttgtgcaaaatgtggtccttttaaaatggagaagctaattctggtttatatcatatggctgtgtaaagattaatttcctaactgcaaagggtggtaaacaacttttcccatttaaatattcagtcttggaaacacatggaggattgttgtgttgaggagctcagataatgctcactatttctgtgcctttatagagatttttcttacaggattatgtgcaaggttttatccttttttcataagctacaatactaagagaaatctaccagttttaaaaaaatctattttcctccaagactcttaatttcattctggaaataagattggatttgggacaggaggccttggtagaaaaatgtacccctaacaatgtcatctatggaaaactgtgccaactctcacctctggaagagtgagtggttgagagcatgtgaaataactcaatagccatttcaaactatgtttaatcatttataaaaatacagatctttatagagaaggctgagtcttctgtggactagaatagaagaggtgagacatgatctgggtgtaacaggatgggtacagcactgggtagatggaggagacatgagaaaaagaagtcccatgtgggtgttcattaggtgcatagacttatgcaggagcaagtcttgtgtgctgacactaaggagatgtaactggagtcctgtctgactgttgaagcaaactgagcaatattattggataggtgcaatgaaagcagtgcaaaactgattttgagttaatgtctggtgagcaacagggaagaaccagtggtggctgaataggaaattgacagtagcatgattaaattggaaactaagtaatgcatgacaaaattatgcaggcaaagaccagcacagaactttcccttaggaatcttggatagaatgagtactcaggtctgaaaaactggctctggcaaagcactgctagggagtgtaagagagggagtaagttattatggaggtagtaggtaaggagggctgtggttgattagtgatgtctgcctagtgcagggatggggccatataatcctggatgtcacatacagtatttgccattcctgaatgagaggaaagaagtaaaccaaaaatcccagcctatgcaatgaaaaaaataattgaaaactagtttgggagaaagttgatgatggagttttacttatacttcaatctgaggacagtacagtaagtacatttgggaacattgtcacttataattgaagtgagcttactagttagagagttcgtcagactggagggaagtaaaacttctataagggtcaaatgaataaacaaatttgctttatcaagctgcttatttatacatccatgtgttttcttatgatgagtcagtcccatgcaccctagtgtaatctagttgccatttgcggtatatagttgtcacgtattactgccagccagctggcagctgcattgccctactcattagtgattaagatggacaaaagtatataacattcttatttaatccacagtgatttttaagtaactataaacaagagttcttgaaacttgaaacagaaagaaaatagtacttacttttgatatgtcacacttgcaacttgtgcctggaattgagttcatcttccatctttagctaacgtggtctgtggccagagccacacttcctcgctcttggacttgattcccataactgaaaaagggaaggtgttgcctcaactagggatggcaagtgtgtactgcttctctttcaacttgcatctatgataaatgaagaactcttcccctcttagcacttgacaccaattgccttgtggcctggaaccttttgttgttcatacttcagcaaatctcaaaagaagaaaataatattaacaagaatagctatggctaacatttgttgagctttttctgtgtgtcaggctttatgctaagcaccttatgtgtgatactttaagctctatgtaattgtaaacgttttcaattaaggggcgggaataatcaaaggaggatagattttcacgttcaaactgtgagatggggcattgacattaattgaaataaattaaggaaatggccagaagtgtaaaagaaaacaaaataagagtcatttgttcatttccaagacctagcctatacctagtttggtagaacatcaccaattcctttttgattgggtaaattaagggtgaagaaacttgctgtattaggttcttcccctggagactggcctacatccaaagctggcttctgtttcttgatattcaagctggggctgaaagattaatccaagattgagtccagctcagggattcaacctctttcagtactattggatttaatatctgctgacctgttaatcattttattctatagttattcacttgcttctctcagataggaatcttttaattcctaaaacatggcccaattgattattcataggttgcattttttccaatacaaaacctttagctacaaaccatacttctttcaactgttaaataaaaagatgtttcagaaagcactttctatcagtattcatttatcattatttaacaataaagcttaactaggccttgagtatatatcaagttgaagagcagctggtaaagctatgatcacttagtggcatgctcacgggtactaatagggatattatgcctgcattaggactataccctgcctgaaagaatataggtcagttatttaaatgatttacacagagtttgtccctttaataccttgcaaagagtcaggcagagatagtattagtgagttctggcagatgggatacaaatttattacgacaagtcaattttctttttcgtttctaagactactatataataaatgggcctccacagtatattaaattaatggactttatttttcatgtgaaagaagaagaaaaatcttatgaagtgttaccctagaattccaggatagtctttgagtttctggctcataatgtagcttctgaaaagcaattataactttcatcttaaacttctttcaatgacaagtctcgctagagggactgtcactggagtctttctttagagaatgtcttttcttctcaggggaaatgatactcagcagcattcaaaacagttctaggcaaaattcagctatggaaattttatccagccccgacttgcaatgattgcatccatatatgtcaatgacattcccttccattgagccttcccctacttcttgtgtttcccacattacataaacacaaatacattttgctattatccatctcatgactgttgatacccagatatagagagattacatttttagttaagatatttcctcgaaggctggtcgagtccaaaactggcttcccatttcttgatagtcaagttgaagcacagagattaatccatctgctaatatggccctacttgtgttggagtcttcgtcaacagacaccatacctgctgtgtctgttcatgacctgcttgcctcatcatagcccacactgtcaagccaatgtgccacacagtgtagtcacaaggattgctgtgacagtgtctgttcacctccatttattcccagcaaccaaggcagacccttgggctgtactttgtgtcagtctgattatcttagtggctacagacgtggagcagagagtgaaatttttcaaatgttgattgagaaagaaccacttagtgcagtcagacataagtgcgcagataagaaattcccagacagtgggagcacagcacattctgtggttattactattattctctaatcagtatgattctctgggcacacttatagaagttcattctttagtggaatttcaagaagaaaaatattttaaaaagacaacagctctatcttctctgtataaagaaaattcattgacaaaggttctatacaccaatgttactgaaaagccattataggcccaggtgcagtcgctcactcctgtaatctcagcactttgggaggtcgaggtgggtctatcacctgaggtcaggagttagagaccagcctacccaacctggtgaatccccgtctctactaaaaatacaaaaacactagcctggcttggtggtgcacacctgtagtcccagctactcaggaggctggggcaggagaattgcttgaacctgggaggcagaggtcgcagtgagccaagatcatgccactttactccagcctgggcaacagagagggactatgtctcaaaaaaaaaaaataaataaaataaaaataaatagccattatattctctccattattcaaacatgaccctactgaaacgtatctgcatcaacaccactttaataccgtgataacattccttatatgagagtgaagatataaataataagtggagaggactctacttttagaagggaaatgggtgactagtgttagctttattgtacatataatgctccattgacatatgtcaaccaactccattttcagtgcccaattgaaagttgtatagccaccaccttttcaagacaatagtattaataaattccagtatggtttactaactgccaaaggtaccatttaatacatctttcattaaaaaatgtcaggccaagccgggcacagtgaatcatgcctgtaatcccagcactttgagaggccgaggcaggtggatcacctgaggtcaggggttcgagaccagcctggccaatatggtgaaacccctgtctctactaaaaattcaaaaattagctgggcatggtggcacatgcctgtagccccagctacttgggaggctgaagcaggaatattgcttgaacccaggtagtgaaagttgcagtgggcagagattgcactacgtcactccaacctgggtgacagagtgagactccatctcaaaaacaaacaaacaaataaatccaggccattaattgttttatttctggatcatcaaatagaaatatatctacccagaagaagaaacatgttttccaaacaaaatcaagcattatgtgtaaaatcaagcatgaccctgcaggaaggtctggccagcacagtggcagcaccagtcaggctctataattatttacttgtgtgtgaatcctagtgccactttttaccccctcccacagacctgcaatgattaacaaactgtgatgattagaaaataaattacaggtccttccataaattatatctggaaacctgcctagattctttgtataagaaacacaaatttaatttctatcttcatacaagcatagaatttacttgggtgaggactaatggtagatgttgtttataaagacagagaaaagaaaatgtgattatcagtgataaaaataaatccatgttgtgttggtctgagtttatttaggaaaaaatatttacatagaaaaccattagtgttgatttgttcagacagcagtatgagagaaaacgtgtttctctttacacttatggtgtctctagcagatggtaaactccaaatagttatttcacattacgaagaaatgtttaatgagtatctgataggagtgattattgcagggtttaataatcaatatcgctgcaactgagtctatttaaaaatctatttacatgactgtgtataaccctctgagtgaaccaatttcactagcatttttgactacctactacatgatatgaactatataactgcgtgtgagattgcagatctactggatatataaacttaggcctgtcataaacataagtggacccttatttaactttcatctgtcaattcttttttaaaatagtgttgtattttgttctttttttttttttccggaagagatgagtataaagttgagaagttggtggattttttgctattattcagtaatgcaatcatatgatatatttggagaaatgctatgatcctgatagtattatggaaggatgcatgatgctttcacctattttcaaggatgtagattataaataaattgatggtgtatctccttagaatcttcttcattctaatttttccctttaactcattccttgaaatttttcaaaataagtgtttaaaatgataaagaatacacactcaggaataattctgcacttaaaagggggaaaatgccccttggcatattcttcaaaatacctatagtaaaaatcaagttagtttaggtttcattcttataaaatgtgtttcctttcacttaactttcttgtgacacaattgctgaaaatatactgatgttggcaacttcccaccaaaaagaataaacctcctttctgtcacccacttgcactaaaaattaaaagatgaacagggaccacatatttgcctatgctaattataaaccattccaacctggagggtgggaaggaatcttaactagcgacctttgagtggttgcttggttcatgtaaccatgtcaactaggtacttctgctttgttcatgtactttgtgtttttcagtcgaggtggtccactcacattgcttctcaatttccctaacccattcaccctcccctaacagctaagatgcttcattctccatcaattctacacagtttttcctactaagggagaattctttttgcccttttctgtgctcatatagtgcttttgtagcatgcactattatcactggctacttttcattgtaaatgtttgttttgctttcttactccgggactgcaaaattgcacaaattcagcaatacgatcgtctgtttcttggaactctgaggatgaggactgttactcatctttatatatccagaatttagaacagtgattggcacactgtgggtgttgaggaaatgtttcacaaatgaataaatagcgagtagtctgaagtagccagaagtattttaggaagagacttctggtgggaatgagtatgtgtggtgcctgggcagaggaagagaccacggacagcagtttggataggcgattactgtaaaagataatgaagggtttgccaaagtggtgatgatgggaatggagaggtggaggcagatgcaggagatatttatttcctaggctttttcttaaagctcttttcccctccctcttaatgttatgatttgcttaggtgaactaaacttagtcccactttttggcctgttttaatgcacctattttgaataacaaatgatgacaatgaacaaaagaacacaaggttgaagtagaaaatttaaatgttttagcaagaaaacaaaaacaaaaaccaccaatcatctcatttgtgataaacaaacacagttaacatttggttgatagcctccggggctttttattggtaagaatttggagacaatctggtagaatggttaccatgacagactcaactgcattcaaattctggctctgatatctgctgtgaaatatttggcaaaacgtgctctatttctctcatgtgtacagtggggattataatgattgtacttagttcatgggattgttctgaggattgcggaagctgataaaattaaagcactaagttcagttcctggaacataggacataaatatatatcctattcatatatatataacaaccatatcaacgtataaatatggtttataaactaaactttcttccttcttaatggtataaataagacctttccatatttatccatagcatccatactaatgattgcatagcattcatttgtatgacaaaccctcattttcttaatatttttatcgtattttatttttagaaatgtataattctcatttcatagtttaatcttcatgcaaatctaagactatttctctatgattaattttcagaagattagtcactgggttaaatagtatgaatatttttcaggtgtttgatacaaatgccagactgccttcgagaataccatgctttctagcaccaatacagtgtttgttgttgttgctgtttgttctgctttttaatctgggccagtttaataggtgagaagaaagattcctattttaatttacatttatttgagtactggaagatgagcatctttaatttttttaggtctttaggatttttttgtgaacagcctagctgtatctttttccaacttttctattggtacgtgcatcttttttattgacgtgttagaaatgtaatcattgctaaattatttttggagggtgatgaagttcaaaggatctaaaatgactgccttatatatttgatatgttcagtttatcaacatgacattaacaatcttttgtaatttttgaatgacagaaaggtagttttatatggtttaacctaacaatttaaggctttgtgaaattgtcaggcaattcatacattgcctcagacttacaccttaattttgtgatttggcttatgcaactctattagactattttcaattatatgtttgcttgaaaaattggtgttattgagcacttctaaatcactgggtactgtctccttgcctctgtggacaaaagatttgggatacagttgccaaaatgtaggactaaatttaattttccaacaacttgtgaatggcattatcctactattgcactgtagactacaaacattttaatttacagagctggtagagctttactttgtaaacacttatgttgtctaaggaactttaatacattatcacatttgattcttctttaatgtaatttttgattttcgatttttgtgaatacacagtaggtatatatatttatggggtatatgagatgttttgatacaggcatgcaatgtgaaatagtcacatcatgaagaagagagtatccaccccctcaagccttgatcatttgtgttagcaataatccaaatatactctttcagttattttaaaatgtgcaattaaattattattggctacagtgacctggttgtgctagcaaattgtaggtcttatacattcttcgaaactatttttttggaacccattaaccttctccacctcccacatcaaccctccactacccttcccagcctctggtaaccatccttctactctctgtgtccactgaattctcatttgattctgacaataacttggtgaaggacacagggcaacccccctgttattatagaaaaaaacactgaggctccgaggagttaagtgatgtccagaggcttgacagctaataaacagcagagtctggcctagcatccaagtcttctgacttcaagtctagtgcttctttcctgtattccttgatcattgaatcacttgacctggaaatatgtgctttcacctttgtcagaaaaataaagccactgggatttgaatcctggtgagaagcaataatgtgaagcttccaaattccattgctctgtttttattgtgtctgtcttattttagaaacatatgttttaggatgtactgtgtaaatgccagtttcaattttacaatggaaagtgaaaaacagtggcatgagaaaatgtatatttcacttatatgtatggctttcccaaggacatgtttcactttcagtggatttcacagtttttttgttattttattttatttttttagtgacatagccttggagtaatgttaagttactcataaagaagggattttaatgaatatctgtggaagatactcttatttattgctggtgcctttctttcactaactaaatgttatagccagtctctggagcacatcatgatactgaaccagtttttcatcaccagtttccattctcttttgagctcccacacccagaaaccatcatgcagaggatcaatggccttgtagtgtaatctgttctttttctgtgagttactgttccagtctggttcctcctgtgctgaattacttctttcatgaaataaccaaaatgaggtgggggagaggattgggcaggatctcagtattttttgaaatgttttgaagagtaattgaaaatttaaacaaaatcaaagagagaaagcgtggccaagctgtgtgtgagttattttgaatttacaaaactgttgtacacatgtttttaaatatatatccagttaagaaatagtgcctgcaagaacagattagaactgggatgtaaatgaaaaatctatatatggataaaaatcttctatattatgaggatatacttggttttggacaaaaaaataaaaaataaaaaataaacctttccttcagaaatctctcagaagggaacaatttctctggggaccattcatttcatttgtcaacgattcacttctacctgctgaattacagagtcctgattagctttcatactttataagaatcgatactttacttgtcaaacatgattcaacatttgtcaattgtacttggaaatacaaacaattcaaaatatgtctcaatctcagaggatgtccaacttctattattttaatttttaattttagtatttaaaattttttttaacttttaatttttgtgtgtgcatagtattaagtgtatatatttgtagagtacatgagatacttcgatataggcatataatgcataataatcacatcatgataaatggaataaataacccctcaagcatttatcctttgtgttacaaacaatccaattatatacttttagttattttaaaatatacaattaattatcattaactataccctatttttattaataatgctataccatagtattattttattaataacactataccgtagtattattttattaatagcactataccatagtattactttattaatagcactatactgtagtattactttattaatagcagtatgctgtagtgttattttattaatagcactataccatagtattattttattaatagcactgtactgtagtattattttattaatagcactataccatagtatcattttattaatagcactataccgtagtatcattttattaatagcgctataccgtagtatcattttattaatagcgctataccgtagtattttattaatagtgctataccgtagtgtcattttgttaatagcactataccgtagtgtcattttattaatggcactataccgtagcatcactttattaatggcactataccatagcatcactttattaatggcactataccatagcatcactttattaatggcactataccgtagcatcactttattaatggcactataccatagtattattttattaatggcacgataccatagtattattttattaatagcactataccatagtattattttattaatagcactatactgtagtatcattttattaatagcactataccatagtatcattttattaatagcactatgccatagtattattttattaataacattatcagatttcctaaaatatgtatagcttttcatacctaaatttctacattatggtattaaaagctatacatattttaggaaatctgatcataaaatgcatgtagaaaggtctgtgaggaaacatttaatactggtacttatattcaggtcaacatctgggtaaaaatgggactataagaataatatacatatattctctttgtgattagttgaaagctagatcaccaaatttaaaaggatggattcacttgtaaataactttgagtgtgtgtctttgagctttttatggctcagttctctatgtaaaggtatttgaaaaatgttagcatctccttatatcggtaatgtttgtagcaattaaaatactatgttaatgcagagtaacatagaaaggttgcttgcatttcaacctttgtagtttggaaaccatttagaaatgtatttccttatccactttgctattatggagctaagtgcttggaatattatttgaagtgagatttctatgaaataaaatgaaacacaacggaaatgtgtatttttatatttgcctttcaaccgataatacagcatctccatgcggattgaatccaagcctgtaacacagtgaagcctcctattagcaacagttctgtgaggctctttgctgagggtctgcctgtgtgccattccttcatgacagccatcctcctttgatgacaatgttccttttattgtgtttatgaacttgttaagaattgtaggaaccatgtttggagatgacactgtttctacattaaacgtttgaactttaaatataaatacaagcagaattgaagctatgaaattggtctgccctactgtgtctattatattgggagggaaagagaattgtagaagtaggaggttgtaagaaggaaagattaattgtttaattacagctgaataggagaataaaggtaacaggctcattgcataatatctaataatatccaaccccaacacacacacacgatagaacaacattgtttttgcccaaaattactattttacagaaaagatttataattacagagctaaaaagtaacattctggaaagattaatatgcatatagcaccaacaatgttgtcaaacttaaactgagttttcaccgtcctgataaattgatagaagctgttcttatccaccctaatcaaagttactttttctgtttctttataaatatatgtattcaaatgaaaatcatagtcctagtttgctctctgatcccagtttaatgaaggtagtcaggaaaggtcttttgaggaggtgctatttgaactgagtcctgatgggactaccgtgggaaggaggtgtccatgctgagttggagaatggctttcaaagcagaaggaatggaaaatgcaaaagccctcagagggagtgagcttgctatggggatgggtgagagaggttaaaaagagtgggaatgaggtgaggttggagaattctgcagaaggcagattttgctggaccttgaagactatgatatggaatttggatttttaattacaaggagaacccatggaatgtttgaagaaggaaagtgacatctaatgttcattttagaaggattatccttgtttttctgtgtagaaagaaacagaaaacaggagagacctttgcagtcatttgagcaaaatatactggttcagttatgtattcatttgtccagtcaacaaaaattcactggagtcccaccatatgccaaggaactgctgtaagtcctggggataccatggttattaaggtaaggatcttactctcatggagttttgactagtaggaggttcagtagtgttaagtcccatgaagacaatacaggtaattcaatggaatgggagtatctaattacattgagtgtcagggtcatggtggatcctgaatgactacaggaagccaagcatgagaaaatctccagaaagaacttcaacccaagggaagcacgagtgcaaagggcctaagatgagagcacgccaggcataaaacaacaacattgtgtctggaggattgagtgacggcggcgtgggcgggggaagtatctggcaactagagggaatcagctgcagcctcattagctgggtgaagtgactttctgtgagactgttgggcaaatgggcatggagagagagaaagagataaagattgaagaggagtttatggtgctgtgtcaactattaatgtttccttgggactagcacaggatgtatccacctggttaggagccccacactcctcaggccgtcatgtataaagcagttggctcatgaacttcatttttgtcaaattcctgttatcttatttaaatggtagtactggcttttagcattattgttattttgttttaaaaaaaacattcttaatgataattgtcaggaattgattttctgctcactactttactaaattctaaaatgactattgcttagaggcagataaaatatcttgttctttaagaacaacgtcgagctatatacattgggaatatccctcacactgtttaaaaccatattgctttaagtggtgtataatgcaacatttattgaactatttgaaagtccctaatgtgcagattcacgtgaaattaccccatgtgtctagtttgcaccacttaacatccttttaatggaagcaggtggaaaatgtgaaaaaaaaaatgactaaaatggctgtcttgcctattgtttgagcatgtagttgttctgaccagaaagtgaaaattattgaaaaggaaagttgttttttattagcttgaagacctgttccagaactgttattaaagtggatgctaagtggagtatgtgacatttgcttcatatgcacagtggatgattgattccctcagcctaactgatagagtattttttctcctgaccttggtgcaattacattatagttgcaattttcaacattatattttaatagaatttttgaatctctttgttattaataaagttaaatataatcagaaatgaaaatctctgctgaaatattcaccttgatacacttccactttgggctgcttccagttcccgtcattgctttgcccagagtaagcaataaatgcacatttgttggattggatgggcactcttcccccacgattattccatctcaaaaagaccaaggtgtttttcttcaaatggaaaagtcttctaagcaacaccctcgaaatatgaaatcagcaacaaaattcattacttgagatttttcatttagagaaatgatcataatgacatgctgtgttcacaagtgagattttctgtctttaagctcttaaagtatagtttgcctttaaattgcctccttttctaaatcaaacacagattaaacacccacataattacttttcggatagtttctttgccactgcatggatgtggaatgtgttgaaaatttgtagttattattgtttgaattttaagagctaaaataataaaacagttatgaaaacaaaaatcacctacaatctattgaggtaatatatggtgtggttcctttcagtcttttttctttgcgtatattatttgaacttaatataagaagttttgaagatgagtgaatgtatgccaatatttgctcagaacaaaagacaggcagatttagttggcagattattcatatttagggtgatacttaactggtattccaaacatatttttacagtagaataatatcactacactgaattaactgtccaaaatatagctaaaatttttttaaaagcttcctcaaaggttttctctgtaaaaaaggtcttctttgtctgctcttgatggttctagttagcaacatgagagagagaatatgcttacacaaattaaatgaaggccttaaaaagcacagagtagagatttaattaaagactgttttccatataaatttgtgctgaaaaggaaatgttggttgcttaggatgcacattattttaatgctgggagtcagcattgggtagtggttagaaacagacatggtggtcacaccccaccagctccccgtttgttagcccagtggcatggggcaaattacttaacctctttcagagtccctataaaacaacctgtagtaatatctgcctcatatgattctgttaaggaataaattaaacaatgcttgccttgcagttttagggacatgagaaaaattaataaaaataaccatcacacaggactgaatgtcttccgatcaggccaggtgtatctcatcccataactgttaatcaattgtagaacatgttctctaagcaggacagaaagttgagaaagagctaaaaatatcttaggattccatgtttataaaagaaaaagtcaaatgtccctgaatattgagtaatacatttctcattgcttaatattaggagaatgtctagaaacactgtttcagaattttttcctttttatttacatccagaaattacataaagcaaaaatgtttttgttattccacaaaggataatatgaatttcaagtaatttattgctttcagttgttttcagatctgtttaaatgtgcttattttttccgcggttgctaagttattgtagttggacttgatcgtctctctgggaatgatttcttcttgagcattattttctctgctcagatgattccaccttctccaccactccgccaccaacagacttctgatattttcttgactaatggaggtgtgatcattttctcttttgaccttataaaataatgagagctgctggagtgccctttgagttaaatcaatagaaagtgcttcatgtataatatctcattaatagagatggctaatggcaaatgtgggacagtttatgcagctgacaagcaaagcacctgccagtatttaaggaatggatgacctgtgaccaccgagacacttgagaaaaagtacaacttccgtatctggtggaaatctgctcctaccctcctttgcaagagaggatattgtgtctggcttttctttggttcatagctgtgccgcttcttttttccagatacattttaagggtttcagtgtgccccatggtgggttccctgggaaaaacactctgagacagatatttgagtgcaggaagtttatctcaagagagagaaagaaacaggattgggcagaaggaaaagttgagctttgctatagttgccacgaggccctcagctggtgtcacctctgaggccatctgcctctgtgatggtccttcagagctctcaagattgaggcagggaagctcagccctcgtgccccagcatcgaccaagttattggatgttggttgtgttagggttagggcataatcttaggcaaagcagctctcttcagctaaggttggatcccggagagaaactcggctgtaagctgttggcagccaacccttctggcagctgagacatctcctgtcccatccattcctccatcctgatgcggggatctgaatgtcccaccaccacacctactacgcagtgcaacatggaggagttggccttaaatttccactgaactctaaaaatcttttaagactctgatgttagtagcagaaaatagcaaatacatggtatcatcatcatcatcatcatcttcatcatcatcatttttaagtttaaaaatacatgtaatactgaggttgtttttgttgttttgtctacagataatagaaaaaaaatgtgtgagagagaggtttttggtcttatttgtcaaacgttttcattgaattattttattccagtttagttttgctgttggaacttaaagttaagaagccttgacttctgtgtcatatgtttcccgtagattatttggaaacaggaccacatttgaagttactgggaatattaggcccttctctggggaaacactacctttcttcatggatgtttggttatgggacatagtactttctaaatgttgtgcacctacccccaacacacagaccacctgatcctagtgatgagtgtttgggatatacctgtcactttcagggctgggacaagggtagggcaaatgaaatacttactttgggtgcaagattcaaaaagtaatccaaaaaattttcaaaaattaatatatttaatgcaatattttaaaatgaaaattaatgcaaaattcgtgatgaatgaattacaaaagttttaagtagagacagtattttttattttactttttgcctcagcttttactgtggctcggctgggtactggccactttagcaacattgaaataatctgatacaccgattcccacttccatgtacttggttgaatgatcagttccaaaagcacctcaaatgaaatctatgtaaatacttcctatcaattctaaaaacgtagggaaaggaatatatttaaatgtatgagttcattgtacaccaaccacaacctaaggcagacctctgggagctggaagctggcatcaggctgaagaagatggaaatgagaaaaggatcaaaagattaaaccggtttcaccaaacagtcaattccaggacacagccagcggtcaaatcccagagtcactgagtttcaaagctgagaatcagtcctggagtcaaagccaagtcgaaatagtgtaaggatcaccatgctccagtaatctcagaagagagtttgttgtgaaaccagcactgcttggcttcctttctagtgactgatcttgtcaattcctaaattaaaaactgcaaacctctcaccatttcctatggcataaattccaaacttcacataatatggctttcatgtgtctcacccctctcccagctccactttcacaaagcacattacaaggcaaatgtcgcaaatacagacagctctggctgcagccacaataccctccctacccactcccttaggcacaggtgccctgcagcccacggctttatttccttctttgatttctcctcccgccaaatgactgctccaaagcaagatttaattgaatgtcatttcctctttgaagcctttaccacctctcccaggttgggctaagggcagaaacttcttcctcacttagagcccattgtactgatatataattacatgtttacatgtctgtctcctaataggcttttatttgttgttttgttagtaacattactagtagtgatgaaaattattgtaacagaaactgtttagatgatacttcctatagcttctatagtctaggcaatggtaaaagtgtttttattttattttattttattattattatactttaagttttagggtacatgtgcacaatgtgcaagttagttacatatgtatacatgtgccatgctggtgtgctgcacccattaactcgtcatctagcattaggtatatctcctaaagctatcccttccccctccccccaccccacaacagtccccagagtgtgatgttccccttcctgtgtccatgtgttctcattgttcagttcccacctatgagtgagaatatgcagtgtttggtttttttgttcttgcgatagtttactgagaaggatgatttccaatttcatccatgtccccacaaaggacatgaactcatcattttttatggctgcatagtattccatggtgtatatgtgccacattttcttaatccggtctatcattgttggacatttgggttggttccaagtctttgctattgtgaatagtgccgcaataaacatacatgtgcatgtgtctttatagcagcatgatttatagtcctttgggtatacacccagtaatgggatggctgagtcaaatggtatttctagttctagatccctgaggaatcgccacactgacttccacaatggttgaactagtttacagtcccaccaacagtgtaaaagtgttcctatttctccacatcctctccagcacctgttgtttcctgacattttaatgattgccattctaactggtgtgagatggtatctcattgtggttttgatttgcatttctctgatggccagtgatggtgagcattttttcatgtattttttggctgcataaatgtcttcttttgagaagtgtctgttcatgtccttcgcccactttttgatggggttgtttgtttttttcttgtaaatttgtttgagttcattgtagattctggatattagccctttgtcagatgagtaggttgcgaaaattttctcccattttgtaggttgcctcttatgccatctccatcaagctaccaatgactttcttcacagaattggaaaaaactactttaaagttcatatggaaccaaaaaagagcctgcatcgccaagtcaatcctaagccaaaagaacaaagctggaggcatcacactacctgacttcaaactatactacaaggctacagtaaccaaaacagcatggtactggtaccaaaacagagatatagatcaatggaacagaacagagccctcagaaataacgccacatatctacaactatctgatctttgacaaacctgagaaaaacaagcaatggggaaaggattccctatttaacaaatggtgctgggaaaactggctagccatatgtagaaagctgaaacgggaaaagtgttttcaatgtgatgtttcacttgctatcaataaatttcctattatcacattatcacttcattctatactatttcatatcctcttcatcttatttatgaatgaaccaaggcttagggagccttcaaccttgcctgaggttacattcatctttaaacttccagcccctagcacagcaatagcctcataagcacacacaatagtccgttcagtgcaaaatgagtgcacgatggttgtgatcagccagaacaagtggaaatccagatcatgtttgcattccacatgtatacagatacctacacatgcaggcttgtagacttagtttacttttagaaaagttttatgcagtcagtattccttgagaataaagcttttagacacatgcaatgaattttctcttgtgaaataattattcacaccatgataacttcagtactagtattctgctgaaatttgatgaatttgagtacagcaaactcaattagctatattctaggtttgaacctcgtaccatcctagtttttggatattctgccaaatttattaaattgagggcccaatacattttttatgtgaagattttgtttccattattttgataaaaaatgaatttagcaaaaatagaagcagttctgctgaggatttatgtataatataataacacatttcacccattcagtgagactttacgaactagtgtaaggtaacattatggagaaaagatggtcttgcttgtttcacagaaagcaggtattaaagtgtggacacattacagagagaatgttacctaccagggagcatcaaacaaacagcaatccacctcctgctgttacagtttatccaaagagctcagacatcagcttttctttccatttctcagggataaaaatctattttctctccattagaatatcatctgttgaaaatgttcactgcctgaagattaaaaacttctctactctgggggtggatttttcttttatatcctggccttggagacaaatagaggaaaactatcaatgtgtaatgattattacgcagagtgctgtacctactacttacattcttaaatatgttctgcattagcacctctgagattcatagggatattagatcatctctttccatctcttctgagatgcccaaggaatcttatggagagaggaatgttatcaggtgtttttctagcataaaacctcttcttccctatacctcatacagttttttagcctaagcttctgtgaaatattggtttgaataaataaatgtaaatgtgaatacaaaaactattcacccattttggaaatcacacatttaatctcaagtcattttcagataggaaaactgaggcccaagaaatcacactattggttgctggtggcaccagaactagtctttatgttatagcatcccttgatcttggagttcctatcttctacctgcatcccagaattcttcattaaacctggccaccttctgtacactcttaattaaaagtggaattgattgcattctcaggtattgacattatacagataaaagaggggaagcaagtttttgctaaaatgacctgaatttttttattctgctaatgaacaagccaaacactctcctaaagctaattccgcttactttaataggctgcaatactcatacatattctctaaactttctgaactctgtttcttagagcctcctcaaaagaaaaaaaaatccctccttaatgagatttgtgtttatttgtctactccatcaatttcatcaccacttcaggctacaaaggatatttctactcaagtaaagtgaaaacttggcattcgtagctctattagtgatggggaccacaggtgaggataaggtgctttttgggatagtccagtgagtgaggcaaacatttcagcttgtgattatttttcctagctcctgataattgcctctgtctttccctttgcttctcatgtctagacacactgcccattcatgacctgttaagtaaactaggcagcagattaaaacacttgtttttctggagaatatcatgatagtagcccctaggcattctgaaatgagggtctcaattgctgtattggcatctgatatgagaaaaaggacaagcaacgactttttagttgaattcgcagtattatttttttcttctggtcaccattagtgtaagcttgtgttgggctaggtgatacatgtattgtggactgagggacagtctgtccttcatgctcaggtgccttgacccacatgaaataaatgacaaataagaacatctgtgagccaggattgtacttcctcgggaattccaggttacctatggaaacagttgcctgagagtccacattatcctcagacttacgatttgaccaatatgagaaaactccagggttgctttttctttctagcaatactggattactggcttgccaataagcattctttattccagtgtgcccagggcaaaggctgcagtcaagagtgctgtgacaattttactatagtacttagactgtatgggagtgaattctttttgggaaggaaaacatttgtggaagaaaaataaatgacaaattaggtagaatcaactgactgacaaaatagtaactgatgattttttagtcatgtcatgtaaataaagtgatatattttttaagtcttgagaattcttttacttaacctgaagcaaaaagcagaatgtgaaatgtattaagaatagagagagttcctttttatctttaacattattatactttgagcattagcatgatattagttttgaaagtgcaaattgagagaatagaatttaggaaattacttacatgggttacgaaggtatcattttgacatttgtggagttaactatgtgagccatgcccaaagaaaaagaggaaatgacttgggaagctccattagtagaaaacagtaagtgggaagagatgacatagtagatgtcaagatggatagagagataaggcagattgaacaacttgtagaatagacccactgcatctgagcctgaggatctggtgtcaataagcagcaagcactggcagccatactgagtacagaatttacttggcagaacgtaccaatagtaatagcaaacattgctttggctccttaaaaatccttcttatttgctctttatgcctcaagaaaatcctgcaaagtgctcctttaaatgcttatacagttttatgtgtatagagaagagctatatcaccatcaagctattctacatttgaaattaaggaagaaatagtttatcccttcatgaaatgatattgacaggaagcaattttaaactgttcaacaagttttaaaattcagctgatagctctcagactggttaaagtgaatgcaaatgttagaaggctggtagtgagaaaattaggcctggatgtaccattagacctttgtattaaaagattctaccattacgtgtttggagaacaatattatttattttgttttttataaaataagacataacaatctttagttttgcagtttattgaatccaggaaactgtcaatacttttccaagcaggcagtattttgactctcgtgatctggaaattagtatttctaatgccaaactaaacacttttataattattacactaacctaacatttctcatgaagcatttatgttgacctgtgatcaagtcctatgcaatttatggtttatacccttaaggaagccatgtctattttaagctgtgttggaaggaaacatttatgagaaaggacacatttacttagaaaatgtgggggaaacatgaaggttagccatatgatgtctccataaaatcttcatgcactttgaaacttaaataattaagttgataaatataaaaaaatacataacagataattctttaatattgaagataaacaactttatgtaatatttcagagagtgtgatgagtgaaagataagtgaaaattaactaaattcctatcagtcaggagacaaaaatctagcttaattttttaaaaagcacttacaatttgtttatattacattcaaaacacacacatccttaaagtcttaaaatcttacatatgacatatgaaagccatctctgtggaatgatctgagaagaatatgtatatactaggagcctggatattaagaattttgaatgaaggatgagacaaatttggcacgcagaaaaagatggacaacgttggctttggaaataattcttagcaattttattaaactatttatcccagtgcctagcaaatagtatgtgatgaaaacatattgacttgcttcccttcctgtagataagagatataaaacttgtttttcttgaatggatgatgctgtttcctaaagtcagtttaatgaattactgtttggtaaagtcagtttaatgaattatgggagtccagagttctttcatctgaaatgtgtccctagaagtttacttaaaagctataatctacatacgtcaccagatgtcactatcaattgcagcatcctttggtgggatacataatctaactgattcagaatgggacagaagttgtttttcctaatgtaatttaactaataattattgagcacaccctaccaagctgtcataaagacaaattagaggcagtgagttatatgtaagcgttgcctttaccaagttcagattctaccctgtgaacctgaggggtaggtaacgagcaacagtgatgaacagatccatgtatgactctctctccggccaactctttggtgagaaacataataaaggtgtaagtgaaatgtattggcagcatggcaaaccgagcatcagcatcccatcagctgttaagaggaggtgatatttgagctgggccatgaagggtgcagatggtgacaaagaatgagcaagaaccagtcacacaaataaatgaagtggagtctggtggttttgtgtagtgtataaaaacaaaataccttcaaagttgcagtctttctgaaacattttaatatgtgcttctagagaatgaaactcggagaacttgtagtttaaaccacaatggcgttactaatgccccaaaatacctcccttgctaaaagatgtattaatttactacttagtagaaacaagcagtaagtaaaaacaaagcacagtttgcctatattttgtgatgacaaagtgaggtagaaaagtaatgatatttatctctattattctccttttaatgtttttgttaatgaatcagcaacccaaagagagggataaagtatttgtcaaatttctgagggtgaggacagcaaagacaaacagatcttggtggagtttttcttttgtgtctgtgtgtgtgagagagtgagagggagagagggagagagatagaataggagaaggagaaggcagaaaaaaaggaaagaaaaaagaagagggagaaaggaaagaagagagaaaaagaaagactctcagagcttatatttggaaattgttctttttttcacttagaaaaatgtttgtgtttctaaaaactgctatactgagagccataggaagtgtatctatatttgaagaaatctatgtgagctatcagtgtggcattaaaattcaggtaatttttgagtggtgaagagcatatttgaaattgtgatgcaccctgacaaacgggatgatgctgaaatcttgcagtccatgaaatctggttggatgagattcataggaaatattggtatgaattacccctgctggtggcccagtgagggcatagagcaaagctatgggcaggtctttagccagtctgcttttgccactgtgagacctcaacagttatttcactggggccaaatgttttctggtggctcacatgaaatagtttaaattacatgtaaataaatgtggaaggagacagtggggaagaccatggcctttggaattagaaaaacttggttttgaaagttaaccaatttacctgtcttttctgagccccaggattattataaaatcttaaattaagtaaatgcggtacatagtgtgctgatgattgagaaatgtgggactacacgtgtagagaaaaatttatttagctttaagtaaaataagaaatggagatattataaaataataaccttgctaacattgaataaagtgagagagaaaaagagggagacagacagagtcaagagagattttccaggggctgctgggctatggtgggttttccaggggttggtggaggaaaaccgtaatcataacatagtctttgccttaccaatacatagcagattataggacatgaatttttactgaacaatatgtgatttaatgctgacgtgagggcaaggatgctgagaaacatgccactccggatccaaactgatgcagtgagttcacgctatgtatagatgacagaagttgagtcggttcccagctgtgtgaccttgggctagttcctttgcctcagtttctccatctataaaataggataatatgtactatatgaagttacagattaaatgaaggggtccaaagcatattcctcttcttctctgcttgatattgctctctggcatccagggactgctttggctctcaaagtggtgtcggagtgtcatgttggtgatggctttgcctctgcccatgcaaccgttctcacagagtcatggcccacagacataatggcacagaacagatcaatagaaatgccacagtcttatgttgtttcggttcagctactacatagcacagcctatagactgatattatgcctggagcctctggatcttcccagaagaatattaccttgagagaacccagatgataacacatccaaaagaacctggcatatttttggtggaataagtgtataattggggggataaaacattgtctcccccaattatattgtggggacagtgaggaataggccaatctgttgagcccagacagaaaagacaatcctttagttataataagggtaaacaaattagcaagaatggattgtaagccatgagtagttgggaagagtaaatctgcacaggattctttatttagcttgattctcttaatatctgttctgtgtggtggtaaaacttactggcatataatctgtctgtgtcctgagtctgtgcagattgaggctgtagataacacagtttatccccaagtctgatttttagtttttgtttgtttttgagacagagtctcgttctgtcgccaggctggagtgcagtggcatgatctcagctcactgcaatccccacctccagggttcaaactattctcctgcctccgcctcccaagtagctggaattgcaggggtgcaccaccatgcccagttcatgtttgtatttttagtagagacgaggtttcaccatattggccaggatggtctcgatctcttaacctggtgatccgcctgccttggcctcccaaagtgctgggattacaggtgtgagccactatgcccagcctcattgataggtttaatggccaaaattagtaccttccattagaatttattggaataaaagtattgtttatagatcaatgagacatgtaaaataatattggttaatttctttttacttttttatttttggagacatggtctcactctttcacccaggctggagtgcagtggtgcagccatagctcactacatctttgatctcttaggcccaagtgatcctcctgcctcagcctcctgagtagctgggactacaggcatgagacaccatgcccagctattattattattattatttagtgacggatttttgctgtgttgcccaggctggtctcaaactcctggcttcaagagatcttcccaccttagcctcccaaggcactggtactacagtcgtgagtcaccatgcctggccttggttacttgcttatacatgttcttcatatgtcactttaccaaattttttttttttgttaatttgtttgctttgtttagttttgtttgtaaaatcagatatcacaatggtagttcttattattgccccaaatagcagagaaatttccttttactatgccagaaaaccaccaacgaaagaaaccaatttctcccttgagaaatttgaagcaaagcttgcagagatccttgataacacaaagttgccaataaaatctgggggcttctcagtccatgagagtcttcttagttccaactgttgcaagcccagttgtgagtggaggtaggatttgcaacaattagaagtaaagctataaaggcaaggcagatgcaaggatcaaatacggaaattttcagctgactcattcttggatgagcagatttcattgttggattgctgacaccagcaaattttgtagaaagatggactcagagtgagatatatgatgtctcaggaatctgaatgtcttggctcactgataacacttacccttagtgatcccagtgggtttgcagctctcagagaaagtcacctcgctgatcatagtcctggaagatcctagcccatacgttctgccatgatgtacatagtgttgcttaagtaaatccccctgtttgagaccaattgtagatatttgcataagtgtaactgtaacctagaagctagcagctgactattgcaattttatatcaaaaatagaatggaggccctaagccccaatgatcatggaaacctacttgaaagacaagacactctggaatacatatggaggaaaaaatgtcattgtaaatgacattgaaatcatctgcatgccaattctcagtggtaaaagtgaaaaacaagtctttccaatgtatttatagctgtatggataataaatcaggcattttcttgtgctatgtaatgctcttcccagaccacattaaaaatattgtgtaccatcccagcaccatatgatagcatgatagaattccaaactgatatgtatttaacttttttatacggatggttaaatgttctatctgacagacatgctggaggcaatgagagaggaactgtaatggtagggatagtttctggagctccaaggcataaacagaggttcagaaaaatcagagtcacacttctgcttgcccatttaaaaacaaaaacacaggttttaattccatgtatacttagggaatgcttttacttatttattgtgtaatgagcagtttatagccatgaaaaaaatgcaccccttcaaaaggcttgctgcccactaatatgatggacacatttacagattagtgtaatactgtactgcaacaggtcatattctagaatagacagggagacttacagctcagaattcagatttaaaatatatttaaatacaggcatacctcattttattgtgtttccctttattgagcttcacagatagtgcttttttggggggtttgtttacaaattgaaggtttgtggtaaccctgctttgaattagtctgttggtgccatttttttttctcaacagaatatgattaatttgtgtctctgtgtcacgttttaggaatatttccaatattttaagttcgttatcagtatctgttttggtgatctttgatcagtgatctttgatgttaatattgtaattgtcttggagcaccatgaatcatgcccatataaaaaagcaaacttatttgaaaaatgtgttgtgaccgctccaccaactgtccattatgtcatctcttccctttaccttgagcctcgttattacctgagacacagcaatgttaaaattaggccagttaataattctacagtggcttctcagtgttcaagtgaaaaagaggagtcatgtattttccactttaaatcaaaagctataaatgattaagcttagtgaggaaggcacgttgaaagccaaggcaggctgaaggctagacctcttgcgccaaacagttagctaagttgtgaatgcaaaggaaaagtttttgaaggaaattaaaagtgctactccagtgaacacacacatgataagaaagtgaaacagccttattgctgatatgtagaaggtttcagtggtctggatagacgatcaaaccagtcacaacatttccttcagtcaaatcttaatccacagcaaggccctaactcctttcaattctatgaagactaaaaaatgtaagggagatgcacaagaaaattttgaagctagcagaggttcatgatattgaaggaaggaagccatctccatgacatcaaagttcaatgtgaagcagcaggtgctgatgaagaagctgtagcaagttatccagaaaaatagaactaagataactgatgaagatagctacactaaacaacagattttcaatatagatgaaacagccctctattagaagaaaataccatgtaagactttcatatttagagagaagttaatgcctggcttcaaagcttcaaaggacaggctgactcatttgttaggggctaatgcagctggtgattttaaattgaggccagtgatcatttaccattctgaaaatcctagggccattaagaattatgataaatccactctgactgtgttctataagtggaacaaccaaacctggattgacagtgcacctgtttacagcatggtttaagggatatttgacacctattcctgagacctactgctcagaaaaaagtattattttcaaagtattactgctcattgacaatgcacctggtcacccaagagctctgatggagatgtacaaggagattcatgttgttttcattcctgctaacacgatacccattctgcagcccatagatcaaggagtcatttcgactttcaaatcttattattttagaaatacatgtcataaagctatagtttccatagagggtgatttctatgaggcatctgggcaaagtcaattgaaaaccttttggaaagtattcaccattctaggttccgttaagaacattaatgatttatgggaagagtcaaatgatcaatattaacaggagtttggaagaagttgattccaaccctcatggatgacttaggcgttcaaggcttcagtggagcaagttgctgcatacgtggtggaaatagcaagagaatgagaaatagaagggtaatctgaagatatgaatgaattcctgcaatctcatgataaaatatgaacaaatgaggagttgcttcttaaggataagtgaagaaaacagtttcttgagatggaatctacttctattgaggatgctatgaatattgttgagatgacaacaaaagatatacaatattacataagttagttgagaaagcagcagcagggtctgagaagattgactccaattgtgaaagaagttctactgtgggtacaatgctgtcaaataggatagcatgctacaggaaactgtttaatgaagagaagattcaattgataggacacattttattgttgtcctattttaagaagttgccacagccacctcaatgtccagcaaccacttccctgatccatcagcagtcatcaatattgaagcaagattttccaccagcaaaaagattaatgactcactgaaagctgagatgatcattaacattttctagcagtaaaatattttaaattaaggtatgtacattgttttttagacataacgctattgcacatttaatggactacagaatattataaacatatcttatatgcattgagaaaccaaaaaaattgtgtgactcactttgttgtaatattcgttttattgcaatggtctagaactgaacctacaatatctaccagttatgccttgatatggtttggcattgtccccacccaaatctcatcctgaattggagctcccacaattcccacatgttgtgggagggacccagtgggaggtatctggtgggaggtaattgaatcatgggagttctcatgtgctgttctcatgatagtgaataagtctcataagatttgatgattttataaaggggagtttccctgtgcaagttctttctcttgcttgccaccatgtaagacattccttgctcttctgccgtgattgtgaggccttcccagctatgtcgaactgtgagtcaattaatcctctttcttttataaattacccagcctcatgagaatcacttgaacccgggaggtggacattgcagtgagccaagattgcaccattacattctagcctgggcgacaaaagtgaaactacatctcaaataaaataaaataaaataaaataaataaaaaaaataaaataaaataaaataaaataaaacaccaagcttcgggtgtgtctttattagcagcatgagaactgactaatacatggctgaataaggcttttctacagacttcagatatcttcctcttctacgcatcttgtttgtaccttcttgtcatcatttcctaagtacgtgtccctaaaagcattgtttaacctctctaagccttagttttatcctctgtcatatgacaatggcacaaaataattaatagttttattgtaaatgtttaataactgaaaactccagaactgcttagtacagtgtgtggcacagacaatcaacaatacccatatcttactttatcattattacagtatagtagaacaagtgctgcggaatcaataagtgagttaatacacaaataatttagactgtaattttatggccatataatatcttgagacctgataatcaaggccaagagtatcatataaaaaattttctcataatcaacttctgatcatcagtcttcttcacagatgttatttcttcaaccacttggatatttccatgatttctggaactccctgtcacaagttgggcaattacaggcgagagttttgttacctcctgagtttctgccacttggtcacttgtgcagagatgccttagtggagaagcagatggcagtgatggttttcatctgtgggttttattattttgtttgtttttctttattgttatggctaatcaaatttcacagttttcttgcaggaaaagctgaaccaagtgcaatacaagttggaaagtagaaaccatttattccttaatgtcttaccaagtacccaggcacctgctaggtattaggaagggtgtcaaaaagatcacccacctggcttgtggagcttccagttaggctgaataactaggtggagatcagggaggcattttatttatttatttattcatttatttatttttacagcatgcaagtcttgcatttatttatttttttaattatacactgattttttattatactttaagttctagggtacatgtgcacaacgtgcaggtttgttacatatgtatacatgtgcaatgttggcgtgctgcacccattaactggtcatttacatcaggtatatctcctaatgctatccctcccccctgcccccaccccacaacaggccccagtgtgtgatgttccccaccccatgtccaagtgttctcattgttcaattcccacctatgagtgagaacatgcggtatttggttttttgtccttgtgatagtttgctgagaatgatggtttctagcttcatccatgtccctacaaaggacatgaactcatcattttttatggctgcatagtattccatggtgtatatgtgccacattttcttaatccagtctatcattgatggacatttgggttggttccaagtctttgctattgtgaatagtgccacaacaaacatatgtgtgcatgtgtctttatagcagcatgatttataatcctttaggtatatacccagtaatgggatggctgggtcaaatggtatttctagttctagatccttgaggaaccaccaccctgtcttccacaatggttgaactagtttacagtcccaccaacagtgtagaagtgttcctatttttccacatcctctccagtacccattgtttcctgactttttaatgatccccattctaactggtgtgagatggtatctcattgtggttttgatttgcatttctctgatggccagtgatgatgagcattttttcatgtgttttggctgcataaatgtcttcttttgagaagtctctgttcatatccttcacctactttttgatggggttgtttgattttttcttgtaaatttgtttgagttctttgtagattctggatattagccctttgtcagatgggtagattgtaaaaattttctcccatgttgtaggttgcctgttcactctgatggtagtttcttttgttgtgcaaaagctctttagtttaattagatcccgtttgtcaattttggcttttgttgccattacttttggtgttttagccatgaagtccttgcccatgcctgtgtcctgaatggtattgcctagattctcactctgtcactcaggctgaagtgcagtggcatgatcacagctcactgcagccttgacagggaggcaattttaaggaaaccagtgaagacaagttatgggcattggacataaaccttttctctgagaagaaagagtaggagggatggaatcaatccaggacagctagctggggacatgatggttctctgctggatagaacgatctggattttaaacaggaaaggatgggcatttgagaacaaaagaagatagatgataaataaagacatgaattcactttgactttagagaaaggaagtaaagggtcttttggagcaaagggaaaggttaatggagggccctgatatccagcctgagaagagtacatttaatctgatcagtgaaaaggatccaccagaggctcctaagtagagtaaagacataatgaaaaggagtttaggaagattttctagcagcattgtgcaggtggaattggagcgagaaagactctaagcaaagaaaccagtgaaattgctactgcagcctcctggtttaaagtgatgggatcccatactagggtgatgctggtagaaaggagaaaagggtctgatttatcaaactctgtgtgttttgaagattacatgtgtacctgaaatgaatgaatgttcctcagaataacaatctctttactatatacaattttatatcatccttctaccacctcccatctcccagaaactatacaaataaattctaaggaagcatgagttttacaagaataaatttgttcagtattcttccactaggagcttaagtccatgtgtttcagtatcttccaagatggatatgcacagcgatgactacgaatgtctttcatttcttatccccaaacatattataaacaagccagctatatacatttttgctgggaaaatatggcagattaagacaatctttgatttaacaaaatttgagctttttctttttggatatttaattgcctgctaagtgtatatatatatttttattattgaaaaaatcagagggacattctcagttttttatcccctaactatacctatttagaaagtagatactgattggtaatttataatataacattataccagcatttcagttttagctactagttatcttacatccatgtgtgcttgtcttttgaagattgctttaagagttttctaggtcttgttttctttctagaaaacaagtagaagcctttatattaatatctgtatgtgcataacttgatgagcacttttgcttcttagagaacctaacacctatctgcaatcttctcaaagttcaactgtttatccttagataacttgcccattttcttctttgcctatactatttataagtgcaaacaatggtaaaatatcaattttaataatgtgaaactatttcaggattttatcagatgttcagaaactttaatgatataagtcatatttgatgtatggagtcaccgctagggaccaattcttatgaataaatttttttttctggtctttgctaacattaaaatattttgagaagctaattggccaaatgatagcaaaataagtagctgaacgaggagtctggctatgttaactggattgattaggtaataaatttttactgaatttatttaagcacattttgttaagcaccttggtgggggctaagcataatgctcgtaattgggtagcaagaagtgtgtaatttttatggaatatcttatggaatgcatagcccttgagaagaccaggcatattcacaacatatttaatggaagtcagacttgggaatacaacagcacatagtttaaaatgagagtgaaattttttcgtggtgggattgtaaaagatcaaggatatgttagtctgaggttattgatttcacaaataattggtgtttctgggactgttatgtaaggtgtccaatagaagagagaagcaggttagaaatctaggactgaagattgggcctgaagaatgaatggccttaatcatgatctaaggagtgtgaacttgattctgaagacattagaaaagtatctgtgatgtttgatcaaggaagatactttatgacatcagagccataaataagtgctttgtaaaacagtgctttcgccaatgtaaaaatagaaatcatttagaatagcagtaaccattatatccgcttgggagagattatgggattctatttttattccatgaccatagagaatcaatccattacttcactatattttgtattctcaagattccagcagataattatcaacatttattagtgaatctgtttattgattatgttcaattgttgaaaaatgttatcaaaatatactactaaaagtatccacagcaaaaaatttccagtaaaaagtcaaaatgcaattcttctttttttttttttttttttggtaaattggtattaagtggggatgagagcaagggaactgtttttctattaaattttcaaggttcattttattaagagacaagaaattgaaaaattaactcatcatcacgctaccctggcgccgtgtctcacggctggaatcccagcactttgggaggccgaggtgggtggatcacgaggtcagaggtttgagaccagcctgcctaatacggtgaaacttcgtccctactaaaaatacaaaaattagccgggtgtggtggcatgagcctgtagtcccagctacgcgggagactgcggcagaagaatcgcttgaacctgggaagcggaggttgcagtaagctgagatcgcgccactgcactccagcctgggtgacagagcaagactccatctcaaaacaaacaacaacaacaacaataaaaacatgccatgcatgtaaagcaaacaaagaaatatgttcttactttaattcttttaaaatgccctctcatcaggacacaaactctcataaaaatgtaattcaaagctttgaatatcacattgtggttctgacagccaacataattatttccttttaatccttttcctactttgtatatgtcatatgcagttcatttcacatacattttattatttccaaatatgtctaatattttggtagtataattgtttttagaagtagtgtacaaatgaagaatttggtattcttatttcactgagtatggaacttagcattttcttttaaaataggagacagtagtacgttcagtctttcatcctcaaaatatgtaacttactttttattataagctacaccaactctttatatcattgtcacttggtctttgtttatggtgagttggaagcaaacatttctgctatagtcctaaatgttatttcagttaatagtttcttactgaatagagttagagggtattagaggagttggaaaaatatactgtaccaacgtctggagtagtaagggatttttatgtttcctttctttcgtttcgtaaccagcctatgtttaggtcatagtgaatgtgatatcattatctttacagagtagttatctgagtgcatgtaacctcattttctataatgggaggttatggatgaagagcatatcctacttcctaatactgtcatagtcagggctcttaagcatcatttttgtatgtgatgtctgtattaaactaaattgcaattctaggtgaaaggtaatattgggaacatctaactcagttctgatgttttcaaagtgaaccacaattcaaatcagtattcaagaggctcaaacttctctattttaagagaaatggagtctgtcaactcttcactgtcttcttcacatctcctgcagcaatctgcagagcaaattattgctttcaccatgttcctaccatctctagtaatgctaattacactaacttgcatttaattctgtaatgttatgtcatccattctggatgtgaacttgttaatgggatcttattcagcttttctagtgcctagcatattgtcaaggacacagtgggctttaaataaatccttattgaatgaatgaatgatggaaaaatcaaagacaggctacaaatatatgaatgtcaggaattttatttactacactttgattttaagcaaatattaatggttatacaaagaactcttcaggaaagctattctttttaaagaaatttccactgggctttgagacagaggaaatacaccttcataggcaaatatggcagagagggtgaaggaaacggataaaaaggttgtctatcagaataaggacagatagtgtttttagtaatcatgctaaaataatgggagataataggaatgattgaaagaaatcttcttgggtttatgactaaaccagacacctacttgttcactttttaaaattcaattgtacatatattttttaaacttcctaaggttaaaccttccaaggtcaagagtaagagtatagggatgttgtagctagtttggaatgcattccatcctagctcctgcaagctcctttcactcaaaagtgctcagagatgtgattagaacccccagtttttcatcctagagcagacttcctttgtctaggtctttggcctgaaaattcagcatcccacgtgtcttgctgcaccactgagatcatctttgttaggtaatttgagcactcattcagaaatactgcaatcacaaattattttgcagtgattctagataggagggtattagtagctgctaggatcatcaatttagctagaataggtttttacagccaagttgggtttttatgacccattacaaaccactctttgtacacatgaaaaagcagcagaagtggcatgtctacaggaataattagacatagcatgatgactacaacccgttttcttgattctcctcagttattttgtctgtagtagtataaatggagctttaagacactgctcaggatgaattgttcgattgaggtaacaatgtgactgaaagatatgtagaaattgtctcttgctgttagattcgatgtttgctttttctttgaaaatatgaacttgaacgaggttaatgttaataaggtacttctgtagctttattttttaaactgttgaaatttattttttgtgagtgtcattacttttttattttttgtttgataagtttcagatttatgaaaataaaaaaagaatttttaaaaaaatcaatgccattagcagaaatataaagtattttactaatttttttgggggggtgggtggtggtgcttgctgtgtcaggttctctggtttgaaaggccagtaacctgccttacatcacagagtaagcaagaattaagtaggagactgaatctaaaatccattcatttagccaaatgcatcatggctgcagactgctttgctatataaggggccactgaaacttgattctagctgtcattgtcattaactcatgactttatcaaattcttatgttagtggcaaaacagttacagtataaagttgagaatttgttgcttctttatatggaatttctcttctattagctgtaacatttacattttagatattcaggttcaaaaccaaattaaagcaaaaacatgcaaatgttctcatcacatgtttaggagagattatgttaaccttttttttctgattttgcccatcatcagcatgtgcacagaagttttttagagtaaaataccttcttccacagattggtttggcacattagaccataggttaattccctctgtccattctgctccatctcaccaaagttacgtgatgaggaaatcaatcccttttctagaaaaggatgcacacattacttttgatcaagacattctaattggccgtattccccaaatgagcatttctattaaatattcaaaactcaaacttaaaatgatcatgcaaaacttaagtctttagttcatatacatgaaatgttatataaactaaattatcagtcctttcaatttcaattatcagatgagtttatgtcttgataacctggatcttggttatacatttctctgtacaattttcatcgagttgccttggaggagttcaatgcctgtttgtataatagcttttcattgtttcagtgaacctctcatcattatcaaagggtttttcagaaaagagttaagtctgatagcctgagcattaatgaactaaaccaaaaatagatttaatcaggcatgtgcatgccgctgttcataaataatgtctattcattgctgagttaaactagatgtcaagtttttttccctttaatcttgtacatgattctgcacatagggccaaggaaaccacacctatgctgtatacttttctctgtgtctttcttaagtatctgtatgatggctttagttataaacaacttccttagagtggagttagacttaattaacaatgaattgataattacagacatgtgcttcataatgatgttttggtcaaggatgaaccacatatgtgatgatggtcccagatgattgtaatatagcttaaaaattcctgttgtgaaatacttatcattgtggtataatttccttacattattcaatagaataacatactgcacaggtttgtagcctaagagcaaaagactataccatatagccttggtgtacagtatgctatatcatctaggtttatgtaagtacactctatgaggtttgcacagcagtgaaatctcttaacactcatttttcagaatatgtccctgtcattaagtgatgtatgactacgtgtgaattttgagcttcttagaaaggcatagtgtaagttgaagtactttcatggaggatatttttccatatgaaaatcaccatgatcaaaagctcacaaaggactattatccagatactaattaaataagaatataaataggagacttgcctctgtaaatattgtcaaacaagactgagtaacgtaatctggatacttgcattaacatttgattttattctgttttccatatctaagtggaactgttttattatatatgaaacagtgtttttatcaaaattcttttgtcccatccagtaataaatgtcttgtataagattcaataaggaatcctcctttatcaagcctcagaagacattcctgctttcaaacttccagatacttaaaatgacaacaacaacaataaaaacaaaataaaacttctttgagcatctcttcattcattagttaatctgcttctttattaagtgaacatttattgattgtctactacatatagaaaggtacaagaaacataattcagaattctcatcttcaagtagctaagggcactgtactgtgtaaaggcacaagacattgaattcttgagccaaatacccatgactgagagcagggatagatatagtataggcacttaataaatatttgtgaaatgagtgaacaaagcacaatgtaaggatgcccatgcatgctgtgataaaagtacagatgaggaaggttccttaatccataaggaagggtccgagatgaagtataaggaaagactaggaaaaggaggaagtcaaccaccacacattaagggatgggttaggaattacaggcattgtggtattgccaggacatccagtatgaaacagaggctgtctagaattaaggtgtgaaacgcaggtgggcaccctgtcatggaggtcctgatggtcagagattgaaatgagttttatttattcacctagatgatgattgttggctgggttagtctccttagcagaaattctttcttctgcactccatggatacaaataataacaccctcttttattaacaccctctttaaattaaaaaagggactgtaggccgggcgcggtgctcacgcacataatcccaacactttgggaggccgaggtgggtggatcacctgaggtcaggagttcgaaaccagcttggccaacatggtgaaaccccatctctactaaaaatacaaaaattagccaggcgtggtggtgggcacctgtaatcccagctactcgggaggctgaggcaggagaattgcttgaacctgggaggcagaggttgcagtgagctgagatggtgccactgcactccagcctgggcaatagaaactcagtcaaaaaaaaaaaagagtaaagtataaaaattgcagagtagatccagttttccaaaaagaacttccctgctttgatgaacttcatccacttaatcatgttccactcttttttttttctttgagacggtgtctcgctctatttttagtagagatgggatttcaccatgttggccacgatggtctcgatctcttgacctcgtgacctgcctgcctcagtctcccaaagtgctgtgtgcgattacaggcgtgagccaccgcgcctggccaggttccactcttgctcatagttctctagtgttcattatttgttttatccaccactggagtttttttctcacttccagttagtagcttctcagactttatgtttgtgcatttttatcacaagagccaaatatttacagttgagcaagacagagaaagtaacataaaaagttaacaattccagggaggacactaaaataacaagtcagccttttgttaatttcttcttcttagcaatacactggcttcctgatgtaatctcatcacatgttttaattatgtgagcctcctcatctgtaatcccaaagtgctttgcagatattttatgtcaatttggaattgagccataagtgctcattcttattttatgagtaaggaaagttgttgtcattcaacaagtgtaaacttagaaaaacttcagtacttgttgctgcaagaacctcccactcccacacaataccactctcttctttgcagctgtggggactggtcaaaggtgtttctttctgatgcatctgcactttgcatagaagagatataatagctccctcaacttctgcatttccctgaagaatgcgtacttctgtggaaggagtagaagctgctaggagctccaacacttcccactttttagtggctgtatttcataaaatacagtttaaggtaaggatgaacctttaggaaatagtttatttatgaaagatcttgtaagccatgacaaggaatttgtattttatcctgaggacatatgaagtcattggcatacatagaagagttaatatgatcaatttgtcatggaaaaatagaaagctccagctgcaatgaagataatggactggagtccagtaagcctgaaggcatctagaccagtgaaaaggttgttaaaataatctaagcttgaagggatggtggtctataacaggataatacattacagataattttgaaagttatttaagggcaagatctggcaggagcaagtgattggataagtttaagagagagagaaaagaatcaaagataatgtctaattgaagggctgggcaactgggtatatcattgagatagacagcatgtggagaggaccaggttattggagcaaggaaatgagtttgtctttaaaagtaatttatattactcacaaaattaaagctttagctttttctccagttaaaaatgtattgcaaatctttgagctgagaaaacttctgctctatgtgtagttcctcatctagatcttttcctagttcattcatttagatgttgtattaaaatagggtttggcagactatggcctgtgggctaaatgtgccctgctgtctggttttgtgtggcccacaagttaataatggcttttacgtttttaaatggttgggggaggggaatgttttaaagaatatttcctgacaagtggaaattatataatatttaaatttcagttttcacacataaaattgtgttggaacaccatcatgcccgttcatgtacatgttgtacatggaagcttgtgtgtcatagccacagagttgagtagttgcagcagggaccttattacaatgcctaacatttatgctaactgaccctctacaaaaatgttttccaatccttactaaatgattgtctcattctcgaatttgatgatgctaaatttaaaacaaaattctttttaaaaattcaatagcattctagttgagggatcaggtactttcgggttttcagatttataagctgtgtcagccaccagatgctccaatgtaaaactcgttaatgcatttaattactattgactttttctaatatctatgataccagagcagtgtatttcagaaaagatgtagttaatctaggtggaagaaaaaattgagatgccatcttagctgggtttatctttatgctaacaataaaaaataataatagcaaatgctttctctgggtcgcttcaagttgcagtatcattaacaatacagcaatattttatgttacagtaaactttattagaatgtgttaggtagtgaggtgatgctatgtgctacatggtagctgttatagctgaaattggtttgcagtcatgcttcagcctatttgcttttagaaaaaaataactttatccagccaaccatagtaataactatttttcaagtagcatctcatactattttcaggattataagtaagccttgatactatgagacagatttttctactgcatacaaagcaaggcattgtatattcacttgttcagtttgcttaaagtgatataaaatattttaaagtatattagaaatgtattcctcagccaattaacaatagctgatctaataagcattaccctttgatttggaaacacttgagtcaattgtcatctgttttaaaatatgatatcttttgcttcagcgcttctttgagaattactatcatatttacatgacggtcataattataagatgtctatgagtattaaccctttttaccatgaaatagtaagcctcaagtggaagctatacaacttgtctttttgtttatactaatgatcaaatgtagtggcactttggcccattgttttgcttcttttagtcttaccaatttatttacattgagattttaaataaaatttgaacaactaagacatatttgtgtttattcaaacagaacatggattaaagtagatattgagaagcattggtgtatattacatatgggctaatgatggtttcctaatccaaaactcaaacagaacatggattaaagtagatattgagaagcattggtgtatattacatatgggctaatgatggtttcctaatccaaaactcttgccatttatgtcactggttcatttccccaattcctgtaatgtgccaacctttccctccagcatgacatacctttgcacatatgaattagctttgtaagcttaacttatgtaccctacttgtgttttgagactactttgagtgattcttaaatgataagctctatttgcatgggcttaataaatccatggagccttcaaaacatttgaggattattttgtgaaaactcttcagccttggacattgcctaattcttgaattattaactactgatggcgtcgaagacccaagtcattcctgaattgcattctctggttctaaaatctgctttctctaattctaaaatccttcctcttcccccactttcattcaatatgcccctgtgtttaatgtggctttccattcctacctttcttttgactagccttcccagtttatggtgtgaaagcaagttgaaattagaacattgagtgagatcgtcaagagtcaggcattagactttgtggagtgcttaccatgtactgtgcactttacacaagttgaagttgagtttatgtaaatctcataagtaacttttaagggaagtattgtgtccggaattggtgggttcttggtctcactgacttcaagaatgaagccgcggaccctcgcagtgagtgttacaactcttaaggtggcacatctggagtttgttccttctgatgttcggatgtgttcggagtttcttccttttcgtgggttcgcggtctcactggctcaggagtgaagctgcagaccttcgcggtgtgtgttacagctcttaaggcagtgcgtctggagttgttcgttcctcccggtgggctcgtggtctggctgacttgaggagtgaagctgcagaccttcgcggtgattgttacagctcataaaagcagcgtggacccaaacagtgagcagtagcaagatttattgcaaagagcaaaagaacaaagcttccacagtgtggaaggggacctgagcgggctgccactgctggctcccgcagcctgcttttattcttttatctggccccacccacatcctgctgattggtagagcggagtggtctgttttgacagggcgctgattggtgcatttacaatccctgagctagacataaaggttctccgtgtccccaccagattagttagatacagagtatccacacaaaggttctccaaggccccaccagagtagctagatacagagtgtggattggtgcattcacaaaccctgagctagacacagggtgctgattggtgtgtttacaaaccttgagctagatacagagtgccaattggtgtatttacgatccctgagctagacataaaggttctccaaggccccaccagagtagctagatacagagtgtccattggtgtactcacaaaccctttgagctagacataaatgttctccaaggccccaccagagtagctagatagtgtcgattggtgcactcacaaaccctgagctagacacagggtgctgattggtgtgtttacaaaccttgagctagagacagagtgcagattggtgtatttacaatccctgagctagacataaaggttctccaaggccccaccagagtagctagatacagagtgtccactggtgcattcacaaaccctgagctagacacagggtgctgagtggtgtgtttacaaaccttgagctagagacagggtgctgagtggtgtttttacaaaccttgagctagagacagagtgctcattggtgtatttacaatccctgagctagacataaaggttctccaaggccccaccagactcaggagcccagctggcttcacccagtggatcccgcacccgggctgcaggtggagctgcctgccagtcccgcgccctgcgcctgcactcctcggcccttgagtggtcgatgggagtgggcgccctggagcagggggtggagctgtcgaggaggcttgggccgcacaggagcccatggagggggtgggaggctcaggcatggcgggctgcaggtcccgagccctgtcccgcaggaaggcagccaaggcctggtgagaaatcgagcgcagcgtcggtgggttggcactgctgggggacccagtacaccctccgcagcctctggcccgggtgctaagccccttattgcccggagccggcagggccggccggctgctccgagtgcagggcccgccaagcccacgcccacccggaactccagctggcccgcaagcggcgcacgcagccccggttcccgcttgcgcctctccctccacacctccctgcaatctgagggagccggctccggccttggccagaccagaaaggggctcccacagtgcagcggtgggctgaagggctcctcaagtgccgccaaagtgggagcccgggcagaggaggcgcccagagcgagggagggctgtgaggactgccagcacgctgtcacctctcagtatgattatttccaaacgaaggaaaagaaactcaaggaggttgatgttttgatcaactaacaaatctggagcctgccttcagcttgggtatgtttggctttaaaacctgcagtttttccatgtcacctgcctgtctccccaagagaaaagtaatatatggaaaagaatagagaggtgaggaataagccttggagaaatcactctttagcaggtagactcaaaaatcaagagccaggaaagaaaacccaagatggaggcaaaaagatggcaagaaaatgatagtcattatctaaaaagccatggggtgtgggatttctaagagaaaggaattattatggttgaattggttgaagtgaggctggtggaaggtcctagttgctggcctaacaggcatgtttcattgtgtctcttttctccattcatcctgttagtctgcaagtattctccctcgagacccctagtactctgtgcaggggactaaagacacaaccctctcaaatatcaagcatctaccgcttttctaagttctgcgtcatgaactgctgttcatggagtgtttcatttcagaaagaaagagtcttgtaaaataaagttctctttatttactaggccaactaactaaaagtagaatacttatttttttagacggcatttctttgaagttgatgtgtttaggtgctatctcagggagccagctttgtagctgtttaccacatttcctgaggcaaccttgtgcgagggctggagaattgtaacaagtgtcttgactttctctgcacctggagattaatgtgctggtaaaaactttatgaacccttaatcattcattgcaaacatattggatcctctaaagcttaaaagcttcagcattcataattaagagacaacagaacaggatcatgtaaatatgaaaatggcctccgagaaagttgaatgaactttctcgttttctttatttaagttgtggacactttaattttgaacagaagcatattttcttagttatagaaatcaggtataaaattatccctactgttaaaatgataatgaaagaaattttaaatgacaagtaggtaatttcaggaaaacagattgtatctccttgttacttactgtaactattagttgttccctcctctcccctaacatacattatcttctgcttgaaacaatagatagttgtattagaatagtgtattcatttgctggggctgtagttacaaagaaccgcaaactgggtgacttagcagaaattatagtctcacagttctggaggctgaaagtctcagatttgtatgtcacctgcctgtctccccaggagaaagataatatatggaaaagaatagagacgtaaggaataaggaataagggtgtcagcagggttcccttttagggctgtgatctgttttagcatcttgtagcttctggtggtttgtgggcaatttctggtgttcactggcttctgctccatcatcctactctctgcctttatcttcatgatatggtttggctgtgtccccacccgaatctcaccttgaattgtaataatccccacatgtcaagggtgggatcaggtggaaataattgaatcatggcagtggtttcccccatcctgttctcatgatagtaagtgggttctcaccagatccgatgattttacaaggagtttcctccttcactccgctctcattctctctcctgccaccctgtgaagaggcaccttctgccatgattctaagtttcctgaggcctccccagtcatgtagaactgtgagtcaattaaacttcttttctttctaaattaccagtctcaggtatgtcttcattagtagcatgagaatggactaatacacttcatatggccttctccctctatgtgtgtctgtgtccaactttcccctttttataaagacactagttcttattggattaagggaccaccctactccactatgaccttatctttacccaactaattacatttggagtgacatatttccaaataaggtcacattctgagctactgtggggtaggatgtcaacatatgaattttggagagacaaaattcaaccctcaacagataatgtaggttattctgtgataacagatgactccaaaattccagtgtcttagaaccacaaaggtatgtttctttcttaaatttcagtggggttcttggtacttcttctatcatcctgcaagctgtggctcagtgttgagccttcatgtagcatctgcttccatgatctcccaagtaagggaagaaagctccgaaaggtttaggaccagcaaaaaaaaatttgtactggaaagtgatgcatgtcttgtactaaaattttattgactgaaatgtatcacattcctcacttaaattcaaagaagtagagaaacgcagttcatcctatgtgacaagaaagaggagaaccagagatactaatgagaaggagtataccttcatccatgtatctgtcgatcaatattaaaaaaaaaagaaaactagacatctatttcgaagtcttgacaagatttgtagctgtctagctaaataaggttgttttcctaggacttgaaatgttgagccattaattagttctcctttctgcctctccctcactcagggaggattcattcctgaaatgaaaatggaaggtgcatctttatgagtaaaagctactctagtttatattgtggggagtatttgttggatatactatggcaattcccatgcacagataaccatggtacaaggctgaaagaacatgtgtatgggtctttctcagatctaatttatttgttttgtagaaaggagaatcttaaaggtaacacaataggactgtgatcacacatactgctcaggagagacacagttacacagtaactttctatatggtctttagcttgaaggaattccagaggaaatatcttatttaaccctcctccttgtgaaaatgtcctcccctagtactcttcattgtatcatcctgtcttatgtccttagtagcatttatcacacagccatttttgtatttatttgcttgcttgtttcttaccttccctgcactttatgaaacatcctcctccctacccccccatataagttccctttcacgcccaatatattgcctatctctgtttctcacggatactccagcattgagaaaaatatctgcctgatactgaagcaaataatggatagattgaatagatgtaataagtattacattaaaaataatgtcttaatgatggaacgtagaaaattggggaaaatatttggtcgctgttaaagtctaggtaatgggaactagaagcttacaaggtaaatatttctaatgtttccaaaacaattatttttctttcctagactccatggtatgtatatttctcctgaggtctctttggacaacatactatttattatcaaattatattcatttatcttattttctgaaaacaatatattttatgttcaaaaatatatgccatccactcacagcggagttgttgcacagggcgcatgatttgaaacttgtccttactgtatttgtagggtaatttgaggtaaatgaatttggacagaagccattaagtaaaatgattctttcctaaattaccttaagtggttaattttattactgataataccgtaatggagacgttcttcatataattttaagggaacacgctttgattaaaatcatatttgtattttattattattatttttgagacagggccttgctctgttgctcaggctggagtgcagtggtgccatcatagctcaccgcagtcttaacctcctggattcaagcaatcctcccgcttctaccttctcagtagctgggactacaggcatgggccaccacacccagccaattttatattttccaattttttgtagagccagggtctcactatgttggccaggttgatctcaaactcctggcttcaaacagtcctcccaccttgacttcccaaagttctgggattataggcgtgagccaacatgtctggcctaaaataatcctttttaaggaaagatctgagttttatttgctgtttaaccataaaagacaaaagcattttttctgcttatatttttttaaaatcatcagttgtcattgaaataattataaaaggattcattggtggtctaaatgaaaacaacggactttaacagtagacctgtatttgcagtacaacccaaggatctccatgcactagtggttttcttacatagacgagttcagagaaagtatgggtccccgggtattctaatctgtaagtatcagtgtgtcttcacttttaatgtaaaattatgccacagtgtcattttttggagattttgtgtgctctcgatcctcccctaatttttcatttagaacctgtttcttggctattgtcttaaaatttcccgacacagttaaggttcaagctttagctttataattttagaattagtgctactggattttaataagatatcaacacactgcattctaggtaaatggcatcccctgaatttgtggcatgtggtatctaaaattaggtttaggtggccaagagtgtgagaggcaagccacattgagttttctaaatcaatgacacctgttcacatgttaagctgcccttctcaaggctaacttttcttttggcttctagggtgtgtgttcaccattatctaccttatggttgtctttctccattgtgaggctgaaataacttctggtggcacctttctgacagtaatatctagctggcttccatacaaaattctgtctttgcttctactcatttaaagtcattctgcccagtttctggttatgaactgttgtcactgtgatggatttcctgcccttgaggctgtggcagccaagctgatatcatactgtattttgtgtctctgttttttgactggataaatggtctttaattactgctggttcttcaaccttggggaaaactctggcagtattatcagtttttgtagctgacagtttggaaatagggaatcttttgccataatattttcaattaaaggcctaaattcacatgcttttctactgaattttatacaataaagttaggttaagaattccacaaacatttaaatctacacaacacatttactgcatttaatactgtatttaatgatgatgacgattatttaaaaatcattttctacttgatgaaatatcataacatagcactaatataaattaatattagcagaattaacatgtaagtttttcagtgaaaagaactcttgatgtattggaaaacgtaatgaaaatattaataattatctagacatgaaagtgacgagtcaatatttctctggaagtttatggccaaaaccatactttgaggcaaatattgcattagtggttttctatattgatcagacaaaccaaataactaatattacccccccattgtgatatgttgcacctttctgcaattgattattagtgttatattccttacataggcagttttgagtaacaaggttttaaaaataaattatatgtatcttgcacaccaatgtaattattactggttttaatataataatgtgtatataaacttatgattgaaattagttgtatagaaaactttataaaatgagggctccatcagctattccattctcatctagcattggtaaggagtaaatacttagtaaaacttgatgaatgaatcttgcagtggtggattcaaagccatatgtgtgtgttttgtttttgtttgatgggttttttgttgttgttctccaatttttttatcgtaaaatgtataatactagtgccacaaattttatttttattagaacatatagtagtctacagcttaataactagcagaaactaaatactagttttggtcctgctactaaaaaatttcaagtaagacctgaatttaaccagtattgtatttctttaacaaattatttaggaatatggttttcataagggcaatgagagtcagcaatcaagtttttccttctgaaattttagatatgaaaagcatctaaaatttctcaactttctaaaattttaaactgcacttacaagtaaagtattattcttttaaaagcttaaataatttagttaaataactttacaattcactgatttccaaaagggtacctacatactgtttcactatataagtatagcacatagtagagtccatctaccattgtctaccattgtcttctgaaacaatatagggaactttctaaatcataggaaatctaaaaaatcagctagttcaagccatatgtttcatagctgaagatactaggtcccggcgggggggttgggggggggtgttgatgatttgctctaagtcacacttgttaaaatctagacatctttgttaccagcctattgttcccaaagtcaacattctgtgctctgatgcaatgctgattttaaaaaatcattcgttcataacctcatatcatgcctttttaaaaatctcttctttgcatttccctctttacgttatctcattcttacattcccaaggcctgggcacacagttggtgcagctatttgtagttgaacttaactggattaacatgaaggaacataagaaatttatatggtatcacataatacatcaagcattttatatctcatccaacccacaagccatgccatcttatgtagatacttttgatggaaagaaagaagaaaaatcaggataaatgcctcaacagctgtcaatgttaaataatcccttaaagctgtgaaagccttcatttgctttcaggagttgtgacatatggtcaaaaatagcttgaagatttattatgtcatatctgttggatgagattcaaaatatactttaagaaagattccatccttcatcatccttgaaaagatctttcagaactcatagagtatatagaaagcagacggagaatgatgatgttcagctgcttcaaaatgacagactctaatcaggattgcccacctatcacaccaaattaccagtaaaaaatgcaaattttctaccgacatgacacttttaaacacagacatctcacagacctccagaagccctgggtatagataagacttgaattactttcctccaatgttacattaggattggaaggcagattttaaaattatgtttttaaaaagcggtcattcttccccatgttaagaatttaaccttaaagatgaaaaagctaagaaactgaagtttgtcagtggattctagcttctgtaaaagttggaagaaaaaaaaaatccacttaaattttgtaaaaattgaaaaaaaaaacaactaaggaataaaaaagaaatgccaagaacatataaatgaaagagcaaaagaacaacttgagtaaaacattatagtaaagaggtcacctaacttaataaactctcctgggttcaagcagaagtaatcaagcctactgtgtatataagatgaaaagaatcaaaggggaagctccacaaagcgacttctttggtcctggcagtgtctctgcatcacctgtgtccttccttttcccgtgccctgccctctgccccgcttctgctctactttcttgctatttgcctcctaaggcttcaaaatactgctaaacacatttctaaagccttctagacataggacagtttgtgtatgaatcattttatttaagaattaggacaatcttttttgttggaagtagaataaattgtgctccaatttcaggtgcttatgaaaaatacattgtaccacaacctgaatattatgttgtgtaaatccctccagccatctcatttggggcaacttttagataaggaatgaaattacttgtggtataatctataattatttttggcaaatgcatgagtttctcctgcttgaaatataaatgttttattaggtagccacagtatttggcccctgcatgggtgcttaattgaagaaaagaaagaaataacatctaaagatctgtgtttcatggacgtttgcgaaaatggccgtcacaactcatctggtagaccagaagaccaggtggacgtgacttatattaaatcttgccagagctggacatctggctcttcagttgttctggtttcaatttggatgtgaagcaccgttcttagtgtgattcaagtactagatccacttaaagagttcttgtgtagcccaggtctctgccatgtttgagagctgtggtttgttttttgacaggaaacctccatcagagtttattgtaggtatctcattagtaatttttagcatgccactgtgtaccaatgttgaactttatcagttgaattagagaccatgttaggacctgaatgacaacttccctaattaacctgaaccacattctggaacgccttttgacatattgttgccttgtaagtaaatggctccacttttttttttttcttttttcatacaaagacagttttctatctatcctcaagcacaccaaccatgttgttgttgttctgacttacggcatttgcttgatttattttccaccctgctcttctttgcttacgtaagtcctcaaatttctgcttaattgtaatgatccctgactaccttataaaggcatatctctgaggtatggtggattcagtaccagaccacagcaataaagcaattatcaaaataattaagtcacacaaatgttttagtttcccagtgcataaaacttaagtttacactatactgtacactgagtattcaatagtgttgtgtctacaaccggtacatatcttaatttagaaatactttattgctaaaaaaatgataatgatcgtctgatccttcagtaaatcctaatctttttgttagtgccacaacttgactccatgtttttggctgctgattgatcaggagggtagttgctgaaagttggggtgaatgtgacaattgccttaaataagacaacagtgaagtttgttgcattgattggctctttctttggtgaagtatttccctgtagcatgtgatcctatgtgataacattgtagccatggtagaacttctctcacaagtgaagtcaattctttcagaccctgctgcagctttatcaactcagttatgtaatgttctaaatattttgttgtcatctcaaagatggtcacagcatcttcagcaggagtgcgttccatctcaagaaactgacatttttgctcacccataagaagcaactcctcatttgtttgtttgatcatgagattgcagcaattcagtcacatcttcagtctccacttctatttctagttttcttgctctttataccatgtctctggtgattttctccattgaattcttggacccctccaagtcatctatgagggttggaatcaaattcttccaaacaactgttaatgttggtattttgatttcctctcatggatcacaaatgttctttatggcatctggaatggtgaatcatttccaggaggttttcaattgactttggccagatccatcagaggaatcactatctatggaagttatagccttatgaaatgtatttcttaaataataagacttgaaagttgaaatgactcattgatctatgggctgcagaatggatattgtgttagcaggaatcaaaacaacatgtacctctctgtccacctccatcaaaactcttgggagaccaggtgaattgtcaatgagaagtaatattttgaaaagaatctgttgtttttctgaacagtacatctcaagggtgagtttaaaatattcagtaaactgtgctgtaaaacagatatgctgtcatccaggctcgattgttctgtttatagagcaccatcagagtacatttagtataattcctaaggtacctatgatttttgaaatggcgaatgagcattggcttcaacttgaagtcaccagctgcattagcctctaaaaagagagtcaacttgtcctctgaggctttaaattcagttacttattttctcctttttagctataaaagtcctacatggcatcttattccactggaagcgtgttttatctacatggtaaatgtgtttagtgtagtcaccatcaattcttttttaagctagatcatccagataaacttctcgcagtgttccattagcacttgctgcttcaccttgcacttttattttatggagaaagcgtctttgcttcaaccatatgaatcaacctttgctagattcaaactttttttctgcagcttcctcacctctctcaactttcatagagatgaagggagttagggcctaatctaggctttggcttatgagaatgttgtggctggtttgatcttctatgtagagcactaatagttcctccatatcagcatgaaggctgtttcagtttgttattattcgtgtgtgcattggagtaacacttttaattttcttcaagaactctccctttgcattcacagcttggctaactggcacaagaggcctagccttttggcctttctcagctttcaatgtgccttaatcgctaagcttaataacttttagctttttctttaaaatgaaagaggtactactcttttttgtgcttgaatacttagaggccgttgccagattatcaatttgcctaataatatcactgtgtttcaggaaacaggaaggtctaaggagacagacagagatggggggaacggctggttgatagaccagtcagaacacagaaattattaaaataattacaataataacatcaaagattactaatcacagatcaccataacaaatacagtaataaggaaaagtttgaaatattgggagaattaaccagaatgcgacacataggcatgccatgagcacatactgtgtgaataatggtgctgatatactttcttgatgcagggttgccacaaactttcaaattgtaaaaaaaaacagtatctgtgaagaacaataaagtgaagtacaataaaatgaagcatgcctgtataaagtgattcatctagatattctttgattcactcatttgttttcgtcacgtatatcacgtgatgtataattattttctgaatatttactcattttttaacagtcttctcagctgttatgtaagctctctgaaacatagaaaattttgctaacctgttaaagagttacatttctagcacttaacactatccttgatatgtggtaatggtcagtaaatatttattgaatgagtcgaggaattgtgatcatctgtattgtttaggttacagaagagttaatttaaaaaaatagtatattttggctttccagtggttttagttgagtgtgattgtttaacaaaaatgtattgagcaactagctggctgccatgggggatttttaaagtgatggacagggtccttgtttctcaaagaatacgcattctagtatataatttggcatgtgtatggaagagtcaatgaaagattacgaaagacaaatggtggaggctcaaagctatgcttttattctcatgtgctggtggagtactactatggatctgataacagtaaatttgctgtctcatcagttacaatctgttcttcactattaattgagttataattctgggacactcactcagtccaaatctgacctgtgatattatcctcaaaataaatgcttgagaacaagtattatcctaaatttactgacaaagaaaggggagtctatgaggtaaaatacttttcttaatgatacatagttgtcaagatgcagtcaggggttcagccccatgttttctaaatccaagtcttaaatatttttctgtatacaacgttgcctttcttctttctaccccctttataagcaaaatgttaacaaaatgttttttctttctgcataataatttgacctttagttaactccctgcctctgatctgataaccttataaaagtggtacaccaaccaagttactaagcaaggttgctatgtcatgacccctgattggtaatttgcatatatactgggaagaattataaatgaattacacataccagatggtgctgccgtaatgttgtgattcctgagtatggtgacttacaaatggtatgcaccaggagggtggtcctgaaagctatgtccatgggattaatttagtacatatggactcctcgtggagcatgaggcttgtaaccaggatgactgtcatacccactggtatgtatcttgtcttcttgcacctgaggaacagtgtggattgctcctgataattctgcagaataatacctgatgctaccctgctggcaagctgtgattcttttttttttttttttttttttttgagacatggtctcatcctgtcacccaggatggagtgcggtattgtgatcacaatgactcactgcagtctcgagctcctggacccaagccatcctcccacttcagcctcctaagttgttgggaccaccggcatgcaccaccatgaccagcttattttttatttttatttttttgtagagacagtttctccttatcttgcacaggctggtctcgaattcctaggctgaagtgattttcccgccaaggcctcccaaagtgttgagattacaggtgtgagccactgtgcccagccaagcggtgattcttgtcctgtaaccttctaagtgtttgatgccaggtgacacttgtggtggtcttgtgagcttgaatgtttagctgaacctgaaaactcttgggtagagtcctagcaagtaaaatttttgatttttttatccacagataaacaaatatcttcaatcatttgtcttgatcttaatggccattgtcctgtaatgaatgaatttgggctttgaattttgtgagcttgaatgttaattgaacctgaaaactctttagtagagtcatagaaagtaaaatttttcattttatgcccacatatacacgaatatcttcaattactggtcttgatcttaatggccattaccctgtaatgaatgaatttgggctttgaattcaaagatattccacagattagttcacttattttaatgaagtttatgccttaaaatgagacagtttctccacttatccctatgttccacatgagaatattgaatgtcatttcttttataaaaaagagttccaaattcattgtgtaaagcatcctcatgaagtctgaagatttaatttgcttatatatcttattgtaataaagaagcaaattataattcggggctggggactggagtttaaaagaaatactttaaaaaatatttttaagagttaattagctttccagagtactgtgcatttaatatgtacatagaaagtgaggcttacattcacagcaatcagaacaaacaaagccacaagtgtgatattcagcaatgcacacagccctagagaagagcatgcataatattcaggccaacagaaaaatcactttcagataaactaacagaagaaggaatacctaaggtaaactaactggggcaatttctaatgaatgcaattgcactatgcaaggatggggcagtttcaataggttaaacaaaaataaaagtttggcttgattgttataatttgtcaaagtaaaccactgtaacatttaactacctcaatattttattgcaaatgacactaattagactgtgggttttttgtttgtttgtttgttttttggttcttgctttctcagagggcagagttcttaggcttagttctccacttcaatttagttcctttctgatactaatcaccagtgtaattaagatcattcctaagggcatctgagaaaatgcaaaaatggctagattttgcgctttgcagctttacctaagaccttaacaaaaatatcataatgaagctgaatattatgtatttttagcaataaataaatgtattataaatgaaattttgaaatcccacttcaaaattcaataattttgaatgaattattgaaattcaataaaattgtattgtattcaattatttcttatatttttaaataactgtctacttcaagtggtttttgtcattgttgttgcacaggtctattaattttaacacctttatagatttggtaaacatcattatattcaggatatgatacaagataaaagtcctttgctggataaataagttcattgcagatattaatatttttctcaatctgttaccccatcctttggttctattaacaatgtatcacagaaaaaaactcttcaattttataaagccaagtttattactatggattatgcatttggtgtcataactccagattggagtggccatgataggaatatgaatgaaacgaccatggttgcaatgaaagaaattatgtttggactcatcagcaccaatgtttgtttaccaggctttctgtgggtcatgcttttggtgtcataactccagatgacaaagatcttctatctgttcctctaaaggttttatggttatggattctatgtttagatctgtgatccattttaagttaaaacttttgtagaaagtatgaaatttacactaggttttttttgttgttggtggtggtgttactttttgttctgcatgtggatgttgaatggtatgaacaccatttactgaaaagggaatcttttttcttttgaattgcttttctgtttttgtcagaaatttaatgaccatattgggggagtatgtttatttctgtgttccttattttctattcagttggtcaatgtgtatatcctcccaccaattctgtatagtcttgattagttttacaggaagacttgaaattggatagtgtaatttctccaactgtgttcctttgccatttttttggtaattctagatcttttgccttcccaaataaattttaaaatcagcttgtctatactgacaaactatattcccatagagatttttttttcttgtcttattgaagtggctaggattactcaggacagtgttcagtctttcttcattaaatgacattgtaggtgtagtgtttttgtgaatgtcatttaataggttaggaaaaattatttttatttctagtttgctgcaataattttttaaatcgttaatgaacattaacttcttcatattatttttctgcatcagttggtaaaatcataagggatttcttttcggactgttaatataatggcttttataggttgattttcaaatattggtctggccttgcattacctggataaatccccctgaattgtggtttttatcctttttatatattgttggattcgatttgcaaatatggttttgaggattttttgcacttgtgtgaatgagggatattagaatatagtttacttttttgttcttgttttctttttctttggtactgtttttctctggacttgatatcatggtaatgacatccttataaatgatttggagaagtattcccttctcttttttttctgaaataaattttataaaattggtgttattttttctttaaatatttagtagaatctgccagttaaactatatggaaattgagatttctttttcaaaatttccttttttttcaaaatcaatttcttttaaatcggatgataaatgttatccatttcatcatcagtcatttttgcaatttgcagatttagaggaattggtccttttcaactaaaatgttggatttatgttcatagagttgttcatatattgctttattatccatttaatgtctgtagggtctataataatatgttctctttgattcttttcattggtaatctgtgtctcctaaaggtttaccaattttgttgattttttaaaaatcagtttttgttgttactgatattctcaattgcttttgatttttcaattccattgattttggcttttcatattcttattttcttgcttcaacttgctttgtgtttattttgctcctttttttctagctagttaagatggaaattttgaggtctctcttcttttcttatataagcatttaggccgggtgcagtggctcatgcctgtaatcccagcactttgggaggccaaggcaggcagatcatgaggtcaggagatcaagaccatcctggctaacgtggtgaaaccctgtctcttctaaaaatacaaaaaaaaaaaaaaaaaaaaaattagccaggcgtggtggcgggtgcctgtagtcccagctacttgagaggctgaggcaggagaatggcatgaacctgggaggcagagcttgcagatctcgccactgcactccacgctgggcgacagagcgagactccatctcaaaagaaaaaaaagcaaattttctcctatatttagcttcattttataaactctgtcactatattttcattgagtttaaaatattttataatttctcttgaaattttctttttgacccatagattatttagaagtgtgttgttagttttcaagtgtttaatgggaattttatgttttttttattaatgttctctgatttaattcagttacagagaacacgctgtgtatgattttaatgacttcaagtgcattgttgttagttttatgacccaggatatggtctatcctggggaatattccagatgcatgtgcatagaatgtatattctgctgttgttgggcagagtaacctataaatgtcaattagattcagttgacttatggaaattttcagtgcttctccgttcttgctggctctttatctatgtgttctatctgttaccaagagagaagtattgaagtcctacactatatttgtagctttgtctatttctattttcacaattgttggttttagatttacggatttagttctgatttttgtgcatacacaactaagatggttatgtcttcttggccacttgaccatagtgtaatggtatctttttaatgtcctttcctgtgcaatcgagatttttcctgttctttatatgctgagtaattttttatattatcttgaacattttatttttactgatctttgggatgttatttttctggccagaaacctgtggctgctggtgccttttccgcattttcctagggcccacagggcccattccatcctcttggcctagcaggctgcactcagctcatgctattggtatggatcacatgcctccaagggagactgtaagtcatggaggtgtggagtggtgaggggtgtgtgagcaagtgtggggtccggccactgtgctgtagacacgctggctgctgcagtagagtgggcagctccaggtgccggcatgggcgccggctctccaagaggctgtgattggaccaggcgttactgcaaacagcttccctgcctggcactggaaaatgtgggggtgcccggaagcttggagatgccaggaactgcagggccccaaagagggagtcacaggcctggtctggcatgtggagctcccaagtttgggctcctagaagggccacaaactccttctcttcttctctcctctccttctctttgcaatgtgttgagaaaggggcatctttctgccctgtttgtgttacagcccttttagctttgccattcagtaggtccgagttcttctcttgcaaccaggaagaatgaggtacatagacaagtgaagggtgagcaagacaagaggagctttactgagcaacagaacacctcagtctcccacagggagaaagctccttagctcctagcagagaaggtagctcttctctgcagacagattgtctcatgtgcttactcaaaggagagagggtagctcctccctgtagctagttgacccatcatctgctcagctgtggctgagcctggggcttttatgggcctcacatgggaggaaatgtgcaccaattggtccatgggtggccatgggtgggcccagaaaagtcactgcaattcccacttcagtgagtgggactggcagcctggcctgaaggtagggcctcaccagggacctgcccccttttgtccaggagcctgtctgcctcctgctgccgtccatgggcccaggctgctctcaccaaggggcacctataggtcagtgttgaactgccctaagcccctacttgtttcccccacccactctttggtgcccaaagtatggagcaggccagggtgcagggggatgatgtgtcagcactgctggagcgtgcacacacctggctgggctgtgatagcacccatgcttggccccaaccccactacaagatcggagcaggcactgggaatggggaaaggccaggaagtgagagcagtcaccaccaagcctgtggggtcaggagggccttcccagacccctgagggtgcagaatccagagatgcctgggacctgcacatgggaaggcagtggagcgcatgcatatgcacttggtagagcatacaggcagcaccagttgtgcctcctcacagcctgatttggggacttcaggtcctcacagggcccctctttgcccactcctctgtgcctgaccatgctgctcccctactggcagatggcttggcctggccccatcatggtgtctccatggaatgtggcaccatcccaggcccagctccacctcctccctgtgtcctccccacagcagcatcaggcaagagtggcgacacagggccgaatcccaagccatggattttatagtctgggcctctgggtaggtcccacctggctatgtgaaggtgggggtggtgtggttggctgtgtagtcggctgccttgggtatgtggggcaaagagacccactgctgccactgctgcttcttcagttccccctgctgccatcactcacatctccccactgcagccagcaccatggcagcagctgctccggattgcctgtagctgacatcattattacatgagactctgtcttgtttaaatgctgtggaaactgttgatatttatatttttagtggtcagttaagctggctgagtttaggccacaactttcaacttgccttctgtaggttgtagtcctgatgtcagataagttttcaagtcttcacagtgttacttggatctgtttcttgtgtgtaccttccagggtccaacttgagtcctgggtggtagactatatatggattcacttctcaaggtttttagtgtgctgaataggatcaagtctacatttagggagctgtagatgagcccaggtgtttataaaaatgtttgtggttactttctcaacattttctctgccattattctctggaattttccagttgtctgagccttctttttcccccaagcagagtgctgagactttagttaccactgtttaccatgaccttctgtaactgtgccagcacccagggccaagttttgggagggcagagaaaaaacatagttggtcctaccttctggaaccccagtgtgttgagttcagcccaggatatactggagggaaaaaattccaaactcattattggattaatggtattttgaattctgatcttcttctctactcttccatatactgtgtacttttcaaagccttcaaatagctggtccttgcagtctgtccgggttttgtggctgtcttcagtgagagtcatgttggaaggtgatcactcccatcttacctggggtcgaaacttttttattccattttttaaagtaattataatgctattgttccatcagtgtgatttaaattaatacttagtgccagggatggtggctatgcttataattccaacaactcaggtggctgaggcagaaggattgctggaggtcagaacttcaacattgcaagacccagcctctaaaaaaataaaataattaggcaggtgtggtggcatgtgcctataattgcagctactcaggaggctgtggccagacgattgattctaggatttcaaggctgcactgagctatgatcatgccacgacactccagtctgggtgacagggtgagacctgaatccttagataaataaataaatacacacacacacacacacacaaacacacacagcaaccactatgatgattgaaacatgtcagaatgcaaaagcaagaacacctctatttaataactgtaatataattttggagaattgatgggaggcaattgcttgcatttcttatagactattccaaattattaatgttaattacttaaaatgattttatttttacactgtagagttaaaataaccaactttcttgctgaatgaaactgtatgatagtaccttaatttacgtttcatttgtgtttcaatactctagcctaaaatcagtactttttctattttctatagaaaataataaaactttctatatctgaaactgtatacaggtgatgagctttgagttggatgcacagtaagatgttttgcttttaaaccagatatgcaaagagaggcaacgatctatgtggctttagcaagggaaaataacctgttgaactatttctttcactatatgttcaagagagtacttagggagaaagagattaattcatttttaatgctaggaaaatacagtcattaaaaagcagataatataaaacgccagaaatgcttttaacattactagaagtgcacttctttctgaaatagcttgttacttttggagatctagataggctgaggtattaaatattaaaatagagggtgctttttaaaatgcagtgtttcttatcagaaaaaacatttgaacaagcatttctgttgtataattcatgatattgctaataagatagtctaggagaattatttgttacgcttttgagaatgactgggattttttttttttatgagagagtattccctgttcatgtcctcttaaatatatatgagtactgttaaactatatgggatagtcacctgactgattttttcatattagtatggtctccctatattttatgggaaaatcaattcaaataagaatattaatgtgaattttgctaccttcaacagcatgagaagtcagcagcacattttaaactattgatgtaacaggaaaataagtgttggaaggatgtccctctgaacatttttattcagattttctgcaatagaaattagtatgacttgctattcctatttgtgtgtgtgtgcgtgtctgtgtgtgcgtgcgtgtgtgtgtgtgcatgcgcgcaactaaataatataaacgtagccactggtcttcaaaagaatgctcccctcttgacttctctccagtcttagtcatccattggcatgtcagtagctttttttatggtaggaacaagcaatgaaaagttgcccaacttgtttcaaataacaatccaactgcggggttctgcatgccacctcagttcatcagtaaacactatttacaaaaaatgtatccataagtttttgctacatcgtacttgaattattttggtggatagagttcttaatacataattgttgattactgtaagtgcttttccaaactttcacatttctatcactaaatagctaacatgtaaaaagtagaagtaatttttcaaggcatgttggttactgcctttgcttcagcattttctgcccttagaactatttatccaatattaaatgacttttttttgtaagatggcagaccttttattttgttcacactattttataaataaaatattggggtgtataaacatgattaaaatatgctatgtacaaatattaatatgtgactatgaaacatgattattttcttgaagcctattccaataatttagggaaaattttagaatttaaacattttcctgttaacattatgttataatccacttaaaaacattatgttataatccactttctaaatgagctgatatcagtgttcattattttataatagctataagaaccgcatgtagatattctgaggaaagttttgatgaaaaacacctccattgttctctgactagttataaatactgttggggaatgggtgatgcattcccagtggtttcatgtttaacattatttatatttaaatttttttatttatgaaaaacaaaagtgatattttagagtatcccagattttaaaatatttatttaatttaggaagaaaaaacaggtttttacaaattcatagaattaaagacaatttttgtaaattcaaattgtgtagttacctgaattcttaaatcatataaactgttttttccatgaatgagagaaaggaagatccctcttgactttatggatgttagagctgccttcacatgctagaggcattgctctacaatttttcttttgcaacattcctctggtttgggctgatagtaacatttttatgatgtttaaacaagttttcatgcttccaaggaaaactgaagagaatgactggattagtaagatcttgcagtagattagagaactgccaaaactcagttaatttaactatcattagcaaacagttcacaaataaatagtttattttcttaaaaaaaggaggatgtaatcagagccatatttgaaaatgtgcatataacttacagaattgagagttggtactcttttaaggataattctcatatattgagctaagagtgcacaaatcagtaaaatctggctacataaaattattttttctccaaagaagctagtatttgagagttcctttaattactgcttccttaactatttgtttcttatgtgcagagtgagtacagacttaacagcaggtgttcattttaatataagaacaaatgtatgaaggcttttaatcttaacatagtaccgtatatgagctgcttatttagagttattaatatataagatagttaatggtacttggattatctctttgcattttttttgtcttattacatctgtttaaatggaggcttttagagtagctagagcctggtcattgggcattttggggacatttactatgagatggctattgggaaggtttaaatctggtcaagaaatgatttctctctttagaaaattcagcctagaaatcatagaacaaactagaaatgttagatgcccaggctcggtgttttaatctatgagttataacatagttctagtctccagtgaaaaaagtcgtcaataagacatggcccaggtctcacagccatttttttcttcagttcttctctttaggccaaataatgcctaaatgtgcttgagaagtacaggttgaataaatgactacctgaaatccccatttacaaattggtctgatacagagtagatttctcagaatgtcttcaccagacagtatagtttttggtaaactgtatctgtgtaaattgtcaccctgacatcaacaagtggcaccaacacaggcataatttaccagaaaaaaattcctgaaattatcatggttctataagcaaattctggaggtgaggtgcagttgtttcaaatacatcctcctccttcagagtatttatctgaatcttctggatccatagcacatgaaggagaatttcagagtgagatcacctggttttggcactgggagcaatgtgatcattgttatggcagtgattatgtgagggacatgttactagtaaaacttaaggaaatcatgttacaggtcagtcagtatatgatgtgtctctatgaagtgtacctgaactttggaagataacctcccaaacttaccaaaactacacacccaacctattttactggtactttaaaggacaaataatactgtcagaagtaattttggaaatagctctgaagactactatattataggcatgttggaccttttgagagagggggagatatttacaaagtcctgtagctggctacatgggtgtactcagaaagggaaattttccatgcaggctgtagcctaagctactggagtgaacaaaccataaagaattgtttgctggaggcttgttgaaccagacatctagattttgaaggataggccttgcaaccagaataaagctacatctttgttaaaaggagcacacctgcttggaagatgggtggaatagaattatgtcttgggaaactattaccaattcaaaaaatgtgaatttagcatttatctctttttaggatagttcctaaaaaggaactaagaaccagatccaaaaactatagatttaaatttgaagggcaagctcgatttgacaattgtacaagtataaaatttctgagcttggaagcaaacctacaagcaaaaaacaggctgagcaacatcaagcacgataaacatttcaaaatatccatagggaaagcataaaagcaggattgtatgtagctacagaggacacaaagatgatctgagaagttaaagttaggagaagtatctaacaattagcgctgttcagcatgggatgaagggctcgacgtggtggctcatgcttgtagtctcagcactttgggaggccaaggcgggcagatcaccttaggtcaggagttcgagaccagcccagccaacgtggtgagacccccccccatctctactaaaaataaaaaaattagctaggtgtggtggtatgctatcaaaagttagaagatttaattcagcaaacatttatggatcatctactttgtactgtgatctacattacctttaggatcacttgccgtcagcaatgttgtgatttggggatcattataagagagagttcatatagaaggctgaaaattgtgagtaataatcatacggtgtagtcttctggattaaaacaatgatttatttctcatggagagtgagacagaaacagccctggccatatctctatggtttaattcattctggaaacaaataaatgagacatgcatatagaggggaatctgtgaaatcattgctgggaaatgaaatttacaacaaaggcaagataagagttgcattttagaaacattgataagtgaatgtcaaatcatacatgagacagttttgttactttggcaacatagacattattctttatttctgataagcagtgttactttaattcccacctgtggcttttgtctctgtgtctccaagggacattaatgcttaaatgaaaactaatcaacattttaaactgtaatatacacattgatttaggggaaatatgtttctttaatattgttctcaatgcattgtagaaaattatccaggtgattcctttacttacatttctttaaagggtaaccttttgaattaaataaaaaaatttagttatattttctcttttcaaacggttgaaatggatgaaatataagcttgatactatgaacagaagttttgcaacagaattatttattttgctattttataagatgagtttaaaaaccaggtagggggacaagaacgtgatttttggaaaaaataacagctttatcatgttataatttacacacaataaagctcaccatcttgaatatacagtactgtggttttaatatattaataaagttgtgctttgatcaccactctcgatttcttgaacattttagtatcactcccaaagaaaccctgtatccactagtggtcactccgtattgccctggttccctatcccttggcaactactaatctaccttctgtctctatagatttgtatatttctttacttagtgtagtatgttcaagggtcatctacactgtagcacatggaagaatgccattcctttttattgcctaataattttctattgtgtgaacatgccactttttgtttatctgttcatcatttgatagacatttgagttgtttctgctctttgcatattatgactaatgctgttatgaacatttgcttatatgtttttatgtgagggacatatgtcttcatttttagtgagtgaatacctaggagtggatcgtacggtagttccatatttgactgtttgagaaacatccagattgtttcctgaagcatctgtggcatttttcagtgctactagcaatgcatgagggttccagttctccacatcctcaacaatacttgctatttgtccctttgattatagtcatcgcagtggtcgtaaagtggtatctcattgtggttttggtttgtattttcctgatggctgacaattttgagcattagctctttgtaggagctgattgtttgtatatctcttttgaaatgtctattcagatttcttattcatttttaaatgaggtgattcatctttttatttgtgtattgtaaggagtatttatatatttggaatatgggccctttagtcaatatataatttgcaaatatgttctctcattctgtgtattgtcttttcactttcttgatgctgtcctttgatgcacaaaatttttcaaattttgttgttgttgatttatcttttttcatttgtcacttgtttctttggtgttatagctaagaatccaagattatggatctttactcttgttttcttatatgagtgtttatagttttagctcttacatttaggtctcagatcctgtagccttatttttttggtgataatttttgtatattttgtgaagtagggatccagcttcattttttttttgtacgtagatactcagttgtggcagaatcatttgttgaatacactgtaatttcctccattgaatggccatggcacccttagccatacggacaaggatttatttctggactctcaattctattattgtctgtttatgctcatgctagtagtacagtgccttggttactaccattttgtattaagacttgaaattgaggagtgagtcctgcaaatttgttcttttacaagatcatttttactatttgcgttcccttgcatttccaaaccaatgttataatgagcttgtcaatttttttaaagggtggctgagattttgacagaaattgtattcaatctttggatcaattttggagtgttgccaccttaacactatttagtcttgtgatccatgatcatgagatgtctttacacttatttaggtctttaatttagttcaataatattttgtaaatttcagcgtacgcctcttacacttctttcgttacatttattcctaggtactttattcctaatttcattttcaggttcctctttgttagtgtgtagaaacacaagtgcttttcttctgttaatttcagaattaacagccttgctaaactcatttattaattatataattaacaaattttaaggattttctatatacaagattatacatctctgaatattgtatctttatttcttcctttccaaactggatgctttttaatttcttttccttgcttaattgcccttctgagggtctaattaaaaacaagaattaattcaccaaagataaaatgccaactaattcgttgtttctcctatattttactacagttaatttgagaatctgttcatagaggatcctaaaatatagcacaatgcagtttatattaatcaaatcaaaagtaacctatcatgaagaaataaagttaaatttagaggtatattagttgcattctacttgattcataggcctaagttaatgggtaagaaatctcttgctcaggaatagaaggcaaaaccacagaaaataaaagaaaagaaacaaaagcaccaggtggcatggaatgtttaaaatatactgggattcatatattttgtattttcctttttgttacaggaaattatagaccccaaattgagatgtatgaaacaaagagttgtgtagcaagtacgtttgtaataatcaaatagtatttattttcattttacgcaatttaccatatggaggttttctaaatctatttaagatgtctttgttacgtgcatttttgaaacgtgctttgtggtctgtaagtctgcttgcattttagagtacaagagtgcatagctggttttccttaggagaccgtaaatgtgaccaagagcctaaggacttggctcagtgttacccatgacagacaggcactcatcctgatagccaggtggagattttctgactttgatcacttcgtacatgcatgttacaatactggcaattgttttattaaatatttctttaatgcataatcttcattttcattttagcaagggcatggagacatacgtagtttgatttctcataattaaatcctggagtcccacctttcactgatgtatcattttattagaaattggacaaaaaactttaggttctcaattaaaccaatatattgaaatcactgtgcttttttagttaactgatatgattactattgtgaaacttatcagtcaataatcatgtagcagagatgcttttaactagataagtacttactggtttgatatactttgtgttgtaaaaagtaataaatcattagttattatatagaaattagaatgttaattttctagtttttaccaatatctgattatttctatccattcagtcatctattcaattatatctaagatacttttaataataaacttccaatcgatttgcaggctttatgctatcctgcaataattctaacttaaattattatattttaaaattgacttgctatttccaaatgtgatagcatatatgtttgtagtgtaatttagtaataaaaagagccctaaaataatgtttagtcatatgtggttttatgttttaattaatcattcggcaataagaatgcggctcatggtagaaacagtgtttctaaatggtggctgcattgtgctattagcccacagagtgttgtttcaattgtcagtgtgactaaaattatattagatcacatttctccctaacacagctaatgctggaataacttatttggaaattagctacatattgtgtgccctgtatttgaatgtcacaagacttatttgtgtagaaaacagaacactcaccaaggtgtattctttacagtgggttttgaatcatttaactattttccttgtttagactcttagagcaaattggttttaacttaatcctgggaaaagatgcacttttgtacaaaaaaagtattaaaattttgtaaatatttcagaaaatgtggtgcttatggatccagggtgtgttatctccttcagcatctgccatagcaacagtttttttgggttattctctcactacttgatgtaaaatgtagttcattctttacattatcatccttgttttaataacagatatcattttctgtaggatatttttatcactttaggaagtgaaactgtttttagttctccaagaatctataattaattgttgtgaaacagataccctagttaaatcaggtatgtcagtataccttatgcaaattgtctcactggtatttgtttgtaatctcacagaaatcaatttgacaaaaggctgtatattctgaaagatttttgtctctaatcccgagtatgctgtgaacctcttttgggaatattataattttctgcttagaataatatatccttaagtttttccatgttaagataatacttccttgcatattatcataaccattttctcttttttgcaggttttatattactagttatacttttttgaattaccattttatttaaaatacatttgaatctttgcctttgaaaacaatgtcaaacttgaaatattgcttaatttcttgtagtctattaaattgaatgtatgtatataataaattaaatgataatgaaatacagataattatagcttagtaactcaaaaattctttgaatttgtcaattctgtgttagcgatgactattgctatgacagaaattttagggaaatgtactttcattttaaagcactcatcaatatttaagaaacattaattgtgcattactttcaaagatctaatgaatttgtagagttattcttcaataaataaatacattaaaatatacatacagcatatgtaataaacacaaattttcttatagtttccaagtcaggaattattaaacagcagtatggtaaaggcaaagaggtatttacagcttgatgtgataacacaaagaaggggcagttagccccccctggagatgttctatctggagaagaacaacagtaatggaaggctttttaaaggaattaattcttggactaagttttaaaatacgactaaaattaaccaaataatgaatttatgagaaggaagagaaggacattctagcacaaaggggagtcccacaggtatgaaagcacaggtggaaaaaaagcttatgtgggacaggcggtggcatcataagattttgttctagccaaaagcataatccagccaaacttgaggttcagtagacccattctgatagctcatgttagatagagttgggaggatcccattagatctgatgaccagtcaggagtcgtagtaagggacagatttcgggctcttgagaagatggaaaatattacatgaccattcatctcagatgctggacatagtcttgtttatgctatttacttcattttcattattaatagctctctgtacactcctttagtcccccaaagtttcttgatttcgtagataatttatatagttaccttggacatgttccaaatttgtttatgaataagtttaattgagtgttgagaaagcaaaatgaccctcagattcctggtacaatccaccaggtggacagtgatgccactagtgaaaacaggtgaggcggtttgatggggttcaggcaggaggtggggtacagtaatggttagtttattcttgtagctgttgtacctgtcaggtttgagatttttgcagttcttcatatatatttgtccaggtaatgatggggtatatgattctgaagctcagggaagagatctggaatggaattcagacttaagacagattattatatcagcaagatcattatctgttatctttcttggataaacttggaattaagaagagaaaatgactaactatggaaacctgggaaatatgtacactttagggtaggtggaggaagaataggcataaaaggcggagaaaataataagccaagcaagaaaattgttgcatgaatgtgaccaagaaagagaatttcaaaaataaagatatccctcagtgtagtagagacaagtggtaagaaaataatctaaagtaatctgtgggatgtgtcaataatgtggtgttggtggctcaacaggaatcatttcagttgggtagaactgaactcaggagaggatgggaggtgagcaaatgtcacagtgaaggtagattatattctgaggaattatacatgacaaggaagagacatatgtagctccaaatgttcatggcctgcagtggtcaaggaagattttatttttaagaaacataaatatttttatagatgcacaattcccaaactgtgtttttggaatactgttaacaggtgatacatgaagaatttattttctaaccaatgaagtcacaaaaactctggatttaataaagtaaaagagatttctgaacatccattagtttctcagcagccattgatgtgctaataaacattgtttatatccaaaataggaaaaacaatatgcagtgatttctaaatattttggcaactgactgctcttttccaaaacaaatctattaactccatagtgtaagagaccatcttggccgggcacggtggctcacacctgtaatcccagcactttgggaggccaaggcaggtggatcacgaggtcaggagatcgagaccatcctggccaacatggtgaaaacccatctctactaaaaatacaaaaattagctgggtgtggtggcatgcgcctgtaatcccagctatttgggagcctgaggcaggagaatagcttgaaccagggagttggaggttgcagtaagctgagatcgtgccaccatactccagcctggcgacagagcgagactccatctcaaaaaaaaaaaaaacaaaaaaaccccaaaaaacacaaaaaaacaaaaaaacaaagagaccatctcaaagtcaagcataaactggtgtgatgaaaataatatacacacacttacagcagggctgatacctcgcagtttgctcactcccttattcattgtttgtggccagaggccattctaactagtgttaaatatcttgactgtcattttcataacatcacagtccaaatatgagtattgaaggagatcattattgcaagattcttttaaatttttaaatttttttttaacttttattttaagttcagggatatatgtccaggtttgctacataggtaaacgtatgtcataggattgtgttgtacagactgttttcattacccaggtactaagcctagttatttttcctaatcttctcccttctcccatcctctaccctcagacaggccccaatgtgtattttctcctctgtgtgttcattaacatagcgcctgctagtaaacgtgtgttattaataatttcttaatattattgctgttattatctgaaggaatacctttaagaaacccttgggtaacatgagtgtagaactatatttggaggaggaacgagggggtaaggaagacacagaaagttgaaaaagaacagttttggattgagggttgatcatgtatcttccctgtccataccccttgttgcttttacttgaccacatcatttgtattggaacactgtgctgttcaggaaagaagtaggatgacatttaaaaacatgatatttttctttcttcattttgtagaagcagtaacgtgaaatccgcatgttctaggggaaataatagtagtcacttaagcttatcaaaaccaaattaaaattaaaattgttttgaatctgttttatttactgaaaattttagagacaaagtactatcatctatcttctctacctcatcatactgccaaggcatttacaagttaaacaataaaaataaacaaaatctataacatatatattatttatttacatatacacacttttttattatactttaagttctagggtacatgtgcacaacgtgcaggtttgttacatatgtatacatgtgccaagttggtgtgctgcacccactaactcgtcatttacattaggtatatcgcctaatgctatccctcccccctcctttcaccccacaacaggccccggtgtgtgatgttccccttcctgtgtccaagtgttctcattgttcaaatcccaactattagtgagaacatgtggtgtttggttttttgtccttgcgatagtttgctcataatgatggtttccagcttcatccatgtccctacaaaggatgtgaactcatccttctttatggctgcatagtattccatggtgtacatgtgccacattttcttaatctagtctatcattgatggacatttgggttggatccaagtctttgctattgtgaatagtgctgcaataaacatacgtgtgcatgtgtctttatagcagcatgatttataatcctttggctatatacccagtaatgggatggctaggtcaaatggtatttctagttttagatccttgaggagtcgccacactgtcttccacaatggttgaactagtttacactcccaccaacagtgtaagagtgttcctatttctccacatcctctccagcacctgttgtttcctgactttttaatgatcgccattctaactggtgtgagatggtatctcagtgtggttttgatttgcatttctctgatggccagtgatgatgagcattttttcatgtattttttggctgcataaatatcttcttttgagaagtatctgttcatatactttgcccactttttgatggggttgtttgtttttttcttgtacgtgtgtttgaattctttgtagattctggatattagacctttgtcagatgagtagattgcaaaaattttctcccattctataggttgcctgttcccgctgatggtagtttcttttgctgtgcagaagctctttagtttaattagatcccatttgtcaattttggcttttgttgccattgctcttggtgttttagtcatgaagtccttgcccatgcctatgtcctgaattgtattgcctaggttttcttctagggtttttatggttttaggtctaacatttaagtctttaatccatcttgaattaatttttgtataaggtgtaaggaaaggatccagtttcagctttctacatatggctagccagttttcccagtgacatttactaaatacggaatcctttccctatttcttgcttttgtcaggtttgtcaaagatcagatggttgtagatgtgtggtattatttctgagggctctgttctgttccactggtctatatctctgttttggtaccagtaccatgctgttttggttactgtagccttgtagtatagtttaaagacaggtagtgtgatgcctccagctttgttcttttggcttaggattgtcttggcaatgtgggctcttttttggtttcatatgaactttaaagtagttttttccaattctgtgaagaaagtcattggtagcttgatggggatggcattgaatctataaattaccttgggcagtatggccattttcacaatattgattcttcctatccatgagcatggaatgttcttccatttgtttgtgtcctcttttattttgttgagcagtggtttgtagttctccttgaagaggtccttcacgtcccttgtaagttggattcctaggtattttattctctttgaagcaattgtgaatgggagttcactcatgatttggctctctgtctgttattggtgtataagaatgcttgtgatttttgcacattgattttgtatcctgagactttgctggagttgcttatcagcttaaggagattttgggctgagatgatggggttttctaaatatacaatcatgtcatctgcaaacagggacaatttgacttcctcttttcctaattgaataccctttatttttttctcctgcctgatggccctggccagaacttccaacactatgttgaataggagtggtgagagagggcatccctgtcttgtgccagttttcaaagggaatgcttccagtttttgcccattcagtatgatattggctgtgggtgtgtcataaatagctcttattattttgagatatgtcccatcaatacctaatttattgagagtttttagcacgaagggctgttgaattttgtcaaaggccttttctgcctctattgagataatcatgtggtttttgtctttggttctgtttaccaaattaaaattaaattgttttgaatctgttatatttactgaaaattttagagacaaagtactataatctgtcttctcaaccttatcacactgccaaggcttttacaagttaataaaaataaaatctataacatatatatgatgtacttacatatacacactatttttaatccatgttttgaagttggtccactattattatttctttttttttttttttttcaacttgagtgatttttttttcttttttttttttgagttttttttttttttattattatactttaagttttagggtacatgtgcacgttgtgcaggttagttacatatgtatacatgtgccatgctggtgcgctgcacccactaactcgtcatctagcattaggtatatctcccagtgctatccctcccccctccccccaccccaccacagtccccagagtgtgatattccccttcctgtgtccatgtgatctgattgttcaattcccacccatgagtgagaatatgcggtgtttggttttttgttcttgcgatagtttactgagaatgatggtttccaatttcatccatgtccctacaaaggacatgaactcatcattttttatggctgcatagtattccatggtgtatatgtgccacattttcttaatccagtctatcattgttggacatttgggttggttccaagtctttgctattgtgaataatgccgcaataaacatatgtgtgcatgtgtctttatagcagcatgatttatagtcctttgagtatatacccagtaatgggatggctgggtcaaatggtatttctagttctagatccctgaggaatcgccacactgacttccacaatggttgaactagtttacagtcccaccaacagtgtaaaagtgttcctatttctccacatcctctccagcacctgttgtttcctgacattttaatgattgccattctaactggtgtgagatggtatctcattgtggttttgatttgcatttctctgatggccagtgatggtgagcattttttcatgtattttttggctgcataaatgtcttcttttgagaagtgtctgttcatgtccttcgcccactttttgatggggttgtttgtttttttcttgtaaatttgtttgagttcattgtagattctggatattagccctttgtcagatgagtaggttgcgaaaattttctcccatgttgtaggttgcctgttcactctgatggtagtttcttttgctgtgcagaagctctttagtttaattagatcccatttgtcaattttggcttttgttgccattgcttttggtgttttggacatgaagtccttgcccacgcctgtgtcctgaatggtaatgcctaggttttcttctagggtttttatggttttaggtctaatgtttaagtctttaatccatcttgaattgatttttgtataaggtgtaaggaagggatccagtttcagctttctacatatgtctagccagttttcccagcaccatttattaaatagggaatcctttccccattgcttatttttctgaggtttgtcaaagatcagatagttgtaggtatgcggcgttatttctgagggctctgttctgctccattgatctttatctctgttttggtaccagtaccatgctgttttggttactgtagccttgtagtatagtttgaagtcaggtagtgtgatgcctccagctttgttcttttggcttaggattgacttggcgatgcggtctcttttttggttccatatgaactttaaagtagttttttccaattctgtgaagaaagtcattggtagcttgatggggatggcattgaatctgtaaattaccttgggcagtatggccattttcaccatattgattcttcctacccatgagcatggaatgttcttccatttgtttgtatcctcttttatttccttgagcagtggtttgtagttctccttgaagaggtccttcacatcccttgtaagttggattcctaggtatttaattctctttgaagcaattgtgaatgggagttcactcatgatttggctctctgtttgtctgttgttggtgtataagaatgcttgtgatttttctacattgattttgtatcctgagactttgctgaagttgcttatcagcttaaggagattttgggctgagacgatggggttttctggataaacaatcatgtcgtctgcaaacagggacaatttgacttcctcttttccctattgaataccctttatttccttctcctgcctgattgccccggccagaacttccaacactatgttgaataggagtggtgagagagggcatccctgtcttgtgccagttttcaaagggaatgcttctagtttttgcccattcggtatgatattggctgtgggtttgtcatagatagctcttattattttgaaatacgtcccatcaagacctaatttactgagagtttttagcatgaagggttgttgaattttgtcaaaggctttttctgcatctattgagataatcatgtggtttttgtctttggctctgtttatatgctggattacatttattgattggcatatattgaaccagccttgcatcccagggatgaagcccacttgatcatggtggataagctttttgatgtgctgctggattcggtttgccagtattttattgaggatttttgcatcaatgttcatcaaggatattggtctaaaattctcttttttggttgtgtctctgcctggctttggtatcagaatgatgctggcctcataaaatgagttagggaggattccctctttttctattgattggaatagtttcagaaggaatggtaccagttcctccttgtacctctggtagaatttggctgtgaatccatctggtcctggactctttttggttggtaaactattgattattgccacaatttcagctcctgttattggtctattcagagattcaacttcttcctggtttagtcttgggagagtttatgtgtcgaggaatgtatccatttcttctagattttctagtttatttgcgtagaggtgtttgtagtattctctgatggtagtttgtatttctgtgggatcggtggtgatatcccctttatcattttttattgtgtctatttgattcttctctctttttttctttattagtcttgctagcggtctatcaattttgttgatcctttcaaaaaaccagctcctggattccttgattttttgatgggttttttgtgtctctatttccttcagttctgctctgatcttggttatttcttgccttctgctagcttttgaatttgtttgctcttgctcttctagttcttttaattgtgatgttagggtgtcaattttggatctttcctgctttctcttgtgggcatttagtgctataaatttccctctacacactgcattgaatgcgtcccagagattctggtatgttgtgtctttgttctcgttggtttcaaagaacatctttatttctgccttcatttcgttatgtacccagtagtcattcaggagcaggttgttcagtttccatgtagttgagcggctttgagtgagattcttaatcctgagctctagtttgattgcactgtggtctgagagatagtttgttataatttctgttcttttacatttgctgaggagtgctttacttccaactctgtggtcaattttggaataggtgtggtgtgatgctgaaaaaaatgtatattctgttgatttgtggtggagagttctgtagatgtctattaggtccgcttggtgcagcgctgagttcaattcctgggtatccttgttgactttctgtctcgttgatctgtctaatgttgacagtggggtgttaaagtctcccattattaatgtgtgggagtctaagtctctttgtaggtcactcaggacttgctttatgaatctgggtgctcctgtattgggtgcatatatatttaggatagttagctcctcttgttgaattgatccctttaccattatgtaatggccttctttgtctcttttgatctttgttggtttaaagtctgttttatcagagactaggattgcaacccctgcctttttttgttttccatttgcttggtagatcttcctccatccttttattttgagcctatgtgtgtctctgcacgtgagatgggtttcctgaatacagcacactgatgggtcttgactttttatccagcttgccagtctgtgtcttttaattggagaatttagtccatttacatttaaagttaatattgttatgtgggaatttgatcctgtcattatgatgttagctggtgattttactcgttagttgatgcagtttcttcctagtctcaatggtctttacattttggcatgattttgcagcggctggtaccggttgttcctttccatgtttagcacttccttcaggagctctttcagggcaggcctggtggtgacaaaatctctcagcatttgcttgtgtgtaaagtattttatttctccttcacttatgaagcttagtttggctggatatgaaattctgggttgaaaattcttttctttaagaatgttgaatattggcccccactctcttctggcttgtagggtttctgccgagagatccgctgttggtctgatgggcttccctttgagggtaacccgacctttctctctggctgcccttaacattttttccttcatttcaactttggtgaatctgacaattatgtgtcttggagttgctcttcttgaggagtatctttgtggcgttctctgtatttcctgaatctgaacgttggcctgccttgctagattggggaagttctcctggataatatcctgcagagtgttttccaacttggttccattctccgcatcactttcaggtacaccaatcagacgtagatttggtcttttcacatagtcgcatatttcttggaggctttgctcatttctttttattcttttttctctaaacttcccttctcacttcatttcattcatttcatcttccattgttgataccctttcctccagttgatcgcatcagctcctgaggcttctgcattcttcacgtagttctcgagccttggttttcagctccatcagctcctttaagcacttctctgtattggttattctagttatacattcttctaaatttttttcaaagttttcaacttctttgcctttggtttgaatgtcctcccatagctcagagtaatttgatcgtctgaagccttcttctctcagctcgtcaaaatcattctccatccagctttgttccgttgctggtgaggaactgcgttcctttggaggaggagaggtgctctgctttttagagtttccagtttttctgttctgttttttccccatctttgtggttttatctacttttggtctttgatgatggtgatgtacagatgggttttcggtgtggatgtcctttctgtttgttagtattccttctaacagacaggaccctcagctgcaggtctgttggaataccctgccgtgtgaggtgtcagtgtgcccctgctggggggtgtctcccagttaggctgctcgggggtcaggggtcagggacccacttgaggaggcagtctgcccgttctcagatctccagctgcgtgctgggagaaccactgctctcttcaaagctgtcagacagggacatttaagtctgcagaggttactgctgtctttttgtttgtctgtgccctgcccccagaggtggatcctacagagggaggcaggcctccttgagctgtggtgggctccacccagttggagcttcctggctgctttgtttacctaagcaagcctgggcaatggttggcgcccctcccccagccttgctgcctccttgcagtttgatctcagactgctgtgctagcaatcagcgagagtccgtgggcgtaggaccctccgagccaggtgtgggatatagtctcgtggtgcgccgttttttaagctggtctgaaaagcacaatattcgggtgggagtgacccgatttttcaggtgcgtccctcacccctttctttgactcggaaaaggaactccctgaccccttgcgcttcccaagtgaggcaatgcctcgccctgcttcggctcgcgcacccactggcctgcgcccactgtctggcactccctagggagatgaacccattacctcagatggaaatgcagaaatcacccgtcttctgcgtcgctcatgctgggagctgtagaccggagctgttcctattcggccatcttggctcctcccactattattatttcttaacaaaacttaactagtgttaatcaaaaattttaaagcctggggtttacattcaacactgctttatagagacagacaacatattgcagtggaggagcatatagactttggagccagattgtctggctctgccatttacaagctctgtgaccttgggcaacttacttaatctctctgtgcttcagcttcttcatctgtaaaaactgtggtaatttagaacctattctatacagttatcatgatgatttaataagttaatatttgtgaagtgctttaagatgtgcctgacacagaggacttattttataaatagtctgtgttaaacataatatatacaagattgagtctgctaggatgaaaaatacagatttataattttttttccttcctgatctaaacattgctaggcaattggaggattatgaacaccaacccaagttgcatttcttgtcaacctgctttcgatgcgttaatccgaggaaggttgcaatggcttgtgagatgatgacactgatgccctcgtgctgctgcagcctgactctctatggttgattctgtctgcatcactttaggagtaaaagattaaaacaacaaaaatctagatttttttcctcaggtttcatgaaagcataatgttttactttcacattggatcagatagtagcctagggcatctacattcacattgtgtcctgattgctcatgtgaaagctaaagtaacaccactttctttatcataaggtgatgagacttgtcaccccgctttatgaacagcaaattcttagctcagggagcagccaggggcaggtcataaaataaaggattacagagcaaagatattagtgaaagagaagcatcagcgcttcttactgtatttaactcaaagacgatgaggtctgcctggggagctaataccacttaactgtgtttgggcaaaaagccaaaaggaaattgtatttcaaagagggaaggtctggcattccatatgctgggtaatcccagtcagttaacagggatgtatggccatttatcacagaaaatgaaggctaaaaagaaacttttatgtgaaagaacacaatgttgatatagtttgaagctgaaggacaattgataacgtatcaggtctttaaattattcaagttaaaatagttgagaaacagaactggcatctttgtggaccaagtctcacataaacttagtttgtaccctgtattaactgaaccatagaaccagtaatggtgatcatgacaaataaataaatcaaatgcattccagaagcccccttagagttccagagagccagggctgtccttggggaaatcttgtagttcaaatcaacttctgcctaaagaaggtgtattggagggtaaaatgcagttaaacctattgtctcagatgtgttggggtagactgtgctcaaatatttctaactttgtagtactggttagaaagaaggatgtcatcttctatatgctttcttgagtcactgaagagcttagaccagttgccccaggtggccgtactttaaggatagcttcaagatatggaataccataagctggctgccatgtttcctcctaatttgccaatttgtttctcctgttctttctgctcctggtgagttcttagaagccactagacaacctgtgcagctaatgatcaaatattgtccagctctggcctttggatgtctttcccagcttctggtcctttcctgctagtcacttgggctgcttttgtccctgccattagagccctcactcagtacatgcttaaatacaacagtcatgatacccttttaattgagggtgaactgtctgatttcttacatatacctacaaacacctgaggatggcatttaaaacatcttattgtctgacctggtttggctgtgtccccacccaaatctcaacttgaattgtgtctcccagaaatcccatgtgttgtgggaggaattgaatcatggaggttggtctttcttgtgctactctcatgatagtgagtaagtctcatgagatctgatgggtttatcaggggtttctgcttttgcttcttcctcatttttccccttgctgctgccatgtaagaggtacttttcatttcccgccatgaatctgaggcctccccagccacgtggaactgtaagttcaactaaacctctttttgttcccagtttcggttatgttgttatcagcagcattaaaatgaactaatatattgtcccatttgtaaatatatgtgtgccatattctttatgatattactttatctgttttttaatttcattgccatccagagactttttctcaaaatcctagttatttaaatcttctcatagttctcccatgaattggattatttgttagcataatagaatgcagggtagaggatctaaagtgcctatatagaaagccttgtgttttaattttatttctatgaattcatttgtgtattcattcagcatttatttattgattctggaaatgtatttgagtaaggaaacaaaaattaacatagtatatccacaatccttaattgtcacacacacacacacacacacacacacagaaacacatacacacatgttttgagggcaaaggcagccacagtttacagtaaagtctacttgtgagcaaattcagctgactatccatgtggttcttatggaattattaaggatatggattattggttttaagattaaaaaagagtttgtttccacatctgcttagttgtcagagatccaaattcacactaaactcaagagtttctgttgtcataaaagggagtttgttaggacaaggcaaagtccttagaagacatttagacacttgaacattctgtcaaagtcatcagtcagctcctgctgccactggggtttccatttttcatattggcattcacttcatgagaaagaactgccatcctcatctctaagcgtgtcctggaacgggactgagttagggcacttgtcctctctgacttcatatgccagtcatagaataggcaatggcatggattatactgattaattcatgagctagcttctcctgcatgtgggaggagtgaacacctgaatgaaaatctggacaaagttaggaaatagaatagggaggcggatgctgagtggacgacatgctgatttctggcacttccttgcaaactgcaactaggatctagctctttcaaacctcagtagagaaatgaatatatctctcattatttatgattctttccttagatttgttgatgtttgactgtgacagccacgagttgcctttcttgtgttacaaagttagatgtgacttgactgagcttttagtatagtaaattgtaactgcttttaaatttcaaggtatgccttaggatgagtgtctgtggaggcttttgcttgtatcttcccagcttcatctgtgaatgacaatcttacacactcttcaaggctcacttggcccgtttctgccgtggaaagtcatcactcttcagtgcttacagcacttcctgcttgtcattccctctgtttctcagtgctgaatccttttattttttggcattctttggcatacttaaacccaccacgagcagataggacagatgctgtaagcaattccaggttggcatttggtgtgagctacagggagggaaggcatggaaacaggaaatcttaagtgctggcagaagagtaactgtgggactaacggatttatctgatgattcctgtaataacttggtaaggaataagaaagcaaaacacttagaattttgaaaagagagtgtagagacctggatgatgtcaaggttgtggctagtgaataaatttagagcttcagatcgttggaataaaagagcatttgaggaacagttggagccggcaagctatgccagggccagctagtaggagaacattttcatttgtgcttctatgaagcagtgaaaaaactcatttctatatgaaaggcatccaaactgcaaaaaaaataattgcatattacttaatatcccacgaacatatatctattttacatcctcaaagctcttcttcaacattaactcgtatgttttatttggaaccaaatcaatgcatgatagaaatattttttaaagtttttaaacagctctgtttaaatatcagttttccataacgaaaatcttgttcttgcaccatgagagggcttccatataatcattttttaaggagtgtagaaagtgttatgcttaaaaatagacaatgagcactaagaacattaagtttgtaacagcaattctaagctgtttcttccaaaactgttgcccaatctctcccacaggaaagccttgtacaacatgtcacactcaagacattaatccatgtggatgtgttagaaattacacctgaaaatggcaatgacctcagtctaggtctgtgatgcactgttgtgttaacaagaactttttgttactttatgcacattttctgtactatctgagagatgccagtatcttatccacacacgagaactttattctaaatatttgtaaattttccacctgcagtcagtcaattattataaataagatgaaaaacacttgtactgtttcctgtaaccaatacattgtttaattaaggaggattgctaagcctgaaaacataaagatagttggtagtgggttttgaagtcatagaggacattttctaaaatgcttaaatctcacacttctgggtaccaatttgattcagactcctctaaagagaaatagcactctgggggaataatcagccccaagaactatacctattagaaaatctctcaccttatataaggtagagaaccagaagtggtgagaaaacttccttctgtgaaggaatcagggcttgaggtcccatacgcttatttctagaacagaaattactttgcaaaattttctatgaaatcttccctaaatttcagactgtcaaagttgacataaaaatgagtaatagttttttgttttgttttctttgtttgtttgaaattttgcacaactttatccattcagaaatgtgggtgttgaaccacaaaactgatagagtgccttccaaatattaactgaaatatgtattagaaaaattaagaagtgacaaaaagaagagtttactgcatcttcacatttcatgtgagacactgagttcgtctccacataaatggaagcaaaataagctgaaacacaaacaaacctgtggtttcaattcggcttgtggaccaccagtttgaaatatctaaattactgccttgacttcatatctttacaaatgtttcatataaaccagaaattacttaaccatagtagtagtcttttcacataattcttttttacagttttcagataactaaagcaacattatatccatgtttaataatttgaaatgctcacttctagtagaatgtagaatagtatatattaaagagtgttaacttgaagatcagagattttatgctagaatatatattggtcttttaaaatgtttcttcctcaatctaaagtaatagacccaggcacatttaaaatcttcaggctttctgtatatctagttcattaagtagcaatatgttcagttgtgggaaattgttacttttcaaggtaacaatgtagatcccaaaagccctggttaacagttcttaaacataaacacaaaacaggacaaaaacaaaacaaacaaaaataaatcagttctccagaaaaagagagtgagagggagggggagaaagagagtgagagcgagagagcaagaaagagagagagagagaaatttcactaatgtaatgaatatgccccacatactttgtaaataacaatattttaaatataaattccatatagccaatggactcttacagaatgtgttcttcaatttttgccaaactcttacatctatacccaacctgtggttttaattgactaacaagtgtagtttgaatgttggttgatgtttttgtttacattaatgagaaagacaaatgtgaaattaccaagatgtgttggaacttcatttgttcatcagtgatgtgagtaactgctgaattggataatagttttggaacactggaagaatatttcttcaacattttttatgctattcacagtgtgacagctatagagatagtatgttataacgtttttctgtattattatcatgctttctgcttcttagtctagacaatcagcaaaacaataaacaaagccctgatttgtaatatttgccaatttccatggggtaaatgctcctaccacggttagcttcaagttagcaatgtgatgtcactgtatgtagaattaggaagggctgcgtgtagcacattattatataatatttctaccagatactatagatgtaactaacttcaaaagcataggtaataataaaatgtactaaaataattatgaaaaaagtttaaaattttaaaaaaagaagagtttaaacatttgccaactaatttattgtagataaggttgcactttggcaaaactgtgaagtagatagaaaatatttttgtaatccattcattgttttacctcccttccatacatcctcaccatgggcataccatcctgtatcatttaggactactagttatcaattcatgtacatcatctcatttaatgtgcacccattttataacaggaaagttgagtctcagggaagcttattgctaccaagttctaaattacaactatgacaaatactgcacatctttgttgtctcacacaagtttatttcttgctcacacaagttatttgttgctgtgggtctgggtgaatctttagggcagcagttagcacaattttctataaaggaccagacagtaaatattttaagcattgctagccaaagggcaacattgagcaataatctcgctgcagggatagcagttattttcatatttcacttttcaaaatgtaaacaccatttttagctggtgggccacagaaaacaggctgcaagagggatttttcctctaggtcagtgtttgctgactcctgctcttagatagcagtcctcaacatggacattggtgaatggtgataatgcctgttattgctggatattccatttgtgtgtatatcggaatctactactggaagctgtagcaatggaatcttatgtggtggggggactagatgagagaaagccatagtaagaattctagggcttgagtggtacagcattgacggaagctgtcatctctatcagaaagagaaaagtgaatgctaataacctcaactactttgtgttaagtataatgttttaaaatagaaccagttacagagaggttgtgacatttttggtggatgacattgacattttcatatttagacaatatgagatatagtatataatcacttgtaatttttgagaaataagataaaccctttagatttagcaccttcctttctaatacaacattcttccgagaaaaaaagtttgatattttgcctttttgattgttttttgattaaatgcttaaggaaaaattacaaaaagtgcattttacttacttttcaaactataaagaaagagtacaacattaaggtactggcgggttttgagtaggagagagaaaatgatcaattcaactgaaaaacataacacctttgattcgataatcctgttagattaaaattaaagatgtggaatgtgttaaaaacaaagacagatgttattttgatatatggtttaaaagttgattttcccttcaaaagttattagaattagcaaataagaatataggatgcctgattaaatatgagttccaaatattgaacaggacatacttacaccaacaacatcctaaacatatataatatatgacacataccttgggttctctcaaccccttctccccacttctgtatgatttacagagcatcctgcatattctgccaacacattataaaaataaaaacaacatagtttttttttttttttttctgctttccctcactggattgtaacttttttggggtgaaacctgggtcttattcatcattgtatctttagtgataagcccatattttgttgcagtaaaggtactttattagtattaaatgaatgaatgcattggctcaaatagctggagggaaggataaaggtcagaaatcttgaggtgataataattattcttaaaaagaaaaataacatttccaatagtataataaaataattaccaataattatctaaaaaaaacaacaacattgagttcctactatctgccattcacatgccaaagaaattttctgtatggtgtttagtcctctgacaacctcaggaaactgagcatcagaaaggtaaagttatttgttcctgttcatattactagtaaatatatagccaggtacaagtcaaagttatgtctaaccctagtgctgttctcttacacagtacaaatctgtacctctttgagtgtgaaacaaaccatgacagtttaacaaaataatgggccaatgtaataatatgttgtgttgctgtagtttattttgagacatatttgatggaaacggatgtgaaaggaatacaaaggtagttgatctggagttcagattgcattaaacatagcataatatttacagccatgttatggtgatacaattaatatagtagtatattagtcaaaatgtcatattagcaggggcctaagagaagcccttggccttgctttagcctcattttttgcagtagttatgatctgtaaactagctgcacactggattgccaaatattgaacttttgctcctgggggaaatacatggttaggtcccctgtaagtctctagttacactattttcattagcttattagcatacatccttgttttatgtgtgttactgtttaaaaactctcattctctctctcacacacgtgcacacacacacacacacacagagacagagagagagagagagagaaagagagattaacattgcacttacagccagtggcactcaaccaacactctaactcgtctgagtgaagcttatctgacatgcatattttcttataaggctcatcactgccttctgcttagggacattagacagcagttcagcactacagctgggggccattttaaacagtgaaatcaccaaggaaaagcacaaaaatgcaaaagaatttatatatggcactaaatagaccatgaaaggggcacttgtttaagtgtgacaattgaaacaaggcaaagcattgctttgtttgtcctcagctgggaacatgtgtatcagatgactcaaactgcttgctgctctgcacaggttagtgaatgactatgaaagtgctgtattactttgggacataggaataaattgtagtgaataagaagatttgcaaaacaggacctgcaaacattgaggactgcctgtgtatctattataaaatagactcgttattcccattcctaagatttgggctatgtgcgtttttctactttatctcattcttctcctgttgttgtcattggatacagttattgctgccgaggttatgtcctgtgaccactaggctttgtttgctgtaagccatttcttcagataggagaaagttgtttattgggtctggtttggtatgttagcatatctgcacagttcagagcccactccaccccacttctatcattaatgaagtgagagaaaggttaggagctctccattaaacccacagaatgtattctaaggtggattcatttgtttagaggatttgcaaaatttgaggggggctgtgtacttggtggattgtttcatgcactttcagctagccaataagaaattaaccattttatcttgggaaatgtttcccgtgctttattccagtaagaaaaactgagagttcactaacttggtagctattaggatattactcaaatgatcattatactagcatgtccggaagtcaaaaggaagaggtaaaagataactcttccatatgaggctgacttaccaatatgtactttcctttccctgtgggagggctaggcatttctggaggctataaactcttccaggctaccagtgcatctcagaactttaatttttgaaatggtaccctagaggtcttataattgaggctctaagcagacaattaatggttccataacccactttataagcatggtggtttctatttgaatatcctggctctaaactttctctcttctttcagactataaggaatgtactttaaaaagcccggagtaggccgggcgtggtggctcacacctgtaatcccggcactttgggaggccgaggtgggcggatcgcgatgtcaggagatcaaatccatcctggctaacacggtgaaaccctgtctctactaaaaaaaaaagaaaatacaaaaaaaaaaaaaaaaattagccgggcgtggcggcgggcgcctgtagtcccagctactcgggaggctgagacagaatggtgtgaacccgggagggaggcgaagcttgcagtgagccgagatcgtgccactgcactacagcctgggcgacagagcgagactccgtctcaaaaaaaaaaaaaaaaaaaaaaaaaaaaagcccggagtatattcacactcagacaaggactggtcaacttacttgctttgtgtggagcatccctgtgaaagataaacaggaaagtaggaaagtggaaaacaggaagtctaggagcagctctgccgttatctacctgaagcttcggccgaattaatcagacttaatagatcacatcgagaagactggactagagcccaccttctctctcctttctctctccatttatcattctttaatttggtgacagtttctttactcttcctgttccacagcagagcttagataccatcaactcttcaaatcttttaatcaacgaagatgcaactaactcctcccttcccccaaatctagtaaaacacttgatattattacacaacacatttaaaatagctatttatagaaaaagatctataggtcagctcactactttaattccaatgagcagcttcagtccatggaacttcagtattatggataatgatatagccagcaaatatctaagtgttatagacatagatcgtattatagataatttgtctttttatgtttttcttttttggttcgccaatatcgacatgagtgacatgagtcagtagggtataaaaaattctcaaaaaattacttttcctgtcctgacatatagaatgtttttcgaggtaggtggaaagttatcacttgtctctttattgacaggagggaatgaggagcaagatatgaatgtttttctgtttaataaacacattgattagcttgtctctaccaactactgtgcttaccgctaagcatatgaaaaaaaaaaagtcctctgtgatttaaaagtctaagagatttactagagagttaaaaaacttaagaaatctaatatttatttattcaacaaatatgcattgagtggctcccatgtcccaggcactgttttacatgctgggaatatagcttctggacttaaacacttttattctagtagagggagagaagatttaattaagcaagttgtaaagaactataatctggcaacaaatattataaggaaaactaagcagggtaaagggataaagagtgatgagaggtttattttaggagggatagtcaaggttgtattttacaagggatagtccattggaaaacaactgggaataggctactctgatttgttctttaaaattaggcagttatagaaggcctcccttttaggggatgtgtgagcaggaattagggaaatggaaagcaagtcaccaactgtctgggagaagaagcttcctgacaaagggaatacagagtgcaaaatccctgaggtgggactacacccagcatgtttaagcaaggtgaggctggtgtggccaaaggaaacagaaaagggaagatactacaaaatgaaggcagagaagaagcagaggctgaaatcatcttgggccacaaaggctggattttattctgagagagctagaataactttgaaagttttgagtgaaggacagacatgattttacttatgtattaacaaaaggtttactcaggctactgtgctgagaatatattgtagaaaaagtgttgagtattacatgtccagcacaggtggcagacggatggtgaattcattctgttcctaaaggtagagaggtattgtcttcctaggcatcagtacagtcggagcagggctttagaggaaatgtggatcttttctagggaaagggtggagggaagacattgcaggtaggggagaaagctgagctaagaggaagtgagcagtggtatactgtaaagtgaaaagactggcagtggtatgtgttgagcctggaaaatgtatctgtatgtccttctgaagaattaggcttcatcttgctaatggttggaagcccctgaagacctgtaagcaggggagcttatggtcggtcacctgttgagaggtgactccactgggaagatggagggtgattgatggcagagcaagccttcagagtagtgagggaagcagtggttccagtgacttgagcacataccagttggggtgaacagaagaggcaaaattaataggtgcatttgagttagacttaaaatcatttgagttatcctttaaaactaaaagcacatcatgctaccaagttcattgaaattgtgcaccttccaatgtaaagatttattgatggccattttatcaggcaacaagtcaggtgatgacatgttaaaagctgtttccaaaatgaattacattctccatgtagtataaatatcaaatgaatgtagtagttatgccttaatagtatgaaagaattgggctgccttcctctccaataacacgtcatggttgacatggattcaaaggctcatttgttgctgctcttcttgactcaaagaaagggtacatcttcatttaactcagcacagggtctgagaacaagccttgtgaaatcttagaacaatataatgagtaaaccaaatgccttccattgatagtcttagaatgcccttgaagagtatttgcttattcataatgatgattattttcttaaagcttctgtctaaatgttaatatctgtggacataccaaagcaacttgcctcaaacatgagagccctcaccgagttccacaggctctttgaagtatggatttaacaccatttgttccatgtgttttgaacagcaaaagtagtaaaagacatgcaggtgcttgtcattgagaaaaagaaaactctcaaatattcatgaagtgcctgctattgcattttaatttactttaggaaattgcctactttgttattcatttttgttttgcataatagttaggacagctctgcttggtttctgattcttaggcgcctgtgcagatgcagatttctcagatacctagcacacagatttttctgttgaatcataaattgaatttctttcatgagaaggtaatttatactttaaggcatatttttgttaataaactgggttcttctgaatgtttttttctcttcagcactcctgaaattaaacattatgtctgtctctctaatattttatgccctcaaaccaattttggcataattttatgggtttttgtgaaattttgttacatgtaatgtgtagtgatcaaggcaggatatttaggatgtctatctcttgagtacaatacatttttgttaatatggtcaccctagtctgctatcaaacattgaatttgttccttctaactatatgtttgtatccttcgacccacttctcttcatcttccctctcccccaaatcagccttctcagtctctgttatctatctttccactctctacctccatgtgatcaacatttttagttcccacctataagtgagagcatgcaatatttgtcttttttgtgcctggcttattcacttaagttaatgaccttaagttccatccatgttgctgcaaatgacgtgattttatactttttaattgctgaagagtattccattgtgtatatataccacattttcttcattcatctgttaatagacagtttgattccttatctttgctattgtgaatagtgctgcaagaaacatgcaaatgcaggtatcctttgatgttttggtttcatttcctttgagtatatacccagtagtgggattcctggattgaatggtaattgtgtttgtcgttttttgaataatctccacactgttttctactagcgtgttaccactaacagcgtataagctttttcttttctctacatcctcaccaacatgttattttgtctttctaagactagctattctgaccggggtaagatgatatctcattgtggttttggtttccatttccctgatcataagtgatgttgagcagtttttttgtatacctcttggccatttgtatgttttcttttgagaaatatatatatatatatatatgtgtatatatatatgtgtatatatatatatatatattcatgtcctttggccattttttaatgagattatttgtttttttttcctgttgagttttttgagttccttgaatattctggatgttagtcccctgtcggatgaatagtttgcaaatattttcccccattcaacaggttgtctctttactctgtttattatttcttttgctgtgcagaagcattttaaaaattaagtcccttttgtctcctagattttattgtctgatcttttaaggtcttagtcgtaagttctttgtctagaacaatatacaggaggggtttccttaggttttctactagtatttttatagtttcaggtcttatatttaagtctttattttgagttgatttttgtacagtgagaaatagaggtctagtttcattcttctgtgtatggatattcaattttcccatttattgaaggtggtttcctttccccaatataaatttttttggctttgtcaaagattagttggctctaaatatgtggctttatttctgggttctctattatgtttcattggtctgtgtatctacttttttccaatactgtggtgtcttggctactttagccttgtaataatttttgaagtgatgtaatggaatacttccagctttgttctttttgctaaggattgctttggctatttggagtctggttccatatgaattttaggatcgttttttctaattctatgaagaatgacattgttattttgatagagattgcattgaatctgtagattgctttgggcaatatggtcattttaatgatattgattcttcccatccatgagcatgggatattttgccatttgtttgtgttttttcaatttctttcacccaagttttgtagtttgccttgtatagatctttccccttttgtttaatgtattccaaggctttggggtttttttgtttgtttgtttttgtagctattttaaatgggattgcctgcttgatttctttgttgactagatcattagtggtgtacagaaatgctacaaatttttgtacattgcttttgtattctacaactttactgaattcatttatcaaatctaagagatattttggtggaatcttcaggctttcctaaatatgaggtcatatcatcagcaaaaatggacaatttgacctctccttttccaatttggatgcattttatttctttctgattgctctggctaagacttccagggctatactgaataaaagtagtgaaagtgagcatccttgacttgttccagttctgacaggaaaggatttcaacttttccccatttagtatgctgttagttgtgtgtttgtcatatatggcctttgttatattgaggtgtgttctgtctatgtttagtttgtttttaatcctaaagggatattgaattatataaaatgttttttgtgtgtcagttgaaatcgttttttctttcattctattgacatgatgtatcagcttaattgatttgtgtatcttgaatcatccttgcagtcctgctataaatcctacttgatcatggtgtatcatcttcttgatttgctgttggattcagtttgcttgtattttatggaggatttttacatctatgttcattagggatattggcaagtagttttctttttttgttgtgtcatctgatattggttatcagggtgatgctggcctcattaaatgagttgggaaaaatttggttaggagaaggaagaagatactagttatttgtgaggttatgtggtaactgcaagtgggttgattttaggataaaaatttgtagctaaatggtaggttgtttcaaaaattggcattatctagatattaaacaataatatgctaaaaggattttctatacacaaaagcagataactataatatcagagatattatagaactgagaatgataaaactactttttctaaagtatatatgaaaatcagatttaaaaaggctactacagtgcaaggtgtccatttaacttgagtaaattagctatgctagatattcatggctgatctgtatcatatgctaggaggacttgactttgttagctattgtccttgaaaaactgagccattgctgtaaactggattacaaacttgagtccctggaattaatctttgcttttcactggttctctctccagtgtagcttctgttgggaatcaagcgggagtaagatgaacactttgtgtagtagtttccaccttttttattacagctcagactttaaatctacattttactctcatcaatagaatcattcttaccacctcacctcagtccccggatgcccctgggatgataaaccaatgacagttacaattgaccttttgttttcttttcattttctgccttctttcaattgtgtaattgtaaaatacatgtgttcaacataaacctagccaaatcaaattggtgatctttgccctgaaaattcattgtaattttactattgtcaccttatattgtttgactatgattctaggttttacctttgtgtctggtaattagtaaatgttggtattctcaaagtgaatcttatcatgttcttctgccttgtggtgttcattataatgcaccagagatattctaaaataaaagcctggatttgggatttaggcaattactcaataactcctcctgcccttttgcagtctcttggtagtcactcaaaggacacagctattgcacgattgcacgatttctgtgatgccagacttgtctgactaaacctctactttatgcagactgaatatttttatagcccttcattaaagtccttgggttgtaagtgctgagaatcagcctctctgatgattttcccaaacaccagtggcatgaaatcccatgaacgaatcctttgctgaatgatggcttttttttttttttttttcggtgtttcactctcgttgcccaggctggagtgtaatggagcaatcttggctcactgcaacctccacctcccaggttgaagcgattgtcctgcctcagcctcccaagtaggtgggattacaggcacccaccaccacgcccagctaatttttgtatttttagtagaaacagagtttcaccgtgttggccaggctggtctcaaactcctgacctcagtgatccacccgcctcagcctcccgaaatgctgggattacaggtgtgagccaccactcctggtcacattcatcttttcactagtaaccagaaagacttggattatttgagaagttggttggctgaacagacgtctgtgtggcaggagggaagccataggtgctctgttggtttagagagccttactgcactcaatcccagaatacaagaagagtcaactgttagcagttttgcggtctattttaccttttctcataatattctctcaagggaaaataagactcacaaccactcaataacattaaggaacaagaataaatatggactccaaaaatgttagggcaaaactctacatggggccagaagctccttggaacagataactttgaggctgtattgtaaatacacagtgagtataatttatcttttcagagcatctcacatccttggtaggcatatgcaatggtcattggaactactcccacatatacagattctcctgcgtatgggcacatgttagaattttatttcactattcccttttaagttaggtatggctacatgatttatttttctatgaaatgtgagtagaaatgaactgtctcgtttccagatggaggctttaaaagtcagactgggatttgttcagagaagggaatgagttagcctgaattattgagtgttcatgagggacagaatcccctaccaacctgtattggacgtagagtcgtcgtgaggaaaaaaacaaacaaacaaaacaaacaaacaaaaacacatttggcattgcttgttatatgaaaattacataactcattgctatgggctgaatatttgtgtgtctcccaaaattcatgcattgaagctcgcatccccagtgtgatggcatttagagagggggcctttgtggggtaaccaggtgatgagggtggaggctcatggtagtatctgtgtgcccctacaagaaaacagagagcttgtctcctttctctcttgctatctccactgcctgtctttgctctcactctcgcttttgtcctctctctgccatgtgagtgagtatacggtaagaagatggtcatctttaaatcaggcgaagggtcctcactagatgccaaatctgctggcacctgggtcttggagttttcagcctccagaactttaagacacacatttcagttatttaagccacccagcctatgatcttcttgttacagcagcctgaactaagacattaatctggactgttaccatttatttgtttttatagctcttttaaattgcatgaagtaatgcatgctatgtagggataatcaaatatgtttttataatacatttaatagatgtctattcagcaatttcttttggagatggattggagcttggattttgcctccaccaatggctaacttcagaaacttgggcaaattatttaaattttgtgagccttatgtttcttcaattgcaaatgatggcaataccacttacctcataggtttgtcctgaaaatgaaatgattaattgtatgtaagtcacccagtaaaattccaaaggcaaaataaatactgaaaatatattcattcttactagtctgtcttttaaatactgactagtgacgtatcatgttaaataaatgctcttgctctcaagtatcttgtagtagagtatttagacacacaattaaccataaataaaatacaaagtgaaactcactattaaggatccacaaatgaagtacttgaaatctcagaaaaagtcatatctatagaaaaattctatagaaattttgagctctaggcacacacgcagaaagccaaggaaaatagtaaatatctagcaaaactcacatagtggcttatgtaagtcatttcctaaaaaattcccaaggtatttttttaacttgttttatcaaaatccatttagagatcgacagcttttcttgcaacattggtgaaagctctttcagaactctgttactgtagaagcttgccatgtgaaaaattcattagcagcaagtttgaaatcttaaaagccagtgtgtgttttagaggagtagctagcccatcagtaaaaagagtagagtaaaaggttcacatcaaaagagaaatcttcacagcaccgatgttatcaactctctccagatgtgcagttttctatgttgcactcactttttcatgtgtcattagcaaccttatatcttaacatggaatgcttgaatggagtccttattaatgaagtcgccaagcccaatctattcatcaaatatggtcttggggttagaacattctggaatatgcagggaagaatgcccagaattgtggacctcccatactgccaatttaccaggagagttttgccaggaagtggggcacaggtacaattggaaacaagctgtgaatacatttttcaagagacaggcataggttttcaacaccagtaaaaggtttctgaacaaaagcaaaaatcaatgtaagttaagttttaatgggaaataaaaaaaataattacttataaaagtaggaaaagaagaaacccttcaagatagaacaacatgggatatcctatctatgcacaaagcaaaacaaaaccaaaaaggtatttattttgcatttttatattatgctctgtgagcaacaggtgtataagaacatatatgtgggatgaaggaaattggtagcttagctgcctgtgggctcctctgaatttttaaactataaaatcacctccagcttttgaattgggtggatatgcagttagctaggttttgcagcagtctctttgaattagaaagatcattaccatcagtagcttggtcaggactgtatgtggtggggccaaagctaaccaatagtacaaagagactttgaatacatgttctatgccaggcattatgtagctctctcttgctagaaaagcaagatgtggattttaagggaaaattattttgaactcacttgttatttttagatgcattcatagacaaagagagaattactgtgtactattgtcaccaaacgttaaagagaaatatgaggtttaataaggcaacaagaatcacctgatacttttcctcttgtaccttgtgtctcagaaacacctttcatcacaggaatgatggagtatctaaggaagatgtacttaggaagaacaaatgtaagataatatgatttcttgcctcatatttaatttccatggccctttggggataatgtgttttcaaggccaagcctccttttcaggcaaccagataataagaagtgctacattttcatatgctaacttgggaaaattattcatttttaaaatttaattgctttaattcttgaagttcatggctgtaattttcagatgatgtgaatcactcagtggaggttttgtttgttatttgtttgaaattagattctttttccattcgccataattaattcattcacatttggtgctctttgcatttttatgttctttatgctttatttgggaagttaatttggagagaaattaactccaactagacttcagtggctgttgtaatttttttagtcagatctgcccagaacatcacttaaaaatgaccatttcataggtttgtttcaagcatcagtatattgtgggtgttaacctatcttggcatgtactacagcaagagctcttaataactccagtgagggaatacaaatctttctttgggtagagtgacaaggagtgccatgaaaatgccttcatattagataaggttcacatttaaaaagcacataagtcagcaattttagtctattcaatgcttaaaatcagtggctatttttccttttcagcaaatctctcttctaattttagttatagtaaaattcagggaagaaattgcttattaatattattattattatttttaggggtatatgtagtaaaactgtaagatgatacttacatccaggtagtagcttcttggagttttgaatgtcaaatttattcatttatcaaacagtttttcagttttgtttgggatacaaagttgattcttttaaaggagcctcagagcacaggagctcacagaatcctgaattttatgtctatcgaagagaaaatggtggttaaatgctacttcctctctgaaaacttatctagacagagttttgatcattatctatgtcctgttttggagacttcccggcttccttaattattttctttatgtggatacattcaaatgtaaacctataagtgtgcctctttttctgagcacagatgggccttaatctagttccgtcaactcttcttgcttctccacttttccaatctgttagtcacacctctatcagacacctggaggcaaaccctactaccgtctttgacacctctctcatccttagcttcacttcttgaaaacagagcctttgacatcctaattcatattctgatatttaaaatatgtataaattgaacatttcattagggaaatcaaagttccttaactgttatcttagtaaacatcaagttttctcatagtgagctacaaaataatgccagcagagggaagataacacttgctttgggactctcttgggccagtagttaagcctctgtgagcctttgttttcttctctgcaaatggtaaatgcaatagggcctttctcaaagaattactgtaattcttaaatatgattaagatttaaaagcactttgtttcccaagtagcaatataaattgtgtttattatgcaggactgtgttgatagttaacaaagtgtaagacatcagtataaaagaacaggatttctaggctaaaccagggattagcaaactaaggtcagtaggccgtacctagtttgcacacagtattagtaaataaggttttattggaacatagccacactaattcatttatgtattgtgtatggctgctgtcatttcagctacacaggcagagttgagtagttgtaatagagatcttatgtaccgcaaagactgaaatagttaaaaatattaaaagcctaaagtatttttctaaaatttaaagcttaaactatctggccttttgcagaaaagtttgcttacttctgcctaaggcacctaccaaaactggtgtaacttttctgtattcttctacattcaaactgaccatcctccaatttatagaataggttttagaattttatctcatttaacatttattagtttaatgaactttaaacaaattatagaagatgttacatatgcaaacatgcacatctgtgtgtttctgttacacacacatacacacacattcttccgtaaaagtggggcaatttccacacattagcaatgtacaaaaagcttaaactacattttcctagtacaaggccaagatagaaacactaaacaaaatctgatcttcaacctgaaaatcactttctgcataataatgtctgagttgatgaagggaaaaaataaaagggatacactttaatttgcacttgagtagattatttttttctgatgtgattatgacagttaaaataaaacactcaccaaagcacatcttagcatcacagtcaatgtttgagtttgattgcattccagtctgctgggttctgggaggcggatgacactcccctcttagagaaacaggtaaccattcaatagagcctaaatagatgaggctctttcatgcctggctcagactgtaattaaaagaaaaatctaaaagttatatttctaagttactctatattctttgactctgtattctttgtgaaacagaaaatgtgaaaattcaacgtctttaaaagaatgctttgctatggttttttataaaaactgaaacgaattttgtcatcagctaagaattgtattaaattgaattttgtaatgaaacagtgtaactattctctgcaagacttatttgacatcttaattttcttgcctattctaacatagaaagtgtcagctgttcattcatcatagattttactaaacttcagcatataaacttgtgatgaatgattaagacacattaggccaactgggttggctctagttttcattttcaagaaccttaaaaagctttgatttgcagctgttagaagcaagttaaaatattatcagaataccaccaacttggaaagtgcagctgatatattactggtgactgtgcgaaattatagcattgtccaatccaggtaccagatggtccatcttccttgatttgaggagcattggttgactacaaattttacttgctgccctaggcttgttattgaccattagcatgtgagttacagattccttaaattctttgccaggtgacaaattgacctattaacaagtcactttctcaaaaaaatgcattaatgtttttcaatcaaaggaccagttgcaaatgagcaacattttaataagtattagttttgctttaaaggaatcagtaagtatcctcacaagccaagttgctgaaatagactttaaaaaaaaaaaacacttgaagatttttaagagtgttggaaaattttgaaacaagtcttttaaaaatataattaacatgtaaagattctctgtgttttaattctttaatagcatgttcttttggtgattttctgtgaatagcatttatggagtatagataaagtagaaaacataataaatttggactgtttttcatagtagataacttacatggacaaactatacaggcatggagatgacataataaacttatagacaaactatagacaaactatactatagacaaactatatatacttatagacaaactatacaggcatggagatgacatgatattggagttcagaaacccacctttttacttctgtctcggaactgatgaggtgagccaaagagtttcatctatagagtgtggaggtcacgttaagtaatctctacattatcttttacatttaaaatataagaactttagtaatctaattgtgattatcaatggaaatgtacacgtatatgttagattttgtatttaagaagtaatttcattagtacttgaaatttaagggaatataaggaaatcttttagtggaatactgctgtctctgaaaaccatcacctataaagcatctagttgaacagattttaggaatctgttgagataatttattctagagtcttaaactggaataatattgcattttctttctaagagagatacagaagtctaagaattaactccaggggaagatttattttcttttcttttctttttttttagggtgaaagtggtatatgtactaaatgaaattatcttgatgcgatagaccagtatacttggtaaagctacttgatatactaatttcatcacttaaatgtgacagccactgggatttccagcagtgctactattctggacctattaatgcttcagaacttacttgtcttatgttggcaggtgcttgtgaacgctggtgcaggctgattagccattgcttttacagttatcacttttactttgaactgtctacaatgcctgccttatttctgaaggagggtgccccatgggcttccatggctcttcatacagcatgactgctcttgaaaaatgctaacaggttgtgacaaatactaagataatatactgtaacatacttatatgaggtgattggtggcaaggcatcatttcttgtgctaacattaagttctccagtggtattgggctcattccccagctatgtgtttaaaataatgacatagttgagggtgtattttcaggtagcttttaatgatgggaaaactccaaaatttgggaagaagacaataagtgcagtttattttatcatatgctaggttttaggtatagactttctttttccttttctaatttgttaatcttttctagatacacatagaaagactaggttttatttaagtcacctttatccttagctttccttttaaaataagtatcaattactttctattgtgctgtttcattttatcttaaatttatattttagataaaagtgtgacagactttgaaacaagtcaaaatgattgctgggtatctttggtggaaaactaagcagtttctaggcacaccctctgggttatctgattatatggggtctctgcgcctgtcattatctttgagctattttacaactctgttggttagagataattgatagcaatgcaaatgattcttgtctgtagacatgcaaattaattttgtcccatagaagcacaactgatttttagcttccaatctcaccccattccgattcctggaataatccagttttgtgttcatgtataattcatttcatcattaagttttgctaacatttttgtggttttttgaattcaccattgaactagttgtaacttcttacttattttcccattaattagctaaataacatccctgacaaatgtttatcttacatatgtatggactatgattatatcctctgttaaatattatcctttaacaatattccctttatggcagaaatgttggagatgtgttttattatatacttatgctccggtcatgctagatgaatcctgagaatctggcttccaaaaagatcatgcttcagaggagatgagctaagtcatcaaagacaaaacaaaacagtggatgtagccagtgtgagtaactttggctctcactgattccttcccgctgctctgcagataggctaaaatccggaggcatttttttggctatcaaattcaaacttagcagcagattggaagcaagtcttttctttgccatggaagaggttgaaagagaagtgctggtggctcctatctgaattgctacttggctgcacatttcagtgattttgtttagcatctgaaggagacaaaggtggagggaagaggaaggaaaaagcagtttgatgtcagaaagttatttctccaatatcatctatgtctttggatcaaaaagaaagagggaaaaaatatatatatatatatatacaaatacatacacacacacacatatgtgtatacatatacatatatgtgtgtaacatggtgtatgacattttacacacacgtgtgtatatatgtacccatatatacatatacacaatattatccatatatgtacatatatacacatacatatacacatatatggataatattgtgtatatgtatatatgggtacatatatacacatatgtacatatacacatatatggataatattgtgtatatttatatatgtgtgtgtaaataacatataagggtaatatttaaaagaggatatatatatgcatgtgtatatgtatataaacacatgtatatatgtgtgtatatgtatgtatgtgtatatatatatcctcttttaaatattatccttacagttggtgtatgacattttacacacacacacatacacacatatgacattttacacacatacacatacatatatgtgtatatacatatttgtgtgtgtgtgtgtgtaaaatgtcattgtataccaactataagttacgcacttcctcatttgctgcaatatgtcatcttcctcacagtgctgtgattatgggtattttgttatgcctgattttacattttacacagctcctaagttgaaagacaaagattcaaatgtatgtctccatgatcccccaaatcaaaagtcttgatgttgctttgctaacttttccatttgtttggaatttttttctttgttcttttttgctttctatcagaattaacttccgaaagctttctgcttttctctcattttgaatagcttttgttaaaatctatatgggaatccacatctccccatagaccaggtgcactggaagatttgaggggttgggaggagagtgtggatgcagaccagtgtgagtctagaataagcctgtggcaacctgggaaaaacagggtgggaactcaaaagaattagagagatatcctcacattagatttcagtggaaagagaggggggaaagtcatgtatactggagcattcctatgtgagttcaaacaaattgcatgtaaatttggggctcactaataagggctgtgtgaccttgaacctgactttcttcaactagtaaaacttaaagacaaaaatacccaactctttcaggcaaggaggagctgaaataccagtaaatgcactaaagggtaactttgagaggtttgactttgtccaacactcagaatcaccactcacctccttaaccacaaatcactagaaacaggcatgcaatcaaagacaaacaggagtatgcttcctaagtgaggccagcttcaagaaggggtgaacattggaagtaagttgcttcacctctagagatgaataaataggtacaataaaacctgccatagagcataacttgagggtcaaatgaggggagcttgcagactgaatttatttcatttgactgcttcagtccttatgtcatcctctccccacaggatgtagccttggacaagaaagtttacattggtccacctctaatatggacaaggagatccatgtttgcctctctcatacatgtacacaccctttattcaagtcactttagtcatccaaatataattcttagtttttgagacactattgtcaacattgagacttctgtacccaaaggttattttagagaaagattcatcgttatgtttgaagctggaagatagaatgcactcagctacatgtgctttctgtgaaatgtagttgggctgatgctattacaatctttcaagtaccaaagcccatatctttaattctttttcccatagcatgaagtgccaaaagccagcactgaatgtgtgtatgtacctcgccatgtgttgctgcaaatttagctgtaataattctgcagagggcgataattctgcgggagatcttcttcagaaggaatcagaaattagcaattaaaagtcactattttgttgtaaatggtcaagaccttcttcatagtaaaatccgtatttggtcgttgactctaatggaagctgtagactcctactaatatttgtttagggatgaatcccatggaagctgcaagcatggctagattccaccactccttgtacataccatgtctatatcctttggcagggcaatcatgaaaagcaaaattaatttgaaaggagaagaaaagagaatttactctgaatcccaagagactgcatgctttgaacttgcaaattacagccatttgcacagcaaagtgatgaaacaaatccttggatttcatttgctctccactgtgctttgggcaaagtgtcaggaacatgccccccaagaggtaactaaagatcattctcacaaaatgtgctatcaaaacccaattgtctaagagcatgtgtttggaaaagaaaataaacctgagtgtcagtgaaacagaatagcttctaggattttatctgggaaaactgtcaggttttcttctaataggtttatacaggttcactcacctctgactccttgccttatttctgggaatttctcctggaaattgaaacttttataaagtacaacaggatagactcttctgagcactcgaagtggaaaaactgaactaatttttgatttgttcaggagccattctttttattcaccaaccttaaagtacttaacaaaaaaaggcctgggatgatggttgagcttgaggtcagtcaatggattttcaaactagagcacaaggctaagtttctcagatggttaattatttataggtgccagagctatctccttataatagtaggcattcaatatatgactgaaagaatgagtagagaaatgtaaagtgattgtgaataaatgaattaataaagaaccaatggtttcagcccagtggctcacaacctactcacacaagacccttatgtatttgctatacacatcttatgtttagaaggagaatgcacaacattgtaggatcctagagtttaaaagtgcattgtttgtttaaccttgacaattattaggtagttaacaaagatgtatgatatcttgccatgaattatatctttctgtaagatgaagacacttgttcagcatccagcacaacttttaaatattctgtcccatactctgatagctaaaaattctgtttgcgatgaaatgagcctagaacctaagtccacttttctatcaaaataaaatatggaaatatgggcttttccataaatcgccatacatcagggtgcattagaatgaacactataatagatgcacagaccaaaggtaattcagttacgtgggacatgtaaatgaatgtcaactaaggtgatcagtgtaagtttctttgaggagaaattatttaaattgggaggacttttcagggattaaagatgtagaccccgaatacttattatgcaaggaattgtgcaggagccctgagaaggcaaacttagtaatccagatcacagaagtaacagacatattataaattgggttaaatgctatcaatatcttccttgtgtactattaattgcctgcacatatccttatatattttctcttccccgagtacagtaacatttaatataggaggctaaaccacagagtatgtaactggcaatttcaaataacgattaggagatgcaatgacataggctgaagttaacttttctgaagcaacatttgcccttcaaagattgaatgtcatcccactctagcccttgcattaaaaagtctcagttcaagacccttttccattaatgtcttactttgaaagagccaatctgataaattaagtatgttcttaggttaaatgatattgatttaatcagattgttattttgcatattttgatttaaatgctaggtaaaagcagggatacatgtggcttccagcagtatcataggatgtgtgtaactgtttattctgcctgttttgttggcagtctaagaactttatcccaaataaagagattataaacatgaaggaaaagctgtgattattcttagtgtgccctaagcattgtgtttttattcctactgagatattttaagttttttttttaaaaagctttctgtaaaggaattatttagagtttttttatattttaaaacaatgttattttgatatacatatacagaatgaaatgattactgcagtcaagcaacttatcgttagcagtcaaacaaattaacatatccatcacctaccatagttaccttttgtgtgtgtgtggtaagagcacctaacatctatctcagcaaatttcctgtatacagtataatattattacctatagtctccatgttcaaaaacattacgttcgatgtaaagacatttttcactcttcctccttatgcagtgtattccttaaaactcagtttagcgtttcactacttttttagagatatggggtatgtgctttaatttcatgagtctttgtttctccctcttcagagactctgaactccttttggtttaaaaccatggctgagctttaatcacacaaattatttaatgataatgcttgactgtactgctgttacctgaacacagacattttaaagccctaggttggaaaggatgctagaatttattatatcatttgaagtggtatcattttaatatttaggtacctatacacaaattttagaaagagacctcttgccctttattaattgaaaaagtgatgccaggggaaaagggctgtctcctttttgttggcctcgcatcccccatctgtgaaatagagactgagtgatatttacctatgggcatccatcttaaatgattagtgggaattaaggtaattattataaattaatggctgtgtgagttataaaaggttagatattatggagttccattgtcatggagggaggcaattaaagaaatatacacttatagactgtaccatagatcttgtgacatttctagccactttgcctttcatcgttttactctatgtgatatgatcagtgttgtagtcatgcttttacagatgcctactgaaattgcactattttatagggaagaaaaataatttttcatgaagtcttacaggcagttcaatttgattatgttcttaatcactctcacctagacttggcccttttactgaattggtctgaactagtttacagctcttgggctttgaacagtaaatcttaaaattctaatgtcagctgttatatagtttagtaagaatgctgatctgctgctatcaggagcaaaaacgagcactttgaaaattagtttattgtatatcaccccagactcaccaaattcaatagtaaagtggctaactttgagtaagcaaagagggctgtgggactgcaactgcaataaacttgaaattgattgtttgtgggtgaatttatagatggtagttggtttgatttatgcattaagagtcagagagagtgaaagatggaaatcagcatctctggtcagctgagttgtagaaggtcactgggaggtggtgaattactgtttgccatggtttggcaagcagtgttgaagctgcttaatgagatctaaccaaacttgtccataaagatgacacatgcaaaaaggaaaaatattattcagataagataccattcaggctctaggactaaaaacatctttggatatttgaatatgaagtttttggcatcttctaaggtaaatatggcaaatgagttgtgagcaggtctgaaatttgcaacatatttataaatactatttacatttccctgtcttgagttagcgattagcctttcttttggatatgaagacaatatatttatgaaacacaaatggaaaatgagcctgtataaatatgttttagaaacagtggttgagatgtagatatacttaaaaatactttcaaggaggacatcttgatatcattgaaaaagaaagcatgcataaaatcagctaaacctatctaaatgagcataggctatttatgggttcataactatgcattagtatgtggactgtctatcacagtccacatactgtggaaagtatcacaaagtgatactttctatcactgcttacacacaatatcaattgttgaatttcaaatattttgcccacaacctaccataagacatatatattgcatcccagtgcatatacaatatatacaagaaatatttttacttcttatgatgagctctgaaatactctgttgtattttaagcttgaacgctgatgctaactgatgttaggtcctgcagtttgaaagatggttgagctggggtgaagtgaaacaggtgaaacctccacttcgatgttcttccctggtattgaacctcaaagagattggtaatactactaacacttgctaagaaatcaagtaggcagaattacaattaaaaagaccctgaaatcaatgctgtccttataaaaggcatcaaagaataggtgggtggatgtccaggattatgtggtcttatacagcttgtgcttatctgtagaatgcacctcaaaacatagatgcttccttccatagtggactctgagattctttttttttttttttttttttttgagatggagtctcactctgtcaccccggctggagtgtagtggcaccatctcggctcactgcaacctccacctccctggtttcaagcaattctcctgcctcagcctccccagtagctgggattacaggtgcccgccaccacgcccatctaatttttgtatttttagtagagacaggtttttaccacctgggccaggctggtctcaaactcctgacctcgtgatccacccacctcagcctcccaaagtgctgggattacaggcatgagccaccgcgcctggctgtctctgagattcttaagcacaaagtctctgcttattcttctgcagcaccaggcattatacctaacccattgcttgtgtgttattgagtggaaattaaacaaatgaatgaatgaataaataaataaatgaagaaagtgagaagaacatgagaagaatcagatgcattccatttaacttttattgcagaacctctgtggtgacctatgctaaagcagtgagcactgcaaaagtaaacaagacacagttcgtaattactagtttggggtgtaatagcagtggtatgagcagatggctaaggaatatggaaccttaggtctttcgtaacagtagcatagagtaacagcttcctacttggctttggctctgtgttctgaaatagaagcaacagtctgggactgaaaattgcaaaacctggatcagttaccttggttcaccttgtcatgatgataacccttcttgtgacaggtggtgattttaagcacacagtagaaccatagtccccactgtccaccattcttaaaataactaccctattctgctcctcctcatttctctccaggtaattcattactgtactttggcagtcagaaatgtgaggaactgattttcctttgaggcaaataggtttttgacctgcagatctatgtgggtagtggaaatgcggactctcttggtctaggggcttttctattagatttgggactcaattaagtgaaagaaggagccaatcaacaatatatagtactcttagctccgaggagtggcatgctagaaccggcgcatattggtttgtgagaaccgattgttaaaatttcaggaatttttgaatctcttcctaagaacagcaattattaaaaataaaatgcataaatttacaattaaattatgttaaaataaaaatggtggaccccaaaatactgtcagtttctaattattttattaatagttatactcttgatatctgtcatacctgcctggaggaaatactacatagaagacactatgcaaatctctccccacttcaacattcatgacacaattttggcagctagaaatcagctgtgttgggagtatttatgtcatggaaattggtataatttgggaattatattggagaatacatccattttaaattaagaatttccctcagaactggaaagttggttaacacaatactgactccgtttataatatctcagatactgacactgacggatactgaaaagggaataaaaataatatgcaaaggtcctaaacgttgggttaaatggataatcataggcagtcatgatgagtgccattgtagacctactggaagatgacagagctagtgcagaggttcccaagtattctgttcatggagtcccaagtgtctgtatcagccaaggttctccagaaaaacaggaccaattatatgtaagaacatatatattttacatatatatttacatttatatattataatgatatataatatatatgatagagggagaaaaggctttattttaaggaattggctcatgtggtgtaagactgtgagactggcaagtctgaaatctgcagggcagactggcagactcaaaccttatgcaagagttgatgctgcagtgttgaagaagagtttcttctccaggatgcctcagtttttgcgtataaaacctttcaactgattaggttaggcctgcccacattattgagggtgatctcctttacttaaaatcatcagattgtggatgttaaccacatctacaaactacctctacagcaacacctacattagtgtttgattacattactgggtgctatggcctagccgtgctggctcaaatctattacagtgtcctactaatttttctgtggcatcctaaaccagaagaaatactaaacattttatttattaagtccaaacaattcactatttgtatcctaaaatcttagtgaccatttgaaaacataatacatatacgttgtaaaaatttatttcatacatagtcacaattatttactaatggatagcacacaacttctcaagccctagaataaagttggataccaccaccctcatttcctgctccacatgattttcacctgctgctagggaaatggaaagtaaggaaaaatgctgctttgcaatgatatgatgctattaaaaggacggtagtactatttaatgttgaaactgtgaactacctccaagtagtttctgcacttttctacagatgtcaaatttcccttgaaaattttaaatctcatggtgcttccaaaagcttcctgttttgcccaagtgagccctgtcacagtgaatacgaggatattttgtactttgcataatagaatcaaaatgctcccatgttttgtcgtcagctctgtaatgcataaccacagttttcctggactgtttgcatgtagtaagaaaagttgcagcattcagattttctctcaagatctttctattcattatcttttaaaaattggtgctgagaaatacaatgaatctctctgtgtgtgtgtaatgtgagtgtgtgtgtatatgtgtgtagttgtgcatacaaattcctgattatcttttgtgttgagacagcgctttaaaatgtctaaaaattttatcggtataaattgaataaattgtatatatagttaaaacaggcagaaacttcctttatttacaaataaccaagtaatttacaagtttaatgattttataacataccaaggccaaggttagatgtgagaaaaagaaaagatagcttttctcactccagatgctttctgctttctaagactgctttgccttcccacactgcccactcctcacctcccatatgctttatcccttgattattctgatcacaccttcttctatgctcatcctcacccctaaacagttcagcttctctgaaacaggaaagtcaaccaaatggtaagggccagaaacactggcagaagaactaagaagtttcttctgtgtcatctagagtagcatgtttaaattctctctgcataaccattggacctgatttaaacaattagctaattggtcccatttaaaggagctattttttgcagagtgaaaattttagaactacaagaattagcatttaaagtttttatcaggaaattgacatcagcaaaggatgacaataatactggtagtttgaatgataaggtcccctaaagtagaatgttaattgaatttcctaaaacctgtgtgaaagttggaagatttctgattattgtgttgagcaacttcactaaacaagagcagccctgagagatatgaaaggatcatttataatacctctttacactgaaaaatgttgaaaagtgcttatttggaggtttagggtatttgaacttaaggaaatgaactggaacatacattttaaaaatgtggcttccctacattctgccattcccaattaggttgtataggaaatgtatgagactaagaacagtccaggtctattaactccagtttaaattatcttagctatcagaaactctagctaaattctaaagtattctaaagtatttcacttccctccacctgtttccttaggtgtggttaaattccttaacatccttggcaccagatgaacaaactgtatgtttatttgaggagacatgtcgaatgatgagaacactgttgcttggtaccagatgtgcttgttgactatgggaatttcaataattctaggatgagagaactctgacatagactgtatactctgaagagggccaactctgaaataaatattgccctctgatcaattggaatttggtgtttcagaaactgaagctctctgttttgtgagatcttgccatcttcttttttggtgtgaactggtttttattggggtgtaggacacggggtaggaaatgtcaccttggcgtatggcatgccttacacattctaatcttcctggggtagttgatggaactatttcttcttcttgaagttgctcttgctgtcagccacctctttaggtccactgctgaccatcctgcttgagagagaaatcttccaaggattcgtccaagaacttactttttcttggagacatcctgttgcttgccccttcaggatcactaactgtttcctccttgggggatgatttcaccctattgggaagcaatgttcaaacagaggaagtggctgctgagatcagtaggaagctggagaaacaggagaagaagccttaatgaagggaaagaaatgactggctctgcttggcctcgcatctgcagaaaacagcagtagtattctgaaggagtatgaggagatgggtgaaaaacccaaaataagtaaaagcagaagctctaggaggctcctcaggagaatggaatggaaggcccatctctctctttctccaaactcaagaaaaagaaatatttttccaaggaggagtttgttagtagcaatcttgccatcacctttcagctttgtagatttttactttctatctacttcctaggaaggacaaaaatagtaacttccctctgcgctccagagctctataaaagccaaaagttagttggctgaagtctgtgaaatgtgactcactctgggcacttcatttctgttgtttgtctgtttgtttgggatgtgcatcgcaaggtccctgagtgtcacttctgagggcggagagcttgctgtagcagacctgcagaggcttgcttgtggggttaacgaggccctcctgtctcctcctctttcccaccacgccactcaccaggtctattcctggccattttcaggctcaaggtcatccctggagggagtgggatctggcagaatcacatttctgctgtcacctcagcatcttgtagtgaaaatgaacatctgggcaagcatttgggaaaatatcttgtgaagagcaacacgtaagttgaaagaggcatgcagagtgaggagcagcctcatctcttctttggaaaacagatgacaatttatggtctgatcatatgtccttgagctcattctgcaacttcctggtagaactcccttctttcacatttacagtttctcttttttattttagagcttgtgaagagctctgtaaaaaggtggggacccaaggaactcactggcattcacttcaagtgccctaagaaagcatcaacctgtgtaatcgtggttatgtggccctgtgtctgcttttgtatgacatgaacctaccataatgatttgcccatagaaactttccaataaagatttgatgaataagggtatagctattgtagtttcagcttttcatgttctgcatttttggtctcttatcctgattttattattagtggtcctgggagtgtctggctccttttcagttgagctaagtgttgtgtctaattatatattagacatattatgaagaacctttggcaatttgagaaaggaatatgagtgggaaactcttaaaaggattgcactttctccttcttcaaaagttataactttggaataatttcattgttatatcaaatacttgtaggtgtcagaaggtagttctgctgagaataggaattcttgctgtttggagaaattgaaacagaaagggatggagttggattcttcatacagcaaagtagctgccatgatttcaccaagtaaatatttgaggcactgctggtcacatggtctctgccataactgctctgctgttgtaatgccaaagtagtcatagacaatccatgaatgaataagtgtggctgtgtcattatcaaactttacacctaaatttgaattgcattaaactctcacatggtcaaaagagtcttacgatatgttttccccaaccatggctcacagctcccagaaaaataggtgatggactgtgtatcagccaccatttgcagatacttttttaggaaaaaaaaaaaaaaaaaccaagcagaactgattttccttagcttctctgatcattcataattgtcagaattttaaggaatatcggcaggctcagatcagtggaagagaagagctacacttcaatgtttcagttatcccacagccttcttcctatctagtaacatgttacaaagaaagcaagactcagactgaattcagccacacattcagacatttactggctagtagacctcagtgatgagcctgtatgtttgggaatgtcacagtactctctccctcatgctctaacaagcactttgcatgaaagatttactccaaggctgacacagtgatcttccaacatcgggatgcttcaaagttccagcgatgtctgtgagcagagtttcccctgggtggtgtgggaacacgggactagcatcccagatcaaggaattaggttgccaggcctctgtgattctcaagtctcattcatgcagtgggaggagagactataaaaccttttgggccaaattcactttttcaattttttactttttaaaaattggtaaaatatatataatataaaatttaccattttaaccattttacagagtatgtttaatggcatcaagtgcattcgtattgtgtaatcttcaccattatccatctctagaactttttcatcttcccagcctgaaattctataatcgtttaacagtaactctccattttctcctgccccccagccccaggtaaccaccattctactttctgtctgcatgatttcgactacttcgggcacctcatataagtggaatcatgttgtctttgtcctcttgtgattggcttattttgcttaacataatgtccatgttgtagtatgtgttagcactgcattgctttttatggggaaataatagtccattgtatgtgtatactagaagttgtttattcacctgtggatgggcattttggttgtttcaaccttttggttattgtgaataatgctgccaaccccatagcttgaacaacaccaatttcacctatgaacatttatttttaacatctcttctgcccattagtaaatcctcatattgatttagttaatactttttgaaagcttgccatagccaccccaagtgtatagattcctgtttgaagtactgtaaatggtaactgttcctaaaggtatagattaaagtttatatacacacatgcataccagtgtttatacggaagccttttaaagtaaataactcaaggcagtattacacaggcaacaacattttcattttgtcaatttgtttgttattccctaaacaatttgaaaatattccacgagagttaactgttaagctgctggtctcttctgaatgagggataataatgagtggtgcctgcttagactttgtgatgtgaaagtttcctgaagacacctccatcacccgcgccccaaatatctatgtctcttttcctcccagaaaaattttcgtaagtttgctgttgtcataacttagcaacattagatgatcagacatagcttagggacattagcaactgttaattacttgatcttgctaaacctttgctcttcttgccatgatatgaggaggttgtaccaccttccaatagatggatagttcttgttaatttaacttttatgtctggaaaaattttgaaaatggtgaaaactatcttgcatctactatacttagtttgtatttattcacttaaatttagaaagaattaatagaaaataaatgtgcaatgaattattctttgtggacatcaatcagttatcaattccaataataattagataataatagattgattattttgaagaaacctatttcctcttatctagtcattttgtgtgtttacacgtggagcttttgtatttttacgtattagaaattataatagtaaagaaaaacttttgatatcctcatagcaacattttaaaatcattacttagatatatttcatattatagtttataaaattaaaatatctactttaatgaaaatttgctaagctctgagctaaaccttttccctattctatctcctagcctgttaccatcatttccattcttacagatgaggaattgagttgttaagcatttccttctcacttcacatagttagtaagtggtaaggtcaaattacaatgtcaccttttaatacccatattaatgtaattgttacttagatatcacactagaaatatgaaattaaaataaagaactgaaaatatcaggaagacttgttattttaaaaatctcaaaaaatataatacaaaaaattttcaaaaatgaacagcactttcatactgagtgaaggaagagcaaatcatggtatcttgcaggatgaaaggttgtctgtatttttggacatgaaatcattgcagtttaaggaacacccagcccatgtggaaacataagctggaactacaagccctttctgggtttatgtggaaaaaaaaaatgtagtggccatgtttctggttcattgttaagctgtcagggtaaccttgatgtctagatacttaactttttcttctaagtagtagtagataaaaatttcccagagatttttctccatgtgtgtagaagtttagagtcatggaggtatatgtaagaagctgccttactaattcagtgcactattagattgttcatagaactggaaatgttcttaagaggtcagctcatttctttatgtttatatgtattcctgggagtaagaaacctagagagatgaggagatggagaatagagagataagtatggagagagaaagtgaagagacagcaagataatttaaatcactgacaattgtgctcacatgccccaggccatgaataaaactgggccaggatcagcgttttgctgccttaactttcttaaggtgattgaaactgaaaatagtattcaaatagtcacgcaaagaagtgggagggcttccgccatattcctaagaaagaaatgatgaaattaactgagagccacagaaaaacatcaagcaaagtagagttaaaggaactgactgagaaagtcacctactctctgggtgatattcacaaaaccctgtattgggtactctactgatgaatttagtatgtttccttcaggaaagattttctctttatgcactgcccttaacatctatttcaccataaaccataactccactgaatgttctatttttttaaatactcatgggtatgtaaaaagagaacatgatcatttattacaatattctttttttttttttattatactttaagttttagggtacatgtgcacattgttcaggttagttacatatgtatacatgtgccatgctggtgcgctgcacccaccaacgtgtcatccagcattaggtatatctcccaatattcttttgttattaagaaaaataacaaatgacaatataaaagtcattaaaacacttagagattttgattgtggatatttgatttttgtccttataatttgggcttgatatcttattaaaaagaaaattagtgattgatggaccatttgcttttgatagtcaacttattctatcctagggtctttagctctagaaccatgcttctcagtgggatgtgggtatcataatcactttgggaagaatttcacaactcgcagtgttccattttggtgttgtcgaaatcatcacgtgaaagatgatcgggaatacccttgtagttgaacaggtttagttataatttattgcaagaccaagcatatatcatggagaaccatgtctcagtaagaggatctcggaaagaatttattataggatatgggttttggttgtgtgttttaggggagggtccatagagtcgggctcacgcggaattggatgctgtcagaaagcagagttaattctataataaggtaattctctaataaggcatttcaataagtcttgctgacaaaatggaagactagcacaaggataaatctgtgattagtaaagaagtccatcatattagccaagagaggaagtgcttggtacttttttttttttttgagacagggttttgctcttgttgtccaggctagagtgcaatgacgtgacctcagctcactgcagcctcagcctcccaggttgaagcaattctcctgcctcagcctcccaagtagctgggattacaagcatgcgccaccactcccggctaattttgtatttttagtggagacagagtttctccatgttggtcaggctggtctcaaactaacgacctcaggtgatgtgcctgccttggccttccaaagtgctgggattacaggcatgaggcaccgtgcccagccgcttggtactttttgaatggcacagtaaccttgttttctgtgcttagacgaaactatgaagtggccttacttggtcgattttttttgtggtctcagagtagtcttgtctgaggttggtattctgtgagaatgtttacgtgtaacagcagaatgaatgccaggctggcttctaaaggtcaagggctgcttgttttttcattcttcacagctaccctctgacctcctctctagcaaaactgtagtgactactaagctttaataacatatttcccagtttttgttacaaaatatttttatcatacagaaaaagtaaagataatgtattaagtaccatatatccatcaagcagcttaagaaataaatgattatagataaaagtattggagtatttctctgaaatcctaatccttcctaggagcgaattattaacttgaatttgatgtttatcattttcaagaataatgcatttcctcttcttttaaaaatacatatatatttattttttgtctccttttctagaaatttaataagatatagctttatttttattttgttttaattggcataaaataattatacaattatacatatttatggaaggtacatagtgatctttgatacataaaatgtttagtgatcagatagggggattagcatgtctatcatcttaaacatttatcatttctttgtgctgggaacattcaatatcctctttctagcattttgaaactatgtaatatattatcgttaactatagtcatcctacagtggtgtagaacactagaacttattcctcctattagctataattttgtatcctttaacaaatctccttatcaaagacctcttactttcctctacccttcccagcctctagtatcctctgttctgctttcaacttccaagagatcctttttttagcttccacatatgaatgagaacatgcaatgtttatctttctcttcttcgctatttcgcttaacataatgtcttccagtttcatccatgttgcagtgaatgatgggatatcatccttttttttttattattatactttaagttttagggaacatgtgcacaatgtgcaggttagttacatatgtatacatgtgccatgctggtgtgctgcacccactaactcgtcatttagcattaggtatatctcctaaagctatccctcccccctccccccaccccacaacagtccccagagtgtgatgttccccttcctgtgtccatgtgttctcattgttcaattcccacctatgagtgagaatatgcggcatttggtttttttgttcttgtgatagtttactgagaatgatgatttccaatttcatccatgtccctacaaaggacatgaactcatcattttttatggctgcatagtattccatggtgtatatgtgccacattttcttaatccagtctatcattgttggacatttgggttggttccaagtctttgctattgtgaatagtgccgcaataaacatacgtgtgcatgtgtctttatagcagtatgatttatagtcctttgggtatatacccagtaatgggatggctgggtcaaatggtatttctagttctagatccctgaggaatcgccacactgacttccacaatggttgaactagtttacagtcccaccaacagtgtaaaagtgttcctatttctccacatcctctccagcacctgttgtttcctgactttttaatgattgccattctaactgctgtgagatggtatctcattgtggttttgatttgcatttctctgacggccagtgatggtgagcattttttcatgtgttttttggctgcataaatgtcttcttttgagaagtgtctgttcatgtcctttgcccactttttgatggggttgtttttttcttgtaaatttgtttgagttcattgtagattctggatattagccctttgtcagatgagtaggttgcgaaaattttttcccatcttgtaggttgcctgttcactctgctgatagcttcttttgctgtgcagaagctctttagtttaattagatcccatttgtcaattttggcttttgttgccattgcttttggtgttttagacatgaagtccttgcccatgcctatgtcctgaatgctaatgcctaggttttattctagggtttttatggttttaggtctaacgtttaagtctttaatccatcttgaattaatttttgtgtaaggtgtaaggaagggatccagtttcagctttctacatatggctagccagttttcccagcaccatttactaaatagggaatcctttccccattgcttgtttttctcaggtttgtcaaagatcagatagttgtagatatgcggcattatttctgagggctctgttctgtaccattgatctatatctctgttttggtaccagtaccatgctgttttggttactgtagccttgtagtatagtttgaagtcaggtagcgtgatgcctccagctttgttcttttggcttatgattgacttggtgatgcgggctcctttttggttccatatgaactttaaagtagttttttccaattctgtgaagaaagtcattggtagcttgatggggatggcattgaatctataaattatcttgggcagtatggccattttcgtgatattgattcttcctacccatgagcatggaatgttcttccatttgtttgtattctcttttattttattgagcagtgatttgtagttctccttgaagaggtccatcacgtcccttgtaagttggattcctaggtattttattctctttgaagcaattgtgaatgggagttcactcatgatttggctctctgtttgtctgttattggtgtataagaatgcttgtgatttttgtagattgattttgtatcctgagactttgctgaagttgcttatcagcttaaggagattttgggctgagacgatggggttttctagatatacagtcatgtcttctgcaaacagggacaatttgacttcctcttttcctaattgaatacattttatttccttctgctgcctgatcaccgtggccagaacttccgacactatgttgaataggagtgtgagagagggcatccctgtcttgtgccagttttcaaagggaatgcttccagttttagcccattccatatgatattggctgtgggtttgtcatagatagctcttattattttgagatacgtcccatcaatacctaatttattgagagtttttagcatgaagcatcgttgaattttgtcaaaggccttttctgcctctattgagataatcatgtggtttttgtctttggttctgtttatatgctggattacatttattgatttgcgtatattgaaccagccttgcatcccaggaatgaagcccacttgatcatggtggataagctttttgatgtgctgctggattcggtttgccagtattttattgaggatttttgcatcaatgttcatcaaggatattggtctaaaattctcttttttggttgtgtgtctgcccggctttggtatcaggatgatgctggcctcataaaatgagttagggaggattccctctttttctattgattggaatagtttcagaaggaatggtaccagttcctccttgtacctctggtagaattcggctgtgaatccatcgggatatcatcctttttaaggctgagtactattccattgtgtacttatgccacattttctttaactgtttgtttgtttttgggcacctagactgattccatatcttggctattgtgcgtagtgttccagtaaacatgggatgcaaacgtctctttgatgtattgatttccttctcttcagataaatgtccaggagtgggttgctggatgctatttgtagtcttttgaggaacctccatactgttctccatagacactatcatagtttacgttcccactgacagtatatgagtttccttttccctgaatcctccccagcatttgttattttttatctttctgataacaaccatcctaactggggtgagatgatacatcacagtgattttgatttgcatttcccggatgattagtcacggtgagccttttttttttgttgtaattgttggacatttgagtgtcttttaattaggaactcaaacacctcaacagtaaaaaaagaaaaaaaaatgacttcaaaacagcaaaagacctaacgttaatatgtacttgtaaacttttttttattctgctgttgttttaagtaggagcttaagcattaaactacacgaagaatcatgagacaacctatacttcacacaaggtcataggacatacctttataagtactattaaacattataaatgaattttaatcacagagtcaagcactttgttcatttgttttcagtgtcctatggtgactttaatagcaggagcaatttgttggttttatttagcaagacattgggtggatttccattcttccctccacaggctgtgagaaagatttttgacactaactgagctgcttcaattggaaattcacattttatgcaataacaggccattttaatttcatgaagcaaaggattggcttctacttgcaaatagcactaaagaaagcagtgttgtcgaaagcagtagatagatctgttgaattaaatacaaggctttcattcctttcattctacatttccttataacgtaagcattaattaaacccatcagtgacttccttctttctggagaatgttttctgtctgacaagaaatgtcaacttagcgaatgagacctaccattaaaaacacactcacttggacttagagaaaagctgatgcatacccagggacagacttgcagaaagagaacccaagggacagttatcatcttttcttgcttttggtgatgggactaagtgtcttttgccttacttgaggtttcccgagaaaagcatacatagctgtattacatcttgtgttgttgtatcacctgatgtttacttgatgtattaaaaataaaagccaggaaaaaatgccacagtattttgaagttttaatgcaccttcacttatatgatgaggaacagagactaaatatcgggttcaacttaagtcaacatgtttggaatgttagatacactgatgtgctgtggcccagatagagttcatggggatggctggagaagtagatggaacaagcaccctgagatttgagcaaagtgttagagaagtgaaatctctaacgtctaccaaaagtccttagaatgcaatagtgacatttaacttctcattgcaggggaacacttaagaatctgtcctcaggaatatacatgctgcaccacagaaatggaagacaagttaagccaacaaagcaaactcgaatttgaaaaccttgtggaagagacaagccattttgtgcgcaccacttttgtgtccaggcataagaaatttgacggtaggtgaaatggttttcacttcagtttgttataggtgcacttttctatgagaatcttggtatcatatgaaaaatatttttttaaaaagggagcttttctatccctcttaaatatttatagcattgtctatttttagaaaaagcatgagttttcttgacagtaatttttttttttttagtaatatcttggtaaaacctggtttaacaaagagctgttttgcatttgtgctttgcctgtgagatttattgtaaagatttagctcaagttttcattattagaggaattataattcaggttttgttatactgcagcttgtctagttttcatatggggattctccttaaaaaataagcgtaatttaagattatttgaaatataacatcacatttgaagaggaaaggcttgttttaaatgtcagcaacacagattcctttattttagactttgccattgcaatcatatagcacattttacattgcagttatgcattctgtataaggtttagaccctcttttgatatcctgattataagcagtcaatgttatttctatattctatttgttaaataaacatttttatattacaaattacgactgaaatttcagcattgaattttcgcattagagcctgaatagtttgaaaatattcaaaagtagtttgattctttgtaagcagtatcaacaatgataacaataaatttagtatttttagaaggtgtgttgtctttagtgctctaagaaatgaatgtaccttaccatgatttcttgtaaaccagacttgcaccttgtggtgaaccttcttttggctccgttggtcctacaacattaccctagagcaaaagagctgctattaattttcttctctcagttcagtcaatgcacagcagagccagtttaggaaaggttggccaaagtttttatgtttcttttttattttctgtgtagtaggtaaaatgttccattttattgctgttttaaactattacagcaacactgatctttttcaaattggttctcaaagttacggaagacaggtctacctggtattttcagtacaaatgatgtgacactttctgtgtaagtgaccggagtttgatctttctgcaagtgtgtttcaacatcctcacattctgtctttggctctcccttgtgtataactatatgtggatgtatatgaaaataatttttatttagcggtgatgctgtgaatgttgttcccttaaatgcagctagggagtacttaggggttactcttgattataggttacaaatccagtgacattcagaagcccctgataggactctgtgtttggaggactacactctatcacttcaagctacagcaatttgagctgttttgtcatttgttacataaagcaggtgataatgatctgttgccagtgattttgacttgtgtctctgggaaaacaaacaaacaaagaaagaaacaagaaagaagctctactgtgtttataaagctgtactccaaagtgattttaaaataattccaggacagtattcatggtagatgatatatattctttaacaaaaaaatattaaatattaggtagctttatggagagttgacatttttaaaacaagtaaagcaattcaccaagactgagccggccaggcatggtggctcatgcctgtaatcccagcactttgggaggctgaggcgggtggatcatgaggtcaagagattgaggccatcctggccaacgtggtgaaaccccatctctactaaaaatacaaaaaaaaaaaaaaaaaaaaaattagctgggcgtggtgccaggcgcctgtagtcccagctactggggaggccaaggcaggagactcacttgaacctgggaggtggaggttgcagtgagccgagatcgtgccagtacactccagcctgggcaacagagtgagactctgtctcaaaacaaacaacaaaaacaaaaccaacaaaacaaaacaagacgagccttatacttacttcttgtattatatcaataacttttaatatctttgcatctatagtttctaatcccacatctggtttgtcttattaaagaaacctctctccactctctcacttactccctccctataggtatataggtatactttgaattgttctaatgtgcctaagggtatgatgtcaatcagtttgacaggacattgattttgctaagattagatctgacctaagggaggatgaattctttagcaaccactcatcttattgcagttgcattgagttggatgggagagaaattaagattttgttttttttggaggctttcagccagagtgggaaaaaaaaaaagagaatctaaatgtgattctaataatctcaactcctgaagcacttagacttaataataataataataatcatcatcatcatcaattaaaaagtcactgtcacaatttctgctattttctctgggcagattcatgagggtcagttatacactggtatgatttattttcttttgtctcaaaggtgagcctgctaagtcaccttccatgagtgattgtgcattcatgtgggtagttttccatttgttcctttcttcctcccaaatactctctcatgtcacttattgatgaatgtcagtttgatgtgagcacaaaagaagtatctaggtccagttatggaatgttaccctctttgagttttattttcccacataaaaccaatggtactataaaagactttgagtttatttttagtaacttcctatttggttagtcattttgcatcattgctggagtctcttcatccatcttgtctattttgaggttcttcctctgtttctgctttctcagaggtcttaatttgtcatttggattgtgtatgtctttgttggctatatactgtttatgaaaaaccactgcttaattaaaattaagaaaggttgatgacttttctttctatttttattaagtacagcagcaatttaaattgcatacatgtgatccagtccaagatatattcagagaagctgaagtcaatcactggtaatgattaatctctggttatcacttttcttactgtatgagaaatgctttgattccatttaactttttattttgtggcagtggtgactgttttgaaaatttgagattccaatacggttaacttaaaaccatattctatttattgtcttactttctctgtcttttttaaattgatattttgataacatttagaagagacactataattttataatttgtaaaattataaatactcatcggatggtaggaagttaaagtggaatcagtacgagttattacccaaccttcctaagtttctatgcttagctccaggattagcctagcattcatacctgagaggcaacaaattttagaaatacataatatcaattccagaaattttaattctttggcagagaattttctcatagctgtatatcttttttaagtttttgaatatagaattaaaatgtcatgataaaagtctatgtaatagaggtttcttgacattgcttctccaagggtctgacaaggtatttgttgttttgctttttttcttatttctccagccaaatctcaatttctggctctcattacacatccctgtaagcctcttatcctttggtctgggtcctggccactgcaaaagttctccctgaactatgcagggatgttctcaatatgctctgtagccaagcccagcttttctgttgctccccaggattaaaattttggatggatgaagacccaatctagtacatcaggcagaatgatcacattactcccttccttctcaccttcctctcctctgccaaacaccccaggcaacaataaacaaaagcatattaaaacgtagacaaggggagagtcatctttgtgtactcactcatttttagtatttttgtgtttagtgattagcctgtcaaattggcatttgtgtctaagtcctcttttgctgttggctaccaagtagctcacgtgtaagaggaaatggagaacaggcaaatattcagctagtagtagtagtcataagaggcaacatctgaccctgttccctgcccttcatggatttttaaccctaggtatttgaggcaaactgcagtgcagtcacgcagatgttataataaatggcagagtcaggattccatcccaggctgagcactcctggatctctgctctgagccacctaccacatcatctctccagtgctttccagttcccagatgtgctggcgtcttgtggtcaacaccgcctatccctctatctcaccctgctgggcctgtcctgtcctagttattgtggggaggatgtggaaatgactgtcaaggaaaagtggaagatttgtttttaactcctacaaaaaaaaaaattacccacctaaatatagtccagccctcaaggaatctggagatttgacagggtaaatgacttgccaagtttccactaagaatgatgaatccaagactgaaacctaatacttaaatcaaaattagaaatagtcatgttatatataggaagtcaatacttggttgaaattctcaatttctatttcttttgaatggatactgttgaaaaattattgatatttctttaaaagggcagtagaaatattggtgggtaaagaatctacccatatctttgagaaaggcaggaacagtattaaattggaatttgtccctaaattaaagaggaatgggtgttttttgtaaaagcctttgttgaatcaatgaagatgtattattattattattttttacctcacaaagcctagtggtttctgtcttgatgttggcactaacaccctatcctccaagaatgtctgtggaatatggattattcagaggcaggagaatttaattgaagggatattttgtttaggttctttttcctttggatttatttgagctgaaatatattcacatttggagctccatatgaagttttttgtttatgtgttcttggtcttattattttactttccttcctggcttttattaatgtattttaatgatatacatatgtccagaaattttggcagccagtacatttttaaaagcaaaataaaaatattgaacagtaagttctatccttatgaagaacttattctatagtaacacctgcagactacccattgaactggatgcagaaataatttatatacaatgacataatatttttacactgcaaatctgcttgtgttttgtttttaagtatcatttctcatctatatactgtagaggtggcaataacgtaatgatttttttaatatatggcctaattttctcagagaatacacttatttgaaaaggaaaaaaccctaaataggtttccatatggtgatagcatctttcacatttcttgtcacaagggtgatattttttgtatgtgtgtgtgatttctatttgaaaacattcatttagagcctaccatagagaaggcacttaaccaagtattgttgtagattaaaaaatgactaataatgactaaaatttggtcattgcctgtcaaggagtttacgttttgggggagacataagtataaacctaagagtaagaaaggcagaattacttgtatcctaaagtagaagtccattgcaaagaggagggaggaaagttttctatgtagtggcatccaagaagactttttggaagagcttgcagttcagtattcaaagaatgtcttaagattatgataattaaagaagtcccaggacgagacaaaatgaatcaaagattttgtatgcaagtccacaaagtctgtcagacatattgtaaataatttaccattgattttattttcaacaatgttaatgtattgacatttagcatatatctgttagatagatattctatcacaatgttttattccttgcaccagccctttactgttttctaacaaaaaaaaaaaaacacaatttcagggcataaacaagaagtgtttatttttccgtagtacatctttgggttgactagagattggctgttctaagatgtgctcatgcaggcttgactctaaactatgcatttagagtcattttgttctggtctggtctacacgtaggttattcttttgaaagcagtactctgtcttaagcatgttcttctcttagtggagtttggagatgctaatatcgacaggtggaggcagaatgctccttaaagtctaaactagaattgccacactgtcttcctaaggttcataagccaaaggaaatctcatggcaatttccaacattagtgggacaagagattatactactcccaaggaagtggaggtggggaaaggaatgattatttctgtatcataatctaccatagtccttaagtgactgcctcttgctacttcccaatgttttactaatcacattgacttttaaaaaatagattccctaggaattcaagaaaaatacttattttctaaataaatcacagcaagacagacacaattgtctcactacccccaatatcctaacacactaacaaatacgtgtataatcatacacacacaaacactacaacatacacccctctatgatgttattaatgttatacagataaatagatgtaatatttctgtggattgtgctgcggctgtcctaaatcattgcacagaattataggtaactgcaattcatagggcttataatgttaatcattctaggaagtaattagctgaatgccttctgtacatttgctaggctaccagctcagcgacatgtattccatctgaaggacactcttcttgaaatcagaatgcgctgaactgagttttagaaattagagaagcagtctcactggcatgggaaagtaatctgccaatttcccaaagggcagatcttccaaaaataaaaatcgtccaattagagattttggctttgacagagctattgaacaggtttgtaaatcacaaacgcctttcaagccttttgtttttacaatgctgaaagagaagatcctggtagggggtcctttaaatgtggtgcatgtagaacccagatctttgtacaactggaatatgccttccttctctcctcctcctcctcctcctcctcctttctctgtctctctgtctctctctctctctctctctctttctttctttgaactttgacagatctttcaaaactaaggctacacgctgctgatcatcagctctggcttcagtgatgaacttccaatctttttctaattctaagacccctaccacacacctcaaagtaacttgaaatacattatgctcccagtgtggttgtaatattatcatcttattatcaccaattcccttgcatggtggctttgctgagcagctgtttcacagacaagccaatttcttttaagtattgctctatcagactctgaaaccagttctaccagaagggttcttggtaatgaatgttaatgagcagacaagtatcctttctctgacagaggctcactaatcctttgagtaagtatgggtgaattacaggagaaattttatttaagttaaattgatctgctactaagtagagaaaacttattttcttattttaatgaaaatcaagaaaaaatatttaatggggatgtaaattacagctccctggaaacatttttgtcttctgactggagaacacagtagctcagtagactggttcaactgcatagtgtgcttaacactagcaaactcatgatctccagtgaggcctgatcttcagtgggacagtgggaaatggagtagaaaccactcactctctctgggatttggtaccagcagattctttatgttccttagtgataagtaatagggataaaaaattattctttcttcttccactgagccagtgtaagagttcctttttttttccaaaacaaataagatagtaaagccataagaacagcacttgtatgctttttgtattctaagaatatgagaaaaatgatttcagtgaacctttatctgaaaggatataaccatgtcctgatggaatactgcgatgggcaggtagaagggaatgagatgggccaggcgcagtggcttacgcctgtaatcccagcactttaggaggccgaggctggcagatcagaaggccaggagttcaagaccagcctggcccgcatggtgaaaccccgtctctactaaaaaaaatacaaaaaattagctgggcacgggggcatgcgcctgtaatcccagctactcgggaggctgaggcaggagaatcgcttgtacccaggaggcagaggttgcagtgagctgagattgtgccattgcactccagcctgggtgacaaagcgagactccatctcaaaaaaaaaaaaaaaaaaaaaaggagaggaatgagatgggcagaaagatgatcattgttgaagctggttgatgagtctttagggagttcatagactattctgggttgtgtatagtttctgaatttccataataaagagattaaaagagagagagaaagagagttggccagcacagtgcctcgtgcctgtaatcccacactttgggatgctgaggtggatcacctgaggtcaggagtttgagaccagcctggacaacatggtaaaactccgtctctactaaaaaaaaaaaaaaaaaatacaaaaattagccgggtgtagtggtgcaggcctgtaatcccagctactcaggaggctgaggcacaagaatcgcttgaacccagaagatggaggttgcagtgggccaagattgtgccacagcactccagcctgggcaacagagtgagactctgtcaaaaaaaaaaaaagagagagagagagctgacttgaacatacacaggactgaagatatccagactgtgaatccattgtacatacggaacaatgtcagcggttgttactgctctcaatttttgtatattcaacagtaaattatacagagcacgtcattttcaaattgcaaacctgaacacaacctataggattttgactcaattccaggctacttagcttatgctcccatccaatattctattattattgcgctggaaatgacatctctaatctatccacatgaacaggcctgttaaaatgaggcttaatctttaaatctccttggtaagtgtgattgaatttgttaaacttttgtttgtaagccatatggacatcaaaataaggaaaatatccaaacccgaactttggcaagattcaaatgacagtgtaaagtgtttattatcaaatgcattacaaataacatttccatatcattcagtagtcactcggtgatttttcactgaatgaccaacattgacatgagctcctggggtttggcattttagcaaatgtaaaaaaagaggtagctggcctaagccgttttctgtcattccaagcattcccttagacaagaacaggatcctgaacccaaatgtgaaggaagaaccagtgcccagctaagaataactgtgcatggtccacagtgctcagataaatttttaaaaatcactcatcacagtttcagaatgtgccatttgttattcttgcaaaaggtttgctatattcattaaacgaacaaatattcttgggaaaactatatatagtagtttacagtcttcacactgtttcctcccttcctagcagtccagtagaatataaacgacttgaacatgaaaagcaaactttgaagtaagatagcaggaaatcggggctccaaggcctttgaatgttggaagaaattggatttctccacgtattttgttttattttttaaaatttatttgcatgttttctccttttgaaagaatagttctgtggtcattacaggatttagttctctcagtcttcctgtctctttctccttaatgcttctagagttgacattttatcattttcacttatttaatgttcttgtaatagtattcttctaaaaactatgatccattgcatattccctgttgaagtctaagctcattaagttcagagattaggtctcctctttctattttatcttcctatacctgacttaatatgaagtatatttaataatgctgcagtgttgtgtgacaatggtagcaacctgtgcagtctcaagggcacagaccagttaaatgaattacttatattcctataataattatgacagaagaaaatagggaaccttgaattctcattatccattaactcttagggtccataaacctggaattcatatgtgatatcagcagcattggttccagtggatttaatggaactaattttaaattccccggacaaagagtgcctttacttagagtaaagcaagtagaggttcttatcataaaaaacaggataaacgtgtttttctccattgcaagtatgcacatatgcacagtcacacacacaggcgtgaataagaaatgtttaagatgtccatgaatttcctggagaatcagttaatatacagattgctgggttcaacaccagagatgaccattctttggtctggactgaactcagaaaggatctcctgttctgaagcgagtgttctctgctccaccacacttaacactggcttacgtggaattgagaggttagttagcaggatgtagagctggggcaaagaaatttgacagaagtttttgaatctttcttctgacatattaaggtcagccagtaacaggcctccatatctaaggtggcattcaagaacctgttgcccgtcaaataatgacttttatatgttaactaagttacccctttttcttttcaattttgacagtgaattatacaattatacccaagatcaacaactcattttaacttttgcagatgtatactgtggatttttgcatttttaagtttatgaactacacaattattatcctttttccatttattttctagttcataaggacctaatgtgtgtttatttttcacaattggtaaaatactttttaatttttgggttacttttttttgctaggatgatatgttttgaagcgcagtatcttattttatttttttatttttaatttttgtgggtaaatagtgtgtgtgtgtgtgtgtgtgtatgtatgtatatgtatatatatatatatatatatatattttgggggtacatgagatgttttgatacaggcatgcagtgtgaaataagcacatcatggagaatggagtatccatcccctcaagcatttattctttgagttacaggcagtccagttacactgtaagttattttaaaatatacagttaagttacagttgactatagtcactctgttgtgctatcaaataataggttttatttattctttctataataattttttttttaacctgttagccagccccacctctccaccactcactcgctgcccgtcactccccttcccaacctctggtaaccacccttctactgtgtccatgagttcaattgtatttatttttagatcctacaaatgaatgagaacatatgatgtttgtctttctgcgcctggcttatttcactgaacataatgatcttcagttccatccatattattgcaaatgactggatctcattctttttgtggctgaatagtactccattgtgtaactatattttttcatagcacactttgattcaaacataaggtatggttattgtagaaaacttgtataatttaactttaatgtgttaaaggattaaaatgactttatgcctaattgaaggaaaagtgcctgatctctaaggaatctgggataaggatgtaatgtaaaattattaatatttggtgtcatgaaactttattcaaataacttctgaaaaaataaaataaattggaagtcttaattcctgtgttaaatagtttataattataaaatgaaaagtagaatacagtctctgtgagcatgagggaatttcctattttctgggtataatattccctccacacatactttatgatattttgtcagtacaacttcggactgctttttccataattgagttggttgtctctatttagagtacaagtagaagcctacagcaatataaatctgaagatctgtgtaatatattatgattgatgttaaaaaaaataggttaaggaagtacttacgtaaattcttccattaagtaatgatttaagcaaagtagagatttaaggaagataaaaacatacaataagaactgtttaaaatgttcttcttgaccactagtccaaggtttactgactttgttcccttgatcattagaccagccaggcttgttctcattctctgggcagtggctgaaaaccttttactaagagaagtagcttctaagaatatcttcagcccttgagggttccaagtccccctacaaatagcagattagcaatcagtgaaaaccttctgttagttccacgacttagcttctgtctggcgcatagaactccaaaacgtattctgaaactgaagaagtttgggggccagttttaactaatataagttttatatatttttaaattactagccacattcccaaaatgtattggtattttttttcttccaatggctgagattatttttctgctttctaattctaaattaggcatttcttattttttcccatgtagattctagatgccttaaacagtctacagtcttttcttcattcattctccatagttggggaagggtctttatctatgacattatgtcaagttttatttagaaaaattttagccatgtaaatagcacaggccttggatcttcacagaatgtgtttcaagtataggaggtgcgttgtattgacaaaatgatcttgtaagtttcttaaactctctgggaaaaaaatttagtttttcatttgtaaaataagtataataatacctgttttgaaactacgatatacataaaaagcctagcataagtctagcaaagagtgcgcttgtaatatatgagggttcacctctgctcttcatcctcatcactgtcatagtgctcactttcttacctataaggaccctgacagtcctatagagccacttagataagagcataaataactggaatgctgatcggtaccatgaattaaaatgcagataaaatcatggaagagaatgaaattatttcttgacaagaagactataaatggctttgtgaaaagacagaatgtaaactgtcttgaaggttaggaaggattcgaaacatggaaataggattgaaggcatggagatgggaaattactagtgatacagtgatacagaggatactttgtttccatgatgaaacaaagcttgaaccaaagtgaagtgtatccattattaaggtccttgaatatgtttcaaaagtagaaaattaagtctattctctgaaaatcaatgggagtgcttgtttattttcatttaaataattgaattgactgtggagtttgaagttatggagacacaaatttaaatccctgttgaacaacgactaacaggtttacactgtggggtttgttgtgtttaattgatggctgacagcaggcatgcggtttagagagcaaaatatgctcaagtggttccgtatatcctttagtgtgtgtgtttgtataacactatttttaaataaacagtgtgctcctgagagtctatcactgagttaggtttttatatggtctatgtatgagaatttttatatgtggccactacaatagtggccctcccttcaaagcccatgcaacaaacattcagcagtggttgtggggagtggtaggttcaagagtagacttttcttgtcctatgctattctacttttcagatttctcgccaaagtgaatatgaactgtgttatcacaaaaatgggtaggtgcttcatctgattatgaaaatgaacattaagttgatatctctcagaaggccgtgctgtgtataccacatctcagtatgtgaaatcagttgtctttctaaaattttctcatgataatatcctgttccaatttcaaaggcaaatgtctattgaaattgctaaatttcatgtgttatacttgtaaaatgttatatttctttcaaatatcttgcataaagttttcccccacagtattatacacaaatatataggacaaggatcctactatgtatattctaaccaacaaccgtgctgggcacatgattgatgataattgcccagtacatgtaatgaattgaattttctcagtaacaatttagtacacaattgacttagtatatggatcactagggatggatgaatacaaacaaattctgcactcaattttttcagatcactgaaaatcccagagcctctagagctctgttgaagtctactttataaaaagacatgaatatttacttactatacatttatacagcgtttattaagtagctattgattgttcatagttgccttctcagcaaccttaaatcctcatagaaaatgcataattcttaaaggcagctaacatctccattttttcaagttattaagaatggagtgaatacacagtagcatggggtacccttggcatgatgccacgggtgaatgcagaatgcatcacgggatgactaatcccatttctttatcctaaggttcactaactgtggttaatattgagccaagtttatttgtgcagtttttgaagaggccaagacattaagattccttagaataaacatcatctgggcatcacctgcacacctaaatggatttattgccaatgagtaatgctgtgccttcgctgcacagtctacacagaaaatgtcagaactcaataaaaacagtgcaacagtcttctgattgagtttgtattaaggtctctttattggattaatccggttcttttctcttcctttcctcatctgaatgaaacatattttaagggccattcattttagatgaagttgaggaaagtattttaaaaaaggaaaaaaataatggatttgcagttaggctcactcctttaatcccagcactttgggaggccaaggtaggtggatcacttgagcccaggaatttgagaccagcctgaacaacacagcgaaacagtatctctaccaaaaaaaaaaaaaaaaaaaattaaccaagtgttgtggtgtgtgcctgtcctgtagtcccagttactctgtaggctgagtggggaggatcacttcagcccaggaggtccaggctgcagtgacccatgatcacaccactgcactgtagcctgggcaacagagtgagaccctgtgtccagcaaacaaacaaaatatattgccttccttgttagaattttgcttaataccttggccgggagcggtggctcatgcctgtaatcccagcactttgagaggccaaggcgggcggatcatgaggtcaggagatcgagaacatcctggctaacactgtgaaaccgcgtctgtactaaaaatacaaaaaattatgagccgagatcatgacactgcactccagcctgggcgacagagcgagactccgcctccaaaaaaaaaaaaaaaagaattttgctcaatatccagcataaccctgttaattttgtgggaacataataaaagctactttgataacaaagcagaaaaatcagctgtttgtcttcttgcgcatgtcaaaccttaaatttggctgtgttttctgctctcttccccagtaacttcatttttaagcctctttcttatgtatttgaacaacaatcaagaaaaataacattgttgtgaaataccttaacctcacatgtgacgtctctttaaaataagtaatataatgaaagcaagcaagcaccggtaatctttagaaaggctaaataacttgagtggtaatgactaatgatcttttttgtcttcacaaaatatttcttgccatttaaacaaacatctgcatgtggagtaaagcatattgatagatagccaacatttcacattcagtgaagaactctttcctttatcctaagtgataatagtaaatttaaagactaattaatttctttcactggaataataagttctgggaaaatatcagatattttaaacattggaagtgaagagaaagttgcatctatgaaaaaataatttttagtaagattgatacacatttatatcaataattgcatactatatccctatcgatatatatatatatatatatatttgttgcagttcttatattctaatactgttttcttttccattttccccaggaaacaaaaatgaacatgatcctaaattacactttatatttcacatccgctaatagggctggtattgggaaacagtgccaaatatacaagagccgagcagttttctatttgagtatttgtttgcaaaacaagcccaggctaatggaggatcatttgtaggaagctaagtcatgctgggtgctcattgataacttagaaagactctctagtttgcattcccccaacccccagttggagatagtcatatgtgtttcaattaaaatatccatttacttccagctggcaacgttagtatccattctaccgacagagagcaaaggtcacaggctcctgcctgagcagacattttaaaaaatatgccatttgccttccttgtgaagatacctttgagccacccattgcaggcttggggagaagattttgaagggtcaaattgcatggggactttcaccttatttactgatatagctttagtagctgttggtccagatgctgcaactgctgttgctttgtggattgggattcagcagcagctgttgttctttgctacagcgtgtttctgaaattcaaaatttaatagtctgagaccctagtcattgaaaactatgctgaaagttaatttgctgaatccaagtttattttcctgctaagccatagtttgtgatggagcctttcccttgtgatgcataataaaatgaagaaaggccttatttagtgccgttaccagactcaagcaggagagaatgcagtagttacagagccgggcgtgggctttgctgccttgtaattcggccttactcacatttttagaatttcaaatctagatccctttatgcaagatatttgaaacaaatataacattttaaacgtataacatatgaaatttagcaatttcaatacacatttgcctttgaaattgaaacaggatactatcatgagaaaagtttagaaagacaactagatcttaacttcattgcatatagcaacctgatgaaactccagtttctctatctcaaaagattaaaaattaaattctaccatggagagttattgtgaattaaatgagataatatacataaagcacttattatcatctttgacacacaatttgcttttactatttttaccccactcatattacttttataagggttttctgataaagaaaaagctcctttgtttccttggttcatttctcagaagaaaattaattttcttgcccaataaatatgaaaattcctaatattcaaattcttgtagataatatttgttaagtaatactatgtgccaggccctattttaggtgctttacgtgtgttatccccttcagccatcacaaaaatcccatgaggtgggtgacatcattaccttttctgtttcatacttgaggaagttcttacttagaaacattaggaatttgcctgaggtcacatattacagacagaagtaggaattaatccagtctatacctgttaccaaaccctactttctccataaggaaaacaaatctaattaccttggaatgaagtatttgagctttgtttctgaaattaaatattctttcagcaatgggattctcaggcaactctaccattatggctttttccatttcctggagtctctagtgggtagacgaatttatactaataagtgataaatgttattttgtgaataagtctttgttttggcattctcacttcgacaatattggatatgatccacttaattatgaaaaaaaatgaaaatcttaagcttgacctgttcacatcaagatagacctagttatagatgccacaagtaaatcatggtgggagggatggggagtgggaaaacagtatttgggagatatagccaccaacagcgatccaaccaagcaacccatatccttgcaaagttaacagtagtatctaccaatatccagagttccagcactggagatgcagacaaaaatgatatgcaaatatgcacacagatacaaatgacccttggggagggggtgggaaaaacaaacaaacaaaacagccctgggcgcagaggcaggatcccagtttaacaggaaatcagagctcacatctgtagcttgatgtatgtaacatatatgaagatgagatctcagacacaataaacgagacaggaccaactggaactggcacttaaggttgcaactaaagagtagcaagtatagcatttgaaagtagaaattcttgagtcattccttggtaatgtcaagaaaaacgtctggagcctgggcagtacctgaagatgggagtctgagaatgaaagaaaaaaaaaaaaaagactaatcctgccagcagaaaattcatggtttgtctattcttaggaaattataaaaactctgtagcatggatagacttgcaagttgccagagttatattctaatgtataattttttttatttcaataggtttttggggaacaggtagtgtttggttacatgaataagttcttcagtggtgatttctgagattttcgtgcacccttcaccgaagcactataccctgtacccaatgagtagtcttttttaatataaaactttgagatatatttctttatatttcatactttagctcacatttttcacacaaaattttattagatattttatactttaactcataaaggaaatggtataatacatgataacgtttccattaagactaaggatgaaatagttaaaacttgtaaagattctgtaaaaccttaaaaaagagtaacctttatttcattaatatttaactttttttcctaatcctagtaaatatcatgtaaactttctgtgtactcaaaccttgctttaaatgtcagcagatattgtatttatatatacatgaaggagtcatatatataggtaactggtaatggtatttgatttggggaatgaaaatagtctttgggagcagcaataagagaaaagtccttttgtaccttttgaatatttgataatatatatgaattgaattacctattaaaatattttaaagaagaacaatgcagcaatgctaaagaaaactgaaaatcttcaaattcagttatttacaagacgctagaagcaggttgtgaaagtcttttgcttttctacaccccactttcaatttaaaagtgaccatgttcacgtcaaaaccaatgttaaagcacttctaatttcagtgaaataattttttttcccttcttctgaagaacactttttaccttctatgaagtgaatgactgtgacatttggatgttgcagagtttcttgttaagtatattttgtacatgaattacttccaggaaaaggtcagttcaatgtttaaagatttttcatacaaaataactaaaacagacctcttaggaattgcccactcctcacccctgttattaataccctaagtctatttgttaattctctgctgttgttttaaatatttacaaatttccctatccttttctgtgccgtttcaaaatataaacttagtttttcttaacctgaaaccttagatagtaaaaaagaaaacaaaaaacattccctcagaatgtagcatttttgtcaatttccctttttcaacattgtcaaaatgttggatttcattgtaatttgcctgcaagtctctgtctttatattcagttttatttttttctcccacttgcccccaacttcacagactgtgaacctgacttcagtgcctttaacttccatggacctgtgtctccatttctgccctccctttatctgttgaaaggggggagaagcagcactcagtgtaacattctgtaattttcgacttcaattatgtacctgctccacctcagcaggtgttggccccactgcaattggggaaatgaaaagcgtgcaaggaaaacatagaaagaaatgtgtggggtctggttcattgcttatatggcaacattttaacaataaacttgtttcttggataaaggaatatatattctttggattaacaaatttaaacttctcactcaactctttgccttttccaataattgagagtatcttgatcgtttcttcattaggaagtgtctgctttcttgattctcaaggacgtcattcctcaattgggctttgaaaaagtgtgttgatatttctttttatctaaggaccctcagcatctttacaaatatagactccttaaaaacacatctggtcagctgggcacggtggctcacacctttaatcccagcactttgggaggctaaagcaggtggatcacgaggtcaagagttcaagacaagcctgaccaacatagtgaaaccccatctctactaaaaatacaaaaattagctgggcttagtggcacgtgcctgtaatcccagctacttgggaggctggggcaggagaatcacttgaacccgggaggcggaggttgcagtgagctgagatcgcaccactgcattccagcctgggtgacagggtgagactctgtctcaaaacaaacaaacaaaaaaaaaaaagaaaaaaaaaacacatctggtcactatagttgcttcagtgaattcagagagaaatgaacaacaaaaaaatatagtgagtgaattaccttttgatgatacgtggccttatggctgaactaagaccataaactgatagtaagcaactcctacctgaacataaggcactgccatctgcatttaagagattggagaaatgaagaggcagagatatgctgtaaaatttttatgtttccttgtaataatcatgctgcaagccactgataactgcaagagcagttactacctaaatgttattcagtagcttatgaagatattttgataggtactattctttcaaagttaagtccttaaacatgtgctaatgaaacacactgaatattgttagtgtttttatataaaaagcatttttaatgacaacgtcaaataaatttcactctattaaatatgatagtgctccactgataacacttttagaaagtaattagtaattcagcatgttcagggaatccctccttctcttcagagatgcatgtgtaaggtgaatgcaacaaaatgaaaaatctagttgtcaagttggagaaagtttttttttttttgcttgtttttttttatgacttttttttctttttgttattatactttaatttcagggatacatgtgcagaacatgcaggtttgttacataggtaagcatgtgccatggtggtttgctgcaaccatcaacccgtcatctacattaggtatttctcctaaagctatccctccccttgccccctccccttgacaggccctggtgtgtgatgttcccctccctgtacccatatgttctcattgttcaactcccagttaggagtgagaacatgtactgtttggttttctgttcctgtgttagtttgctgagaatgatggtttcaggcttcatccatgtccctgaaaagagcatgaactcattcttttttacggctgcatagtattccatggtgtatacgtgccacattttctttatccagtctatcattgatgggcatttgggttggttccaagtctttgttattgtgaacagtgctgtaataaccatacgtgtgcatgtgtctttatagtagaatgatttataatcctttgagtatatacccagtaatgggatcactgggtcaaacgatatttctagttctagatccttgaggaattgccacgctgtcttccacaatggttgaactaatttacacttccatcaacagtcgtattaacaattacaataataatacaatatgtgctgtaatagacacacaggccatattctggaaacaatgaagatggagtgactaccttgtttgtttgagtcaaaggagttcttagcagagctgatggactctattgaattttagcatgagaatagcaatttactaggagttaaagattatttgaagtagcgcataagggataaaatatgtaaaaatttttaaatacatttggcccctacaacattttgttagacataaaataatcttgttagcctattgttctattgaaacttttttttttgtatttttctttttttagtagagacagggtgtcaccatcttagccaggatggtctcgatctcctgacctcatgatctgcccgcctcggcctcccaaagcactgggattacaggtgtgagcctctgcacccggcctattgaaacactgtttaggagatattttatattcaaaacattttgaatacactatacttcttttagattagaaatttatatttcagtacattgcttctgagataaacttgaaataccagttaaattttaccctatttattgttagaataaaactgtcatcttagattggtcaacagatatttgctttataagcacagaaattaggctttttagacctagttattctatagaaattagtggttcagctggtttggtggctcaccatggtcatacatagactcattgttcctttggcagtccataacatgccaagctcatagttttaccccaccatgacccaagaatagcaacttgatgttctaagagaaaccaataatacagattccttgatagtgctatttataggtggtatggtttagttcatcagcataaggacaatggaaactttctataagtgaatggcatttaactgagaagatgcatccatttgagtgtgtctttcaagatgcatcttctaaactttgaagggattcagatactccctccaaagatgtactagttacctccacttaccaagtaataggctgcctacattttttattccacttttagaagtattcattgtggctttttgtaactatgagattaatattaaatcttattaactagggaaagataacgagtatatctctctttttaattgttatgttcaggcatgctctcggtcccacaaaacttttgattttgatgagcagagtacatgcccaacatgattttgattccttaatactgattatattgaactggtgagcaaatatctcccttggagatgtcaagctcaagagcaatagatgctgaggtagaagggaagagaaagacagaatttatgcgactgttctatacacataccatgaggaacaaagaggggagaaagttaaaggaaacagtcactggggcagaaaccacaaaaataaggcagtgaataaaagagaagatatccagagttgagagctgagctgtactgccatgaaaatctagctcggtgtgagacctctgcacatccttacaacaaatatctacaacttaaagtaacctgaggctgtctctgtctggcatactaaaagaagatgacccatccagtttaatcatatactacgattttaagacattgatttcatcagtatttctaaaactaatgattctcttcattaactgattattaccacctttagactagaatctgcttgctcctgtgtttctttgccttttcatgttttagttttatctatgcatcccagcctacttattggaggtagatagaggattggagagttgcaaagatagggaaaggaacttgtatcaagtccaggcataactgccactacctccagtcctgatgtgcatctacaaagaacgctttagcatatgggtagagcctaacacaagacttttttcaaagatcttaaggctagttttgtttgaaatattttgataccttcatttacatagaatggattttgaacctaccataattgtagacctgaacatgatataatagtctttattcctgaagataaataagattataattaactgtgggatcattaatggactagaacactagtcaacaataaaaaagagggttaacacaatgtaacagcacttgtctgattcgtaagtcatttggctcttgcacttaatcacatgaccctaagaagtcatttaacttatttgagccttagtttacacacttgtcacttggggataatgttaatacatataaaggaattcatctatgtggcattaaagagaatttcaatcaacttcctcattcttgatctgatcactgataagattgaacttgagaaaacatagaaatcctcatttttaaaacctcactgctcaaagtaaagtaagcaagagtaggcaaccaccaggagcgaatgaacatctcattctctatggttgtaggtcactgtcctaggatctagcaatttgtttccctaagaaaactaagttatcttcataacttagttatcttaataactaatattaatagcatattaataactcattaacatcaagaagaaaagagaaaaatctcttttatttgttaaatgttatttgtatactttttgtacatgacaatatgccttatgaataatttcaaaaaatataggtgataaagttaccaattataataaaaatatcctattcagaatttgtgtgaaaataaattaagatatcttgtgtaagtgcgtgtgtttgaattaccttcaaaatataaagtatctttatacctgttggacacaataaggactacccatgatattaattgaatcggtcattactcattgttaatctcttgactatcttaagatttatttttgtaaatataccacattatttaatgtcactgaatattttgatggtgctgttccaatatcaaataactgccagagttttagagaaagcttgcctttcatgcatatttaagtttccattgtacttcagctcatcctaaagaaagatattgccattaaccatatatccttgcaatagcagttatgtctgaaagaagtaatgtgcagtagaatatgcagcataaatgtctatacttctgtattaattattgacccaaggttaaatgtatgcacatgaatgctgatgttcttggttgtaatgggttgaatttaattacttatttattcctttgttgttatcagtacccactagtgaatacctaccttaagtaaatctactgcttgttcatcaatacatgggaaaacaccagcattatggcacagatgtttatgtattatgcagagttattttatcgacttacaaaaggcaatgctaatggccatgccattcgatgttctataaatagtcatttttgaatgtgaaaatgtgaagatgagagacaaagagagcatatactaggcatcaagcactgtattagaaaagtgaatgttttctgttctgctctgtggagtaggtaaagcagaaacagttgagtgagtagatatcacaggaagtaagatttctacatataacaaagaactttttcacacagttagagctgcctttgggaattctgaatttgccaacattggacgcatttacaaagaagctacatttgtttttcaggtatgttttaaagcagtagttttcagattatttgcaaaatgaaacaattctttcaaatggaatattacacaaaaatccaatctctaatactgagagaaacaatagaacataaatataaatttgtcttataattaatattaacaataatttacttactcgtaattcaattattggtttgacgagagtcctgatgttggtctccagtatgttaaaatctgggatttaacatttttcagtgtgtgtagtgtttgtcttattacatatatatatattttttaattgtgaaattctaatcaagcatttgagtcacctatgaagtcctggaatattgttctaatatcagcgttgcagaaagaagtcctgccctgtattgagtggaagaggtaacagggagatctagatttggctcatcactgccaactttctctaacattctcgtcccaagcctagctctcaatgcgcaaacaggcatacatgtacacgtgtgcacatacatacatgcacactacttaaggctgccctagtttgaaagctctgattctgctgattaactattcatacatgagaattaaatttagaatgttttcatttagggtaaatttgcatggagggaaatcttgttttaattatctcagctgaaattggttcacttaagattgtaatataccagaaaatcattatcaggaatttgttttatataattttatgcctcttacaaatttataacttcagaaatccatttactttacaatgactgtttcaagatgtgatattgtagttgtaacagaatctgcatgaaggaactaagaccacagggaaggatttaactattttgatttaatgatgtgactaaaattcattttttaaagtcttaataaagagatgcagactctaattgctgattaacacattgtttttctctaagcccttcacatggaatataatttgaaggtcgtgataacctctcatccacagtttttcactgcctttgcttatataggtattttcttcatgttttagatgggaaagggaacagaggttttggatgactagataattttctggtgaacgagcacaatggtccattttattcacaaattaaacttcagaatattattgatttgctggtctcacatttgatactacttttcaaaaaatgatttcatattttaaaagacatgatctagttttaccattataactctgcaaagtggcattatttttgtcattttagaattgagataattgaatcttcaaactatagctgggccaagaagctcaatctgagcttacatctaagcctcctttcactggctcactgttgtcccagacttacaccatttgttcatcataaatgtgtaccagattcaattcaaggaaactgaggaagcacagtacctgtagactttcaggaagccctttgagcagtcttctgtgtgctactaaaggatataggttgggagtttatgactgttatgcatttgtggtgctttttatttttaacttgtgggagagttaattcatgattcagaaccatcatatatgtaccctttcacatcagaaatgtaggggacgcttggggataaaatgaaacaaatgagaacttggaatgatatataccagtggtccttaaactgtggttcccagatcagcagcatccacatcacaggtagcttgttagaagtacctgttcttgggccccatcccagatctgctaaacagatactcctaagggtatgaccccgcaatctgtgatgtgacaagtctaatgattttgatgcaggtgacagtttgacaaacattgctatagaattcttaagcttcaaggagtatttagaaacttatattattccatagaaaaataaaaactatagaaggatataaattctcagagatagtatacctaattggtttgtgaagattagttgaataagcagtcttttgtattttttctcacagaacgaacctttagatctcaatatactctttgttaagccagaactttatattttcagaacagttttgctctgtgcttgaactatgatcacaaaaaagtttctttttgctttttctttcatgttaaattccttgtatctcatgactatagaagaagaactaaattggcatagaacttcataaaagagagcccacaacattagaaagatagcaggtcagttaagatgaaattgtcctgggcacatcaggtcagaatcagatatcaactgaagtggtgaaggaggcaggggaaaaggttagagtatttcaagtcataatagcaagaatgttctgtaaaaagtcaatagatatctattgagtgcatattgtatgccatacaattttctaggcacttgagatatttatcagtgggaaaaaaagacaaagatccctgcttggataggttatattatattcagggatacagatggtatgtgatgaacactataaataggtaaattataatatacattagaaattgatagcattatggaataaatatttaaaaaaaacagaaagggaatgtggtgccaagatcgtaaatagcaatgttatggataatgtgtaaagtcacatgagacaggccctctttcaatagaatagatttatttagcaacttttagcaatggttgtatttgtagactgtatggtggctctgtctacatccagtactccccaaacctgatggattttaatatctgggaaactacaaaaaaaaaagtttaaattttattttaatggaaatggggcttttatatagaagagattttcaaaaccaaccaatcaaacagtaacaacaaaaacaaaacttgaacacacacctaggaaagcacgtaagtcgataaaatgagaaaaaagggttaggtactgggtaagattgagcaatcgagacctagttcattaataaattttagagccagatgcctcttttatgtagcttctggatcctgctgccaaaggtggctgtgttttaacaggaagcttcttcccccaacacacccacatataccaattaatactgataagtaattttgacaaaggacttcacgttttgcctttttttcttccctttctctgctcatccatttctacagcaaactgtggaaattaaacttaatctactgatgtgtgatccattgtctttaggagatcgtaaatgtcctctaacaggattgagttgagagacatgaggtgtctttctaagaaattggtcataataacacccgattgccaataatgctgtttttatgggaggtgttttttaatggcatatgttcaagtatcctacgaactttggtgtggatgtcttgtaatagttttgtgtaagagttttattttattgagatataatttgcataccgttagaggctgaattgtgtctcccaaaaaggtatgttaaagtcctaacctgtaatacctctcagaatatacccttatttgacaataagtttattgcagatgtaattagttaagatgaggttatactggagcaaagttaatccttaattcaatctgattaatagctttataagaaaagatagaaccacacaggcaaaaggctgctataagtgacgacagaggaagagattggtgtatcgtgtctacaagccaagattgagaaggattgctggcaaacactagacgctaggcagaaggggggaaggattattctttacatattttggagggagtatggccctgcttactttcttgattttggacccctagcctcctgaactgtgaggcaataaatttctgttctattaaggtgcccattttatcatgttttgttacatcagccctaggaaacgactacacatactaaaaatgcaaccatttgaagtgtatgatttaattatttttagtaatttacagagatgtgcaaccatcaccacaatccagttttagatcacttccattaccccccaaaaatctttcaggttggtttgctgtcaatgcccattatactccactgctatccccacacatcaactcatgtgcgttctgtctagagatttgctttttctgaatatttcatataaatagaattataaaacatacagtttttatttggtttattgaaattagcatattgttttagaggttcatccatatcagacttttattttgttaatgtcaaattaattttccccaagacaatctatgtatagtgacaaacccagggaagtgcttaatgtacttttttggccaaaaagaaagtgttcaatgaaaaggtgaattgttggccaggcacggtggctcatgcctgtaatcccagcattttgggaggccgaggcgggtggatcacctgaggtcaggagttcaagacaagcttgggcaacacggcgaaaccctgtctctactaaaaatacaaaaattagcagggtgtgatggtgcatgcctgtagtcccagctattcgggaggctgaggcagaatcgcttgaacccgggaggcggaggttggagtgagccaagattataccactgcactccagcctggggtatagaacgatactctgtctcaaaaaagaaacaaaaaggtgaattgtctattacatatgacttaaaactctattgatggggtagtcaaggagatattactccatgcctttcttaatgtagtgtttctaaaaccggagtgtgttacagaatcacttggagggcttgttagaatacacactgtggaccctcagtcccagagtttcagattcagtagatctgggctgggacccaagaatttacctgagtaacaagttcccagattatgctgctggtccatggagcatcctttgaaaatgactgtattaattgaaagccaatttagtagtattaggcctcttttatttctcatctctatcatttcctgccttcttctcagtgtcttataagtagaagagattaacctagagtagcttctagtccaagtacatctttgaaagctgtatttaagttttgataactatcatccatgccttctgaagaatattgcatctgccaagagcttttgctttgcagaataaaatttaaaaatcaatcagcttaatgtcatctctgtggtgcatgcttcttaagatcatagtcacttgtcctattttaagggagtctccaatctacaaagctgagagttgccagcaatgttttttcttctttttttcaaccaacaatttagtttgagtacccagttgcctaaatgcacaagactgtgcaagtcttcattgactctataataaacaatgctttttctttcttaattattattatttttggaatcaagacttaccattcacttacctttgcttgtatatgcttctttcccctttatatttaccccaactgaaagaacaacatgaatgcaattgtctcttctatttgttatgttgtgtgtagatttgttgctatagtgagagaaaagatttaaattgaataacattaatttaggaaagttttacagacagtacagaacagtgttagatccaggttttgtgagatctgaagattatataaatggagaaagagggagtcaatttttaattaaaagaagacaaaaaattatattttatgcacaatacaaaattttatattaagtgaatatttagaagaaaggaattataagaaatcaaacaaaaataaaagatcacagaatttggaggaatagcttttatttattaactgcctgacacatctgtataattctttttgcccttagtttttggctgtgtactctggtgatatcttcctatgacacaggttttttaatatttttatgcataaaatggaaagtaaatattgtcttttctctatcttggttgattgaaatttgccttttattattgatagttcagaaaaatttctttcaactttacagctcattattgatagtgtcatgctaacgtacaatttcctgaggtacaataaaacataaaattttaccccatgaccttcacggttcttaatagtgctactacaagctgaggccttgaaaacacaaattctgatgaatataatttcatataatttccatcaagaaagaatgtgtaatgcatttatcattgtatatattgcattgttgagtgtattatggacaggagagaacttgctttggattagacttcattaaggacaaaagattgcacttagaattttgtatcatgtcttatgattgaatgctttttatacaaatgcactttaactccgtgtatttgaaatacattttttcactcaatgctacccataaacttttggtgccaggcacaatgggacatgtttttgtgatgatgccatgatttctagactagtacttttcatatcatgagtccattgagtatgagtgttctaggaaaccattcctaaaccaacaacactaccaataacttaactttacacaaaagttatggggagcaacagaaatatatctcactgaaacaaaatcacaaatattcccaagtcaaatcccttttgcttaccttccaaaaatgcccacgggttctctaaaatcatctgacacaaagggaagtgtgggtaagaggaagttggagtggaaaagggaacattcttatgtaactgcagataaattatctcacttttgaaaattttacaaaagcacatggctatgtgatcatactgctgtgacttttcctagttctttgtgtgaaggccatggcttaagtatacattgactttgtgggaagtccacctctaccgctgctgttcaaaaatagatagcatttttttttcagattgtttgctgttggtatatgtaaatgttattgatttttgtatgttgattttgtgtcctgcaactttactgaatttatcaattctgacagttttttggtggagtctataggtttttctcaatataaggtcgtgtcgtttgcatacaaggctaatttgacttccagaaggaaaacaatttcaatctggatgcccgttatttctttctcttgcctaattgctctggccaggacttccaatcttatgttaaataagagtggtgaaagtggacatccttgtcttgttccagaacttgaaggaaaggctttcaagtttttcatgttcagtacgatgttggctgtgggtttgtcaacaggcctttattatgttgaggtatgttccttctataccaaatttgttgcgggtttttatcacaaaggcatgttgaattttatctaatacttttcagcatcaattgaaataattatatggttttcattcttggttctgtttatgtggtgtgtcatattcattgatttgcaaatgttgagccatccttggtatgaatcccagttgatcctagtgaatgatgtttttaatgttctgctgaatttggtttgctagtattttgttgaggatttttgcttctatgttcatcaataatattggcctgcagttttcttttttgttgttgtgtccttgtctggttttggtatcagggtaatgctggcttcataaaataaatttggaagtattccctcctgttcaattttttttaaaaagagtttcagtagaataggtattagctctttattttggtagaattcagcagggaagccacagttcctgggcttttctttgatgagagacttttattaccctttcagtcttgttatttattattagtttgttgaaattttctatttcttcatattctgtcttggtagaatttacgtctaggaatttattcattttcttctcagttttcaaatttgttggcatatattgttcatagtagtctctaatgattctttgtatttctatgatctcagttcttatgtctcttattttcattttttattttatttgggtctttttttcttagtctagctgtaagtttgttgatttttgtttatcttttcaaaaaaactacatttgttttgttttttttttcctgcaatttttaagtctcagtttcatttatttctgctctgatctttattactttttttccttctccgagttttctgtttgactttttcttgctttaatgggttccttgaggttcatttttaggttatttatttgaaatctttctacttttttgatgtctgtgtttattgttataaacttccctctcagtactacttttactgtatcccacagattttgatgtattgtttttccattttcatttgtttccagaaattttaaaattttcttttgaaatcctcttatttacagcaaagttgatgaaacttgaggtcattattttaagtgaataagtgaataagtcaaacacagaacatattatatgttctcatttatatgttggagctaaaaaactagatttcgtgaagatagagagtagattggtagctaccagaggctaggaaggagaggaagagaggaattgaaaagaggttaatgggtataaatatacagttagatagaagaaataagacgtggtgtttgataggtcagtagagtcactattattaatactactctagtgtacatttcaaaatggcttgaagaaaataattcaaatgttcctagcatagagaaaagataaatattgaaggtgatggatatgccaattatcctaatttgattctagtagtgtatcacatttttacatgtaccctgaaaatattgacatctgttatgtaccaataaaaaataataaaataaattttaaaaatagctcagaaatataatataggaaaagaagaagaaggaggagaaaaaggaggaggagaaggtggaagaggaggaagaggtgcagtagtacaagatttttttcagatgggagaaattatgtgtgtgaactatgagaggagggttaattcttcttcattttataaagttgtcctgactagacttgaaattacaatcagagatacagggctttctgtgatttgtattttgctgggattttaaagtataatttgggagggatagatgagaaaggagacttgattaagatgcttgaagtctacaattaaatttcatatgattttcagaagcaattttaaattgtttaggactcataagacgagatatgtcatgattagcatggtgactcacaaagacgattctcatctttgttggtaatagattggaagtaaatgatggagcccctcactgtgtgtggctccctccttacatgctttccagttttccattatccatagacccctaaaaagctttgcccaaaaatacacttttcaaaaagtgcccattttcttaggctatcaaaatattgtagaaaattcagaagtaaaatgtactctgcttatttctcattccttgtatgtcccagtcacttcaggctgctataacaaagtaccatagactgggtggtctgtaaacaacagtcatttatctctcacaattcaggaggctggtgcaagtccaagatcaaggcgcatgcagattcaaagtctgatgagggcctgcttcatggttcatgggccatcttctcactgtgacctcacctggtggaaagagcaaaataactctcttggggtctcttttatgagggtactaatctcattcatgagggctcatgacctattcatcttccaaaagccctaccaatgaataccatgacattgaaggttaggattttacatatgagttatagggggaaacaaacatttagtttataacatgtattatataacctacagatttgtatttaaaaaccttttatcactctgaaggagcacatgcagtcaccccgaagactacattatacacatagcaggtgtcctaatattgtcattaactatttgtctctcttttttctttataaccttttattcatgtaacagatacttattgagcacctattatgtgccacgtgctatggatacatctgtgaagtaaaacacataaaaataggtgtctttatggggcttatattttagcacattttactcctgagaacaaacaaaacatggccattttaatcttggttagatagcattatctgacttagcatttatctgacttcaaaattagtttatccttggaatataatttttcctttataattaaatgtaaatcatatttaatctcctattcatggtcaagtcagaggagttctaagttacaacaataatctgcattttaataaatatcattccagccagcatctattgcataacatgaaaatcgcatttttacaaaatgtattgttctgaatgtatagcttaccatataattaaatataaaagtgttttttttaattacttaaaggagcaaaaggatttgtcacattaaaagtatggagttttctgatgaggaaaataggcgattttgagccattataattgctttttaaattgtatttctaaaatataaccgctttttaaagttttcacttctaaaagacattttgcaagacactaaaggtcactcattgtaaaaactaaaaaggctgactctcaaatctacatgtgaatgtcatgcttcatatcaatgtcaatattcagcatctaactttcagaaaggcagagagaatgctgtatcattatgtattgagaatagcccaatatctgctagttatctatctttctttcctcatattgttgctacacctttcaacagataagaacactgaaatcagaaaaacacttctgtaaacttagaattagagccccaaataattttattaacaaaaccaacagatatataatattatctaaaataaaatctccgccaggtattgtggctcatgccctaatcccaacactttgagaggccaaggcaggtagattgcttgagtacaggagtttgagaccagcttgagaaacatggtgaaaacccatctctacaaaaatacaaaaatgagctatgcatggtggtgcactcctgtagtcttagctactcgggaggctgaggtgggagaatcgcttgagctagggaggagatcgcagtgagcgaagattgcgctgctgcactccagcctgggcaacagagagagaccctgtctcaaaagaaaaaaagaaaatctcagttgtaaggcagcaatacaaaacttagttatattaaatctatctgttgtggagagccacgacaattgtattcctaacttctcctttgctctctagaagcctgagggaaagatgttcttgagtatcatgatttctttttctttgaagcaaataggcatatcaattctagaagagaggcatggtatcatgaaattgttgctgaaaaccaccctgatgggtgtttttacataagatatcaggggttgttaagagcttaatgctatactgagattaaagaagttcctctgggtatgcagagagagacggttcacatgagaagcttttggattatctggtggtccagaatcaacaaaacttaaaaactaaattttttgaaggggaataaataattagcaatatcccttagaagaactctccttgttatttttagttttaaataacaatataagtgaaaatcttttgccaacaataaaattctatgcagatattaatgatcactattcctcttgatgccatgtttggttaggtttttagttagagattgaagttgtagaagaggacagagagcctatgtcatggagtaaaaattggaagaaagaaaaagctgtatgctctggaacagtgtttcccaaatgtttagatgtaaatgaccaagataagtcaatttcaaaatctggaaactggcatagtgccacctattcttcaaaattttgttaagcaaattaaaaggctacaatgtagattattaaccccatttcataggaagaacataatctatgatctagattattaaaaggctacaatgtagattattaaccccatttcataggagggacataatctcagatgaaagaacagacctttagattgaacatatttagcttgataaggtactctttatctttatttttctattttgctaaggcaacttggtacttggggatggattgagaatgctggtatttgggaatctccactgtaactcccagcctctgttagattggagtagcttcttaccaggttgtgtttaccttagtacagaattgcatttctatgactgtcaggcaggtggactgtcaaacgtgctaggaaaagcgaagtgaaacctgtcgttaagccttaagggtagccaatgcactttccagagaaggccccaagcttatacctagagacagttgtgcagttttccttggaaagtatttcagaatccgtgtagatgttcaaaaaataatgcagagttcttccccataaaacatgagatatcagagtgttcttaaaacacagaggtaaaaggctctaacacagtctcaccttaacaggtgatttactttattgatcagtgaagagcaccccagatagctaaatgagatggctgaatcttaagaaactgataggagtgtcccactgaatgacagagtattcttgaccccaaataaaggttgtgttgctgttattcagttgagttttagaacacaggtattcattacctaagtgacaaatgcatgctaccatctctcagcatttagtcgtctccttttctccctcctaagagtcaaccttctgtatctcttcccttcttattggttctgaatttgttttaaaagtaatgcacattgtgtgtgtgtgtgtgcgcgcgcgcgtgcgtatgtgtgtgtatgacaaacctgccttactaattgaagatacctcttttattttattttttttctttgagacagagtttcatttttgtttcccatgctggagtgcagtggcgcgatatcggctcaccgcaacctccgcctcccaggttcaagggattctcctgactcagcctcctgagtagttgggtacaggcgcctgccaccacacccagctgatttttatatttttagtagagatggagttccaccatgttggccaagctggtctcaagctcctgacctcaggtgatccaccgcctctgtctcccaaagtgctgggattacatgcgtgaaccaccacgcctggccccctctttttaatactatgaatattcttgtagtagttagaagctaagaaagtatattatatacggactaatagagagaacaaattcatgtgccttgtcaagtagcaaaccccgtagtgagaaatttagaactgatagggcagttttgacatcctaatcctttggtctctgtatcttcatccctcaaccactggaaagagagaaaagagccagagaaaacctcctactcatttcacatgtaaaatcaggagtggttcatactccgtgtacctacatcttagctacatggccgcataaagttggaaataggtctgggaaatgtatttcccacctgagcaagcatgtgcctcagtgaaattcaggagttctattaggaaagggaataatgaatattggtggaccaacaatagcctctcatctttcttctcaagagtcaagtacttattcccatggatcattctgagataacagcatcgaagaaacatagatcaaagagggtggtgtgctgtgagggtggaaatattttggggtgggtgactaataactttatttttaatgctgtgattttaaatgggaatgctactctatattgtaaaagctcaaagtcttcatcaggtatctttgggggggtcccagagaccattttcagggtcttgtgagctcaaagtggtatttgtaataattctaggacatcgttggctttttctcagtctcattctctcatgaatgtgcagtgtgctacatcagctctttgaaggataatggaatgtgtgtctgtgtatgcatctgtttaaacacttctcagtggtaatttctaatatgataagtagttttatagatatagcccacataaagaaaagctcttggggtccttgataatttttaagagtataaagagatccaataatcaaaaagcttgaaaatggttattctaaagtataatgcacgttaccatgttaccttctgaaagttttttttttttttttttttttttgagacagggtctctctgttccccaggctggagtgcattagtgtgatctcagcttactgcaacctccacctcctgggctcaaacaatcctctaaccttagtctccaaagtagctgggcctataggcatgcaccaccatgttcagcgaatttttttatttttttgtagatactgggtttcaccacattgcccagactagtcttgaactcctggactcaagggatctgctcactttggcctcccaaattgatgggattacaggcatgagccactgtacccggccaccttataaactttaaaatccaacctatttctttaacaagtcatttgattaaagacatttttaaaaatttatgaaaatattttttagctcagggtttagcatccaaatgctggttcgtgctgctaggaaaacattttcttgttgtgacaaccgatatgtgatgtagtttttcagtagcactttttagtatttttaggggtgctcaaaatcaaatcacgaacagaaattgacaattgcttttcagcttttctccttttatgaaaaacaatctctttttctcaggaaagttaaaggtttacagaagagtttgggttattaatgtttcctcattctacctggtatatgttaaaacacacacacacacatgcacaatttgaaattctataataacagttaatattggaatttttcagaattttctcagcattcagctagagtcttttcattttgacctaccatttcagtagatcaacagtgttttaaatgctgacattacatcactaagtgctgagatgtttgagaactgtttgccctcttagaaacctaataataaagtaaactttgattttagcttttacacttctagcattttcataccttaataattttggtcttcttcagtaattaatcttaaaagaaattttgaaggccttgaattaagaaacatatgtgcatccattaccttacaagacttttgagggggcacttctaaattatttttttatttctctaaattagaggacagaagtaaatttaagacaggcactggacattcagtggagagtaaatgtcagccaatgcacactaggcctaaactgcatcaacagctcattttaaaatgaagatatggctatgttatttgttataggaaaataaggaatttctcttgctactgtaccagaatcttagagcaggcactgtctaggatgaatatttttgtcttcagttttccttattttttactgtcagtttcttttttttttaacttgtaagttcaaggatacatgtgcaggtttgttacataggtaaacttgtatcatgggggtttgttgtacagattattccatcacccaggtattaagcctggtacccattagttatttttcctgatcctctccttcctgatctttaccctccaaaaggcccaagtgtgtgttgctcccctctatgtgtccatgtgttctcatcatttagctcccacttataagagagaagaaacactatttggtttactgtccctgtgttagtttgctaaagataatggcctccagctccatccatatccctgcaaaggacatgatctcattcattttatggctgcatagtattccatggtgtatatgtaccacattttctttatccagtctatcattgatgggcatttaggctgattccatatctttgctattgtgtagtgctgcaatgaacatacacatgtggaacagaacagagaacctggaaataagaccacacacccaaaactatttgctctttgacaaacctgacaaaaacaagcaatagagaaagtacttcctgttcaaaaaatggtgctgggataactggctagccatatgcagaagattgaaactggaccccttccttacaccatatgcaataagtaattcaaggtagattaaagacctaaatgtaaaacctcaaactgtataaaaaccctgggagacaacctatacaatacctgtcagttttatcaaattacagtaatttccaggctgcaagactaaaaacgttttgaaattgccaagaccttatcacaatacaagactagtttcatagtttatatgtcacacagaaatgttctatactatgatgttacagcttagcttcattcttaccaaatttactagtactggttattggggattctgtgaaatagacatatattcgtgtatatgtttcatggtgaaatgtttcagggtttggatatgtaatgttatttaatgtgtttttcattatgtgatcagcattacatggggcacttgagacagaatcagtctcatagtctaaggacctggtttttagcctgtatccctagtaggaggttgcatgtacttagacaagtgatttaaattgcttgcactgcaactttcttatctttgacatatgagatgtgcaattttgggcaagtcactatcctctctgggccttcgttttttgtcatctgtaaaatagggatataatattacttattatataatattttattatttagggatattatttacccctaataaagtagagacataatattacttattataggattgttggaagttatgagagttaatgtctctaaactgcatagagcaatgccaggcacatatacactataagcatgttacccgctattaccatctgtaaaatgaggtagttctctggatcagttctgaaacttcttctagcttttatatctttatttaattgaaggattaaaaagacaaactcatagtttcatatttttggtgggaaatcacatcaatttgttagcttggcccaaatatgattgttatggttcatgttgttgcttgcagggtccaccaggtgtcacagacctgtcctgcacagaggaggcaccttccccttgctctctgaccacaaaatgctccttttttcaggttcatgggaagatttttaggcaaaaattccgtggagtcctgctctcagtactcgacttgactgtcttacaagcctcttgttgcctcaagcccaaggaagtaacctcaggctgaaaggctttctagggctctttaacctcagagtggacacaaactcagatgtccatcaaacagctaagtccaagctttaaatactttacacagctgattaggagtttagggaacacataatgcgtttcgaaatttaaaattggtgcaaggtaagaattaatgaactctcatcagaagtttttctcccaggagctctctccagcctacagtccaccataacctggaaagtatggctttccacaagtgaacttcttttagcctccctcccatactgggatttcagaaccccttctaaagtcaatgaggtaggaaagaggcagctgtccctaacacctccagaaaactgagatgaagaagatgagtctccaactacagcctagagattgtttcacattatggtatggagtcattgaccacttcttcgttttcagtctgtaggtttcagaaaagaatatttgctttagttttgtgtattaagaggctacttgaagtatgtgtgtgcgtatgtttaaaaaaattacaaacttgcattaagggaaaattcaagttcccatctccaaataaaatttgaaaacaaacaaacaaaaacaaaataaaaatgtaaggcagcttttaaaacaagagtggctattaagtgtgtgtgtgtgtgtgtgtgtgtgtgtgtgtgtatttgattatttacttttatttacatttactttaccacattccattaaaaattttgccctaattcatagattttgcttatataaacctaccttcctgtattggctgttcttgcatagctatgaagaaataactaaggctgggtaatttatgaaaaaaagagatttaattgacttacagttctgcaggctttacaggaagcatggtgctggcatctgttttggcttctgtggagacctcagtaatcttataatcatggtggagcaggcatatcacatggccagagcaatgccacacacttttaaatgaccagatttcatgggcactcactatcatgcggacagcaccaaaccactaggaatctgcccccatgacccaaacaccaggccccacctccaacattggagattacatttcaacatgagatttggtggagggacaagtatccaaagtatatcacctcccatcatagattgtgaaggttgcctttcattcttattttgccttgtttgtgatttaataaccagaagccttctgtacctgtttcgggggaagagtgctacagggggttagggtgtggtggatatacctcaggaagacattaagatactatagctcccttataaaatcaaaacccttaaaatacaaactcctgccaagtagtttgttccctcttgttaattttcattttgaaatagttttaaatttacagaaagttggaaaaagagtacaaggagctcctttatacccttaatctagattccctaatagttaacattttattacctttgcttttttctgaagcttattctttttaagaaggagttgcagacatgatgcccattaccttttcatttttccccaacattttctcaaaaaaaattttcaaacatacaaaaacattgaaagaattttgcactgagtacctctaaacccactacctaaatttaccattaacattttactgtatatctttcattaattcaattatctatgtatccatccattaactcttcccattaattttaaacaattttattgataaaccaatttacttgctataaaattcatccattaaataattttaatccatgctcaaatcacaggaaatcattgtacgttttggtaaattttaatgaagcagcgcatttctggggatcaattcctcttatcttgtcaaaggggactgatctcagctagatgccttaggttatattgtagcacctgctgtccagtgactaaagtctgggaaaatcacataacctctgtaaatgtcagtttttagaaatatgaaatgaggccatttgaccctttgattagtaaatgcatttattgtgaccctaaaatcaagaaattctaaactttaggattcctgtttctggttattccatggagagctgtattacaccttttgtttgctttgctcaaaattaatcctgatgacatcatgtggagtaagttagcctgagcatttaaggggataaaacacttatgccttaaggactctttgagagcaaatcatttatacatagcatttgcagtattcttctgtgaaatggaatcttgctgttactaatgcagaagcctgctggtaactgctcagactgtacatattagccagctggtggctgaatcctgactattgagctgcctagaattgaaataattaattttcctggagaaagtatattgtgttgtagttttttggatttgtgactataatctgtaatcaccagggaatttatttagatttgcaattatgctagagtttgtaatttatagtaaagagataggagtttgctaaataggaggcatggagctgtgagttttccattaatagttttgtgaaccttgtgtaatacccaaggtgttagtagggaactattagctaaatagtcagttcatgttcgtcttatctaatgaatgcagaacttaacatgttcacctagagagtttcccatttattttaaatatggttctcttttgcatgtaaaaagagtgttgctacaaaatcttatattttaaagaagtataactacaaataatagctttctattgttttaaaatagatattctagtaatataattcttattgtgcctgaaaagtaccatttcttcacttatatgctatatcttgaatgaaagaatgtgtgaattgattctttaaaattatatatttcttttcgataacaataagttttttaaaaaaagcatatttatactaatacttactaaatattttcaagagatatgcatatacaattatgtcagttacttattgataagcccagaaagtaggtatgactgatagaaagtcataaaagttaccaggaagcctttatcttctttgttaaatatagctttctttaaactttgtaagcctttaacaaacttgtggttacaattcttcagaattgtatcatttataacattcaatttttcatgaaacgctgatgcttacatgaccgacagttactgttttttaaaaaggacgagctagtgggtgcagcgcaccagcatggcacatgtatacatatgtaactaacctgcacaatgtgcacatgtaccctaaaacttaaagtataataataaaaaaaaaaggatttgggacataaaaataaaatgggaattactctgtcatagggaaaatgcaagttctctacaaaagcaatcaattcagataaaatgtaactgaaatatttctgatctttctcagtcatctgaaaataaatatgaaacaattttctaataaagcaaaagaaaaaaaaaaaaggaaatcacctttcgggtgcggtggctcatgtctgtaatcccagcacttcgggaggccgaggtgggcggatcatgaggtcaggatatcgagcccatcctggctaacaaggtgaaaccccgtctctactaaaaatacaaaaaaattagccgggcatggtggcggacgcctgtagtcccagctactcgggaggctgaggcaggagagtggcgtgaacccgggaggtggagcttgcagtgaatcgagatcgcgccactgcactccagcctgggcgacagagcgagactccgtctcaaaggaaaaaaaaaaaaaaaaaggaaatcatcttgtttcgtatcaatattgtaggataaaatgtgtaacttttgcattccataatgactatagtctgatgattttatattcttggggtttcacattaacagctgtttaatctgaatgtttgtttcagtatgtttcagaagtcagaatttgtttataatcttagaaagttaattcaggacctgtactgtatgtaatacaacatccccagcaggatcaagctatcatattcatatttctgcaataaaacatagagatatttcctctatatgagatcaaaaaagactatgagtaacttcccatcagtttggaagttagttatcagttaataaagtttggattaatacaagtttttggttttcagaacttttgaattttagaattgtagataaagaattgaggactaaatatgggccaattatttcatattgtattttgggttgagttctacaaagcctcttcaaatgagctatttaaattaaggatatattctttgaacatcaaaagttaaatataaggaagcagtatatttttaaaggattttacatatatgtgtttctgatgaatgtattaactgcattcagttaaagtaagtgaaaataagagtaatctgcagctctgtttaatatatttgagtctttaccttaattttttctttttctaaaattaattgaattcaaaatatctggaaattcctgcaagttgtttttttgaactggagtgttgctctgtcaaccgggctggagtgcagtggcacgatcttagctcactgaaacctctgcctcctgggttcaagcgattcttgtgctttagcctcctgagtagctgggattacaggcgtgcgcccccatgcctggctatatatgtaaaatatatatatatataaacatatcaatatatattaatatataaatataaatatataaatatatatatatttagtagagacggggtttcaccgtgttggccagggtggtctcaatcttctgacctagtgatccacccacctcagcctcccaaagtgctgggattacaggtgtagccaccacacccggccctctccaagtttttaaataaattttggttgttcataagttgaaaaatagtagtattgcaaatgagtattattattgctaaaaataaatctttgattcctttttctcatggagaattttacctgagataatttcaaactaaatgcctattaaactaaagaaacatagagaaatatataacaaatttgggaccagaaattcatatttagtaattgttataaggaaaaattagatagttcttcataaatagaaccgttgattatttgaagtcaaatattgttccaggagatgtgataaactaagaatataaaaatacctcctacgaaatgcttattaaagaataattaaagtttaaattctaatacaaaacagacttttggaaacccttgatttgaagataattcagataaggtcaaataaatgatattaaaaaatcattttatttatttaatttttaaaagaagtggataacaatgtaaaagatcttggagttggttcttagtttataaaataaatgagataatctttgagacatggatacataaatgcccgctaaattttctttgagaacatttgaaaaaatgactgtattttaatatatcatagttaaaatcagaaatagttaaacattttagtttatgtgtaaatttggtggcaaatttgattatttttaattgatgaatatgtcctgcattttgtattttgtatttttattgatttacgaaaatggaagctaatctgaaacaaataagtttaaaaaatgcatccagaatccagaatacacagcagatatttgtggatagatatatgaatgaatattgttaagtgaccttctgcgtaatattgggatcatgatgtcactgcataaacttactttatttcctgcaaaactaacagttcaagcttcaattatttgttgaatgtaagttattcatactgtaattgaaggaaaagatttaaaaattttaaatccagattttcagagttctctttaaataataaactagatctagtttgataaaagtgcatgtgtattgaacactaaaataattgtatttcattgcttatttctggaaacattgagctatattctgctaggtaaaaatatccaattattcattgtatctattgaatactctttgaactcaaaattatacttattgaaatttatcttgcagatatacaagtgatatttattatggccatgttaaaaatatcaaaatatcttaaatcatataatgatcatcttttggaagattgtcaaattatattacatgtatgcagtggaattcaatatagctataaaaatataagaaagatttctctgtactgaaatatttgttattgttattttgggagtatgctgaaatgttatgtgaaaaaaagctgggtgcagaaaaatatgtatattaggctaccattcatataaatagggacagtggaaaatatatatgggtttgtatgtatgtgttcacatctgtattggcttttatatataagaaattgctctaaaaagggaaaataacaaattacaatgtttacctattggagaggatgggagcttagaggtaagcaggatacttttttctatatatgactttattttatttttttttttactttttatttttagcttttaagttcaggggtacaagtgcaggtttgttacataactaaacttctgttatgggggtttgttgtacagattatttcgtcacccaggtattaagcttagtacccattagttatttttcctgatcctcttcctcctcccaccctttattctatgaaaggccccagtgtgtgttgttcccctctatgtgtccatatgtcctcatcatttagctcccacttataagtgagttataccattttatactttttgatgtatatcatataatagtataactcatttttatatttaacatctttaaaagtactgtgactgatttttcccacttattcattcaagatattaatcatctgaaacccacctacactgtgtctctacgcttatgcaggctctaagatcagagacctaaggagaataggttatgctctcctgctaaaagagggaaagatcaatgtctcagttatttcaggttgccataacaaaatgccataatttgggtagtatataaataccagaagtttattttttgtggttctagaagctggcaagtccaatatcaaggcactagcagattcagtgtctgcttaatatgcacattctggttcatggagtgacactgtctccctatagcctcacaagttggaaggggcaaactagatcccttgggcctgttttagaagtgcacttattctattcatgagggctccaacctcatggcctaatcatcttccaaaatacaccaccttcaaataccatcacattggtgattggtttttgacatacgaatttggggatagggaatacaaacattcagaccatagcaaccaatagggccttgttttttaatcaagcaagaagtggtgaattaatatattgcatagttttgacattctttttctatgtagtttgctaggagtctctttagatttagaatctgcataagagaaagacagggaatctttttaaatttatattatagatattaaacctgatagttaaatttgtatttttacatgtatattaggggatttcattaagttggataagctaagaaaaaactaacaaaaaggtttaaaatattagagcattatatgaattacaatttttaaaaatgcttatatgcccaatcctatgtggtgaattgatcaagtacttgaaatatttagagatggttgattaagatgcaagttttatcgcttgttggccatttgacgttaatcactttaaataaagtgtaatttcttttctaatcagaaaataatcttttggaaacaattctagcaaatactactgcaacctaggctgttatttggtatactatatatttttgaatttcagtgaactatagaccagacagaagtttgtactgaataactatttccagggctcatatgaattgtttctttctgccagtgtataaaagaatgtatagtcattgtcctgtgtctcattccataaaatctaatgtccttctgattgtacataaaaagatgatgggtgcctgaatgaaactatttttctttctcaaactgtgaacataatatcctatctattcattattttgttctttaatatgctgtaattttaaaatgtgtgatttggcatattgcagagaatattaagtgacatcacatatctatgttattgttatacatcagaattattttgtctttcagcagcatgcctgttccaatggatgaccgtacagttgttcctcaatttaaaaagatgtataaatatttaatagaattaagacttactaaatctatttttgaatatgtacattcactaaatagcataaatcttttggaaacagagggtagaagagcaccatctaccattttcctttagccatcctattaattgaggctgccaaaaaccatgtctatcatacagatattgcattattcagctccctagcaagggttaatctttgcccaattctctcctaaatcctcagagcagaccagggctaggagatgggatcagaggccagaggccagaggcttaaatgccatgatccttattgagaggagcaatggaagagaccacagaaaaagtgccaaagttcaatagagtgttcgtgtgctggaaaaattcagatgggccagaggcacataatataggatacagagcaaagaaggaataaggaccaaggaggtgagagcaagtgctattcagagaattggccaggcaggaggaatgagacgagttagggggaatattgagtgattccatagtatcagctagtatttgggttggtatcatacaggagatacactctccgactatttaaggagaagggcagtgccaacaccatgttgatcctcgacaacgtaatgttgattcttatactttgaagtaatgtattagacaagtttctccaggggaacagaaccaaaaggatgtgaaataaataaataaataaataaatatatatatatatatatatatataatgtatatgtgtgtatatgcatatataagtgtgtatacacttatataagtgtgtatataagtatatataagtgtgtatacacatatataagtgtatatgcatatatatatgtgtatatatgtatatgtgtatatatacacacatacacaggtacatacatatagatgtgtgtataaatatatataattacgtgtgcctgtatatatataaaatttataatgaagaattggctcgtgtgattatggagcctaagaagtgccaagatctgcagttggtaggctggagacccaggaaagctgatggtatggttccaaaacaaaagctagcagccttgagacccaagaagaacttatattttagttcaaatctggcaaaaaaaaaaaaaaaaaaaaaaagaaaagaaaagactagtgtttcagctcaagtagtcaggcagtaggaattccctcttatggttctatctaggccttccactggtagatggagccaacccgtattagaaaggggaatctcctgtactcaatctattccttcaaatgtttgtctcatccagaaaagctctcatagacaaatccagaataatgttggatcaaaggcataggcacactatgtcctaatcaagttgacacatcacatgaaccatcacagagcatcattatagagatatcagagcagaccctagtgaatgccacagataaaatctcctcaaggctgcctttccctatggtggtgtgaagttacacattagcactgtaaatgtcataatacatctctattagataggatagctgaaagaactaagaaggtgagggagctgtctgactggaacctgggcccccttccatctacctttgagaagtcaaacatttatgaattacagttgacccttgagcaacatatgtttgaactgcagaggttcactcaaacaccaattttcttccacctctgccacctgtaagaccgcaagaccaaccccctcttcttgcctctccttagcctcctcagcgtgaagacctttatgactgtccacttccacttcatgaataagtaatatattttctttttctataatttgtgtaataacatttcttttctctagctcactgtattgtgaaaatatagtacatataattttaaaaagtgttgattgttcgtcttatcagtaaggcttctagtcagcagtagggttttaatagttatgcttctggggagtcaaaagttatatgtgggctgggcgcggtggctcacacctgtaatccaagcactttgggaggccgaggcaggcggaccaggaggtcaggagatcgagaccatcctgtccaacatggtgaaaccccatctctactaaaaatacaaatattatcttggtgcggtgttgcacacctgtagtcccagctactcagggggctgaggcaggagaatcacttgaacccgggaggcagaggttgcagtgagctgagatcgtgccactgcactccagcctggcaacagagcgagactccatctcaaaataataataataataataaataaaaaagttatatgtggattttttactgtgtaagtggttggcatctctaacccccacagtattcaagggtcaattataaaacttaatggtgatgttaacacatcgagtccaggcttgtttctgtgcatatcatgatgtctctgttatgaatacttaggatgtgtcctgttttcaaaccatctccaccttagaaatctttcactttgttactcttcttcctctttacattcaactaagagatgggactcaggtgaattagtacaactttaatttcaagtgagtgccttcacattaagtttccattagcctttcacttaatgagtattttcacgtacattgtcacatttgatcattcagtgaggtatggggtgaattatatgaaattgctgatatttgaccattgtggagtcacaaaagcagcaattttatgtggttgaatatggcattattaaacctacttttgagatgcagaaaagtgaggcttaaagcaaatgtgacttaaaaaaaatcataaagctttcagcagcagagctaaactaagtctcatgactgcaaaattctatgattttcccatattgccactactgaactggcagccagccacccatttgtattttccttaatacaagtaaatgctaattcaaataggatgaaattaatctgatattttaatgactcaaaactgtagatgttaatagctttctgttattttgtttttgatatggttcccatttctttttctcaccaatgaagaataaacattgagattctgaagtcaccataatttttggtcaccactgtgtctgagacacctcaatttgcaacagttctactcttcatacacttacttagaaattttcaaaaatcttgaaagctttagaaatctttgagtgcaaagaatcatcatgagaacatataaggttaaactgtgatttcgttttgattgtgtttacaattattgaaattataccgaaaagttccttgataccttccagcaatctttgctgaatatacgtgcactttggaaaaatgggtccctgaactatttatagatatacatattttattgatttttcaagcttcattttgagatattacttagaaactgccaaatattggtaaaaaaaaaaaaaaagagacatcagaatctttataaagtgaccaaaagtaacgttgctgagatttgttggcagctcaaatccaactatttgcttatagagatctgttttcttataaataaagctgatcagggaagcatgaaatttgagagcattttcagggcccgttggaattgaagtcactacattctgcttactctttatgatctggcttctgtgatttgtctaaaaaatgtggaaaaggagtgagttcaagaagaagccattacatggtcctgcctgagttatttgtaggttataatggcagcttgtagggtcacagatggccttaggaggggggaagcagagagggaaatagctccccagccccatgtagtgaagataaagaatgtcttcataaggttttatttttttcactgttactgttttttatctttgattgataaaaatgaaaatgccaaaatgagggttagcttaatttaaagtataagcgtagttagcagctttttctaatcactcctgtccatttaaaaaataatcctcataggagtataaacagaggaaggagaaatggaggatgggcttaagagaaagagtatttcacaaatgtctgcatagcaaattcaattcatctacctagtagctccttccatgttaacctacaggtgttctcccctccaaaaaaaagcatcttttaggaagaaaccaccttaacactacctttagaagattgaacttccagggataggttgtttgagagaatcaccaaaagccatttttaatgaatttttaaattacgctttctcattcttataatagtgtagcagccaccttccatctactatgtaacttataacaaataatcaagtactaaattgaataaatactgttatttatcttgtctgggctaaacagaaagaagaaataaaatacagttactaagcatcaaggatcacaggaccttctattccagtctagcagaggaaatttacaagatgctaagtaattaatgctaagtggcatgttgctaatataattacaattgaggttttcagagaacagtaaattcaccacaggtcaaagcatttgttgaattgtatgtggagaagaaattggaactgtgtttggctgcatcttaagttacactctgggaagctcatactcatttttagcaggattctatgttaaactttctaagagtggggaaatactctatctaaaacgtctccagaaaaaagttacaaaggataagcagagtctggttttaaaggggacactcaatctgggtagaaaggtctctgagtgagtgagttagagagtgggtgagttgaaaaatgtgctgctaagcaggtttatgtaaccttcctttttttattcatgatttaaaagtatgatttcggctcatgcctgtaatcccagcactttgggaggctgaggcgggtggatcacgaggtcaggagttcgagcacagcctggccaacatagtgaaatcctgtagctactaaaaatacaaaaattagccaggtgtggtgctgggcgcctgtaatcccagctactcgggaggctgaggcaggagaattgcttgaacccaggaggcagaggttgcagtgagccgagatcacaccatggcactccagcctgggcgacagtgggaaattccgcctcaaaaaaaaaaaaaaaaagaaaaaaaaaaaaacggggatatgatttctacatccacctatctgacctgacctcacagggaagctttgctttagactgatatgatcttcactagaggaaaagacgaggggaaaacaggagcttaaaagaattaaaacatgttggggagtggtggctcacatctgtgaacccagcactttgggacgctgaggcaggcagatcacttaaggtcaggagttcgagcctggccaacatagagaaacctcgtctctactgaaaatacaaaaattaaccaggtgtgatggtgtgcacctgaaatcccagctacttgggaggctgaggcaggagaatcacttgaatgaggaggtggaggttgcagtgagccaagatcaagccactacattccagcctgggtgacagagtgagactctatctcaaaataatagtaataataataataataaaaacatgggcattaagtatatatggaccacttacttcatactttcgaatagatgagcatttaatccatcagttaatggattctcctctgtatattctaataacaggaaaagcattcagttattatcccttctttctcactgttccatcagagtccttattacctgacataaaaccatctcatgttatcacctataggctaaaaagctttgcagttctcatttggcttgaggttaatttagagatttattaaactgtgtttcattgagtacctaccatgggtagctggatgcccagacctcgggatattccagtaggtgaaataattgagatgtatatgtatttgtacacatatgtatctggcttcttctccttttgagagagaagtctcctctctcaattaaatgtgctatcaaagagcatggcgatggcaggaactgccgagtaaactgtattttaaaaatcgtatctgcatttcagctctttgtcttctcgtttcctgcactgcctaaggtcctctttgcctaatctttttctggaggaaatttttaatatagactccttgttcctttttgctttaaatcctgagattgtaaggtttgggaaagttaatggcccccatgtgattcacctataatggacattctgtagaataaaatgtatcctcatttaaaaaatacataaatagaaagggaaaggtacattgtcagtctctgttttgcctgtagaaatcctttcaaatcatgattatactcctagtctatttgacaacgataaaatattctaaactaatggtttcgagctctcaggcaaaaccagatttttattgccagaaaaagtccaccatggctctgaagaacaattttacattttcacaaccaatacaaatactgttttgggtacaaattgaggaaacattatgttttcagggatccttttctgaactttcatgaaatattaaaatgaagatgactgaattgcagtttgattatccctcattgccatttagaatgggtggataattagtttggcattaaccttgaatgtgaaagaccctagaaagtccagctccagggggtgctgttatttttcagcatattcttctacagccactttctgacatcttatgtaagggaaactgaaaatcttaaatgattactcatataaataatcttgggggaagatgagatagaaagaattgtagagaatacatcaccttctctaggaaacttatttttcagtagtattaatcaatcatgaaaaatataaaatatggatgcaagacccaaatacatacatggcatacttctttcattattttattttaaaaacactatttaaatgctataacttagtactttctcttttactgacaaagtcacaaagaataattgttaagtacacactacatgtcaagaaatgaaagaaaatatacattttcggtttctagtagatctgatactaaaatttagaaatatacctaacaccagctaagtccatgcaaacatttaactctttgttggtaacattttccactggcattacacaggcctgagtgtcagtattatttcctttttcttttttcttttttctttttctttctttctttttttgtttttgagacaagttctccatatgttacccaggctggagtgcagtggcaccatcacagctcactgtagcctcaacctcctgggctcaagcaatcttcccacattggcatcctgagtagctgggaccacaggcacacaccaccacacccagctaattttttattatttgtaaagacatgatctcactctgttggtatgctggtctcaaactcctaaattcaagcgatctgcccacttcagcctcccaaatactgggattgcaggcatgagcaaccacgcccagcctctgagtcagtattatttcttgttagccatattgcatcactaaagcagaaaactttcagacatgcatgtatatattttagtatttcaattagttgttttaagtatttggtgctctatttaatacatttggtacatattatataccagtcacttttctaacagctttccatgtgttaactcttcataatatttaactacataggtattattgtccccactttgcaggtgaggaaactgagacatggagaagttaaataatttttctgaggtcacacatcaaggctccagggcctgtgctcataagcatctcactgctctatctctcaattggataaaactaattgtgaagtaagattaatattttatcccattaatttcatgactgactttcaaacctaagcatgcatacatgcatacaggcaaattaaaactcaggtgctgccaacagatggatagtcattctacaagggggacactaatatctctatatctagatacgagaaacagatacttttttaaatgtcttctcaaaagcaggtgaagtgagaagaagaatgcaatagacatttatctatgtactctgattagaacatacttaaaccaaagtgataacaaaaatcattacttgtatttctttgcaaaaaatctggaatagaaaaatggcaggagaatacagacaaaattcttgattttcaaatagggaaatgggagtacactctgtatagacaaacaaatttaatgccaatcccttccaagaacctcaaatggattattaaaaactttgaaagaaaactgatgcatgtcctctgttaatgtctttggtttacgtctctgaggacagaaatgtactttctttgcctttttgaaaaggcaaagggattgaaaggactcagctgttaaagtaacaaattatcaagcaatatgaatggccatggcacagtctacataggctgatttcacattgttatatacgtgactgagcattcatttattcactcattcgacagatagctattgagcttcttccttgccagggcttacactttctgattgctgggatgggaattcgatgaggaaggccttgcttgctaccaagtataggagatgtaggaataggtaaatctaggtatagacttacaatctttagcttacagagtctgtcacagcccagtggcagagacacttctcctttattgtccaaatcataacatttggaggttgatgatcttctttaatgcaaatatacagtgaggtaccttttttttcttggccagatatttttcattatcgctgctatcgtcactaatatcagccttatggaaaaatcgcagtataagacatagcaacaatagaagtacgctctctgcacgattaaaaaaatgaaaataaaaacactgaaagagttatacgcaaatgtggagaagagcaaacaaccgtttgggaatccatatttcattaagaatttatcagtgcctagtgagcatccagccttagcacagtatccacctcgtaactggtagacataaatacttagtaaaagagtgagtgaatgaataaacacaggtgtttgtaaggcgacattcttggaatactgctgctgctatatttcaactcagtgaggttttgtaaattcaaaaacttggattttgaactcaagctgcttggatttgaaccctggctttactacctgctatgctgcaattgcttcatggggaaaagaagaaatggcaatcctaaaggatggatccctaccttttttttgttgctgttgttttcatgcatttcatgtgtgttgggccttctaattacaaactagatatcagatagtcagcttacttcatccagttggtttctgcacagattatagtgtaatgaaaaatacctattaacctgcttctctaataatttaatatctggtttcctgataccatattaatgcaaatcctacaactataactaaatgagagaactatttagagtagataagtaagttactggttagaggaaagttttaaaacaatgtcttccaaataaggcatcatttttccttatatcttaagtaccaacagatgaatagttattgcacaaggaaaactagctaattcctcctttgatagactttcttttaagactagtagatctgctgatttctatatcaggataacctggagatcattttcaaccaatcagagacaaacttttctccatgatcaataagtatttcttgactgaaagagtgaaggctggctgggtgccgtggtggctcacgcctgtaatcccagcactttgggacgccaaggcaggcaaatcacctaaggtcaggagttcgagaccagcctggccaacatggtgaaatcctgtctctacaaaaatgcaaaaaaaaaaaaaagccagtcatgatggcgggtgcctctaatcccagctgctcaggaggctgaggcgggagaatcacttgaacccaggaggtggaggttggagtgagctgagatcgtgccactgcactccagcctgggtgacagagcgagaccgtctcaataaaaaaaaaaaaaaaaaaaaaaagtgaaaaagttacattaccatattttttggacaagacttttgacaagatatttaactttttgctatttcaattttttgatctgtaaaataaaaggataatcatagggttaagaaggacagctatatcaatacatagattgatggaaatatagagatacatataacttaatacagagcccaacatatataagcacccagtaaatattacctattattagctattatcattagatcataggaagtcaagttccattttactttgtacttgtcaagtcaaatttaaaataggtcttgttccaagcagcttattttaaggggaatatcaataaaatggaatgtagaatgagtgcacggacaatggactccatttgaatctagttcctatcacaacatgtgctgactttcaatgaaaatttttatgtgggttaatggaaagaagacacatagacactaaggatttaagcagttcaaagtctatcatgtgaaagaccaaagaaagatggtttttgatagctcagatatacaggtaaggagggcaatcatatgttcacattttcctgggcagtcatcttttatgtctgtgtaatcatcaattagtttttaactgacaaaggtattcttgtttggacaagaaattatatggtttgcccacatctaggttaaatatgttgtagtgcagtagaggcacatttaagttaaccataggacagtgcacaaagtatttgaggtgtccagtgataaagtctgccctttgaagttatgagttgatgtgatgggaaatattcaatttaatacaaaatgataattcaatgcaaggaatgattcattcactggataggaagatcaactagatgtacatcattacatctataatatgtaatctaataaatcccaaatcttagtttcttttgtgatctacctgctacttctctgtaaacaaaacaaaaacaaaactatgaatttgcattcccatttaatccaactgtcaatcctctaaatgacccattttacaaacaaatcaaactccagcaggacctaaaaatattagagatttgtactgatattttgccatttctttaattttttaatacttcttgaatgaatatataatttattttttaaaacaggcaatataatattttctacttcttttttatttcctaatattttcaggaggactttccacactgtatttattgtaccttctcagacagaatgtcttagaaatctatgatataatctggcttaattattaagccatgtcttccattcttatgagtacagactgctttaaaatttgaaatatctgtattataaagtcttattcggatatgacatctgaatacaatgtctacttttatatgactgttacccgcaatatatttgttttttgttcttcacaatttgctttgggagcaaaaataactggatataaaaattgcaataaggaaaattattcatatgccagctgcttactgaatgcttatgatgctgaggcactgtcagctaagctctgggggtggtgcagcagcagtaaacaatgccaggtccttgcttgcatgcagcttacattccatggattgtagaagatttggaaagggccttgccccacatccctaagcaggtcttcacccaataggttgaattttccttccttgtattcctgcagcacagaaacacccccgtcattactgagtatctctctaacaggtagtgggcacataccctggggggagacatggcagaatgatggtggaggtaaaaaggtttaatgcctgttgcagtaggaagacccctcggtcagctggatgcactccttttggggccaataatgccttaccctttagaatagcgttcaattttcacagccttcatcaccactgccctgtgtggcttcaaacttcttctaaacctcatttcctttaacattatgggcatgtgctccatctttctggcccctgctatacacaatgggacttaccagtatcccactgtcacctccctgcaacttctggggatagtgtcacctccctgcaatcctggctgccacctgccagcatcctattttccttccaaatacaactcaaattctgccttccttataaggcttatttggtctcttcagtgatattcttttctctctttggagccactcctgtggcacttggagtatttttttttctagtatcacttatggcattgtatattttattacaattttcaatgagcttgactgattcccaatactgtagcccattagcctcagaaggcagagtccaagttgcctttctttggtcccactaaagggtctagtgtattgccttgaaagtactaggtcttccagaacttttttttttttacagaacaaatgcatcttctgagttaatatttataaaatgtgtttccatttactattcaattactgttgtattatttttcattcctataccttaattcccacatttttgtattggttgtatttcttattctaaagagcataaaatacaaaagtaaataatatgtgtttaccatttagttcaaagaaaaggacaattaaatgaataaactttatttttatgtattttaaacaatttatataatgtgaagtattttaagcaatgtgtttcttacattccagtttttgaagatggttgctgaaattagtgttaacattcactttcaatcttttcatgttgacccaagctatttgaggtcctctctagcaagcttcttaagattacttacctctccctctccacaacagtcctcagatggcatcttttaaataaatagtcctagaaaagaaggcaagtcctagagaacagtctaattcctgaggaagttctgtgcaaccgctgtcctgccacgttcagggagaggatggaggtggtgtgtgagaggattataaagaaacagagaagtaagaaggaatgtagtaagtgtgttgaagtcaattctgcaaatgtccccaatatctaattccatatgggtctttgagattcaaactactgctattttagctcatctgaggccagcatttatgagtacctactatgtcatattttgtaacaggctaactataccattatgaataagatgctatggtctatgtttgagtatctattggtaaaggctgacacataaatagatactggtgcaagctcttaagcaacaaactaaagcgtaatcctagatttctcccatttacttttatttttgctttcaaccccactcccatccaatcagtccccaggtccttatgatcgtctttcttattatctctcagatccaggccttttctgtaatctctttgccacctacattctttcttcatctctaacctgactttgttgttgttgttgttgttgagatagagtcttgttctgtcgcacaggctggagtgcaatggtgcaatctcagctcactgcaacctccgcctcccaggctaaagcaattctcctgcctcagcctcccaagtagctgggattaccggcacacgccaccacacccagctatttttgttttgttttgttttgttttgcttgtatttttagtagagacgaggtttcaccctattggccagactggtcttgacctcctggcctcaaatgatccgccggccttggcctctcacagtgctgggattacaggtgtgagccaccgcgcccagctgctaacctgagtttctgtagcaacttcctaactgatttgcttggcaatgtgttgaaaaccctccccactgtttttggttttgctgcctgattgatctcctaaaaattcctatgtgacttgtgtccccaccctgcttaaattctctagtagctcctcttccccagcctcaccagatggaagtttatgcttattttcttatttcacttggctgtcatggatctcatttcttctttctgtctcatcctctactattcacccctctccatagacccatccctcccttggctattggaacacctcaagctggttgtggcagttctttttgtacccactcacaagactgtcttatgataaagcaaccgacaatacttttggagtctggttttcctttttgattctgatagtgtagtagattctattcagtacctccctgccttttctaattacctgtgctcccctgaagcatttctcttctgcagctgtttcctgtgaccctgtcatatggctgctgaatgaggacatggatgaaagaagtcatttacattttgagcacttcctggttgagccaccaatttcatgagatacaatatcttccctgtggtgtgatccctttggatatttctttacactctgttgtagattttacggaaaaaacttcgtaagtttcaattttaactagatggaggggaggacagtagtgattcaaagaagctagaagttgttttaaaagcaactgactctctcaacatcagagtttggttctgatcaatgatatttctagcattttttgccaccaacttacagaaaaagatgtattttacatcgcaacccagaatgtgtgcgtaggtgtgtttatgtgtagtcatgaattcatttattcaaggaacattcactgagcactcactatgattcgtactgtgatactataagcacttatgttctagtcaggggagataaacaataaacaagggaagcgtatcaggagatgataagtgatcttaaggtaaatcatgttggaggatatacatatatacacacatacatgcatatacatatatacacatgcatatattatacacctatatgtttatatgtacatgtgtacttatatatgattatataatatacatatccattacacttatattttatatacatatgtacctacttacataagtaattgaaaatagcttcataaaataatacttaccttggctatggataatgcactgtgatttttttttcttctgttttctatttcatttaaaaaatgctgattgcaactgactggattgattttatgacacaccaattcactgagacttatgattgggaaaacactcatttagtaagtataaaatgtatcaccacaggtagtcaatacctttacaactgggcagataagagatatcagaaatttatgacgattcccatacaattaacactacacaactattgcacaaaagtccatattttatcaaacatctcattttgagtcagactaacttaattttgtaatcttcatcatgttttcctgtttaaaagagtctaaaatctcaccacttgcaaacgaagtgaacatttttattagtacaattatgtaagaaattactcactcgagtactatataaactttggaaaatctttccatagggtaaaattctggcttaacttttgaaattaaggcaatggtaaaatttagacaatgatattgacttcttattggagattgtggcatgtgaggtagttacaactttgacaactgaattatatctccactgtagcatattaaggttaggttaaatctaattaactataatacctatcattgaaaaatttcagagtacatatcacctaaagattaataaaagaagaagtatatatatgtattttcatattttccatattgtagtacagatgtattttatttttaaaagcactcagtacagagccataaattattttagcattttaggggacatttttaaatgtttttaaaattctaaagctttgttcattttattagcaaaatgtagtctcatcccagttttgataaacctggatagatccatgttgatattaaaatgaaagccacagtctaatcaataaagtgattcatcagttgtgtagaacaaagtagtacttttgctttaagaggctttttgttgttgtttatctcctttagcggatattttcagataatacataactttgcttttatgtttattctaagaataataagtcatcatgccacatttgtgggtgcttttaattttaataataaagtaattatgcaaagctaactatgtaaacattaatttctgacatgattgtttagatctattctttatgaggttacatagggcaaatttaattattgataaaccaggtagctaataaaattaaactcacagtcattgtctttaaaggtgacacatcattgccagagtagctacaaacataatatttcaaaatttaacataagtaatatccaaaactgcttagtaaggatactaaataactgaatttgtcatgtttccaaccacgtttattgtaattacatgcaaaatatataatacctcccaaaaaataaatgatgatggtttacggcgtaaagtgaattgtgttgctatagtttccttattatagaataaaataggttataaaatacttcatgttaggctgggcgcggtggctcacgcctgtaatcccagcactttgggaagccgaggcgtgcggatcacgagttcaggaaatcgagaccattctggctaacatggtgaaaccctgtctctactaaaaatgcaaaaaattagccgagcatggtggcacgtacctgttgtcccagctactagggaggctgaggcaggagaatggcgtgaacccgggaggcggagcttgcagtgagccaagattgcgccactgcactccagcctgggcgatagtgcgagactccgtctaaaacacacacacacacacacacacacacacacacacacacacacaaacttcatgtggcatttgtgcagttttggttagaattctactgtaataaaaacttactggaaatcagaggttaaaatagagggttacaaatattcaagtctctcttctccaaatagggagtaaattaggaagtgcaaaactgcaatgaatatataggtaatgaagaaacatggaaagaaaaaataatttcagatgaaagtctattcatttttaagatgataatcaggagattaaagaatatttttccatcattctttctcttacatacttagcaaaggtattcgtatgtgtgtcaattgttgaacttggttgtttatacatttaacagcttatttttaggtgggagtatttgaggtaaagacaagataaatgagggaaactgctcctagataccagggtctgtacagacctttaaatgactgttatgctggaattcattgccaatgttttgccttctaagtgtaacctaacagttgtgaagagtagaatcctgttcactttaactctcacttgctatgtgacgtatgtgttcttataatggctttcaaaggagctgccagtgatatgtagaaagagtgggcaagaacagaggtgtacgaaaattaaggctgaaagttgcattggccccctctttactatctcttcctttacaaccaatgccactagtctctggctcaagcactgcaaacattgcataaagaaatgagtaaaacagcaacaataataatcagattttgtaataaattcttaatttatacctgaaacttggctaagtgattgctgtggattattaggactaaaggtggtggggagtctgggctctgagtattggacgtaggtagctgagagtcaacaaagtctgaatagtgaaaatatttctctcacacagtgacattcattttaagactatatgcatttagtcacattaaccatctctttcaatcattctctgtgacagacaagcaaacacacacacacacacacaaaacacacacacacacacacacacacacacacacattcagaagtgtggaggttccattgatgtcacttgtttgtccagtccttggtcagtgaatctctagaaaggccacagtcttttcatgttcatggctttgtcattgctctccattgagtccactggatgaacttgcttcttgctccatctcagagtccataagaatatgtctttgcagaggacatttaggggagggaatgtgttaccaattcatttccaggcctcagatctcaactaaggtgttttcaagtcccacaaccctggatgtcacttcgtagagggccagtcctccctaaaatgtgggctttgttccttagtctacagtaggatgcagaaatgatgtttcttttcatggtggcccataaaatttagaaattgcctggattccagtcaatttagaacaattggtgggcaattgactaggtcacacatcaatctgatttggcagttactgtggccaaaaacctcaaatgctgtaaagctgtcagtctcactgtacatttatgttcaaggaggaatagactttattttctcctcaaatatgttttgattagacagcaaattatcggaaaccatgtcagaagctcactattctctactaccatgttaacataaatgttatttttctagatacagtgaatcactgtgtattactcctcaaaaaaaatttttaaactaaatgacaatacgctaggccataaaatgtagtattataccatcagagaagactttctgttatatctgtatacattttgatgtatgtatcccaaaagaattcaggtaaagttaatatggtcaatgtcgttgaatggttaagaacatgggtttacagatgtctaggtgcagactcctctaccacatggaagggcaaattactttacttctatgtatctctgttttctcatctgcaaatcaggtgtagtaatagtaactagctccttgggtggcggtgacgattaaatgaagtgaagaaaccatggctggtacatagtaagcatgagctcagtcaatgtgagatgtggtttttgttaatatgaaatagctatagccaaagtccccaaatagtaactaaaacagtatagtattatcaatccccctatatttttttcaaattatataattgtttgatatttatcttttatttatttacccaaaaggaaagggtgctatagaagatctcttagtaaaatactgaaaagtaaagaaaaatacaccattcaagcataacacgttttgtttagaaagttaaaatatttagcaaagacagaatatgttcctaaatggagtgaggaatcttgtcctatttgttttattttttatcttgctcattgctttttttttcctctgagtatacttgggttgatgatctgctttctatttatatcattacttactatgtacaatttaatgtattagccatcatgatatcatgggtatgaataaggtcctggattcctcacacatttccaagtgcagactccagctgaaacagaacaaagattcagatgtttaataatattgtacaatttttgttttctttaaattttttctcaaaagtttactttctaagaaatcagtgtagaccaataaaagtttcctgtggtggaatttggttggtatacttcctagaatttaaccctaaccaggttttctttcaaaactactgagaatcattttatttacaaataacaattatatgaattatcaaagaattttaaaattaacataactttgtccaaagtcagtgtctcttcctgttataaaattacttgatcctattaagaaattctgaattgcaacatctgtttgtttttgtttatcccttttgtcgagaggattcatgccatgattttcttattacatttttaatagatattcagtgaaaaaggtaactgatgccaggcagtttatgtatcaaccacatctatcatgccttttcctcctttgtcctacctattcagttgttaatgggctatttgggcagcagccacacaaacgctttcacatagatcacgcatcaacatagttatcctggaaaagaaaacacctgaactatttattcacatggcattttccttgaaatttctagaacaactttttgtgaataaggacctcaatctacccatttacaagatgtgttgtatgagctgtaaatgttactggggtgttgtgagtacagacttggccttggttccacagtgtcccctcactttctctctaagctttttcatttatcaattccaatcgccaaactcagatactaaaaattctaaaactctctgaaaatacttaatatgtctgttgcaatgactacatgagctaacatggataatgtgtagtgcctggcacatactgctcactcagtagtaactaaactaaaacaagaattacaaattgggaggcagtgaaatcctgatttcttcatttgtatacctaagtatttgaagaaggattctctcaatgtaaatatgtacttgtacgtatttaagaatacatatgtgttttaattgcttttctttacctaaacaatttgtctctttagtctgtcctactttcactgtttggggaaataggtaagaatttgtattaaaatccctctcagaaaggctattctattctcatttttccttttaaagaacaaatacagctaactagcacattcaaaataaaaaattgaattgttatgtaattcagaatataaataggaagactataatgaaattttggggaacagaggatgtacgaatactttaatggaaatttattggagatgagaaattatgaaattcacagtctttaccattcaaagggaagttgttcatctcttacaatatgtgcgattagatcattgataccagtttgttttttcaacagaaacaatcaccttaaaactttacattcggggtaaaacacatctggtagaaaaatcaacttagtttcattgtttagggttccaattagatgattaaatactttctctggatttgcaagagtcaaagaaacaggttacacagagggtaagaaaaactccttcctgttaataacacaatgttagaaggtcccttacaatgtaactaaaaaatgctcaggcaagaaccatcctaaataatatatcagtcatttcttgaagtagcaagtgttgccttaaaataatgttttatgaatacccatagattaaagaaacacaaacaattcccacaaccaatctgtgaacacatttatgaggtatgtagagctagttatgaacattcaacaccattgacgtgctccttttttttgaattataagtaatgattaactttactaaaatgcctatgatatcctctagtgtgtgatcacttaaccaaaaggaaataacacatcattgtcaggtttcatactttacagtttgttttttctcctaagatggattgaatgttttaacctcctttaaactacattacctttaaaaacattgtaataatcttaggttcagaactggaactgtttgaaaggcatgccagaattaaagttatatttaggccacaccagaagagcacagaggttactggagtaatattgaggatgatgataggaagacaaagaggagaaaaaatcctgttgaagatcttagtgatacaacttccccattgctaatgatttgccaaataattgctattcaattgttacttaaaggaaatttataattagaaggaatattagatatatagcccaggagttttccagtttctttatttagttgtgtaaatctagaattaactctttaaactctgtaatggagcctttgtctgcctcattcatctctctatttctggcagctagaaaagctcttagtacaatgactgctcaacaaatacgtgttgaaagcaatgaagagagagatataacttaaatagataaagcaacatttttctgatcagagcaggttgagcagacccatctgcatggtagctcagaagctttctgaggatgttaagaagccccctcggacacacatacatgaaactctgtgctctgcaatttgaaaatcactgggtttaattctctcattttatgtataagaaaataaagctgtcttctggaatcccaagtttcaatatatatttttgtagctaggtactatgtatttatgggagttggaaaataacattctatgataagcttatgggccattttgttttcagagaaattatttcaggaagacaaatcataagagaatactctataacctatttgctctgaatctaaatggttataacacatgccttaataatttatacttctaacaaaaatatgtaatattctttcaaaagtcaggtgtgttattccttacatatactaaaaacaaatcatgattactgtaattaaatgtaggaaatagcttgctgcccatccattattaaaaggagatttgtatttcccataaaaaatttaatctggctctggttctctagggaaaaaataatgtagagaatatacatggacatacatacaggactgtacaaaatgtaaaagcaaacatttacctttcctccatgtattagaaagctggctaatgtttgtaaattacctaatttgattgacttccatagtcaccaaattttcttcaccaatatttattaagcatggatcaaatattttatatataagtacacatatgtatatttatgtatgtatgtgtttatgtgtataaacaaaaatatatacatgtgcaagtatatatacatatatgtgtatatatcctagtaagagaaaatgataggttagtaaattgatcattaaaaatcatataaatcagcaactgtacacctacttctgccctagtatgaatttttcaatgaaatcagtgagcctcacatactcatctcaatcagaatcacctccacatttgtacagggcttaggaaagtggagcaaaagtgctttgataaaatgtgcaattagggaggcaaagatcaaggctttaaagagagggcttagcaaaacagatgtccaaggagcctcagtaaactcaatgtctctaattacactttggatggaagaaggttgaaaattcatgcctggcagaactctcgaagtctgtattaatcttaaaataacttgacaaatttatcatgcttcaaatattttaattaactctactaggatttattgaaaatgtatcaatattaattccatgaactggaaaacatcagcatatgtttaaaaattaaggtatacaaggatttatatgtttcagtagcaacaaaccattaattatagacatgcattgcttaatgatggggataccttttgagaaatgtcacctcaggtgattttgtcttgtgtgaacatcgttgagtatacatctacaaacctaaatggtatagcctactccaaacctaggctgtatggtatggcctattgctcttagtctacaaacttgtacagcatgttactgtactgaatactgtaggcaactgtaatactgtggtaaatatttgtgtatctaaagatctctaaacatagtctcatgggaacaccatcatatatatgatctgtcaatgacagaaaagtcattatgtggtacatgactgtatatctgcacatcctttttgaaagagatgttttgaatagttgtttggggtttttgtttcaggataacatatacaacttgtgcataggtagatgagttcagtgaagacatcctgtcttctaaggattttcctaaatgcaccaaatttatgaataagtcagtctactttatttttgtctttcatgttttgcttctcacattgactacatggattattttaaataaaagggaactgtttcacagctgtaaacctgaatgctcatagtaggtaatttcagaactaaggaagtgtctatgttctttacacttttttgttgttgttctgtttttatctagagacagggtttccctttgtcacccaggatagagttcagtggcgtgatcataactcactgtaaccttcaactctggactcaaatgatcctcttgcctcagccacttgagaagctaagactccagatgcaccccatcatgcctggctagtttttagaaatgttttggagagatggagtctcttcatgttgcccaggctggtctagaacacctgtgttccaccctcctcaaactcccaaagtgcttggattataggcatgagcccggcctaaatgtttttataaaaatatatcttacaattttgtattatttgtgttttttgcttatatatacagccagtgttttggtgtatgagtgtattattagaatgtacttcctattttttttgttttcatagtatagcagagtactggtctcttttgatataaggcatgaaaatggcagttttatataattgctcaattatatattaaatacattctaaatattttcactatgtctgtgatacagatcagatgttaaatttatttctacataaggatgagtttcacacttaaagatttcctaaactgctgacttatcatgtaattctgaaggactttatgccttttctaaagcatgtactttgacgtagaatctcatacatagccagactttatattgtttttggattttcacaaatcgtttagtaagatgttctctgccaaaatatattgcattcataatcttaaatccatgaggtacactttattcaacagaataaaaaccaactattttgtcaccattgagtcagtgtaactgattaacacattgttctcattgaaacatatggctagctcataattaactgaaaataattcagtggccttgtctggctttaaatcaagtaatgttctacttgaggcagccatggctgacataatttactatgttagttatattgtagtttaaatcatatcagttcatttcctctctggtattattctttcccatcaagttctatttctttagctatagaatgcctctaagccacatctgtgttggtctaagtcatgagtaaactttttaaataaagtgtgcaaaatgtgttcttatttataccgaagatgttttcaattaccattaagttcattgttggtctgatgttagcagcttaaatatttgaagccgctctctggaaatcagacacacatccaaattctaaaaatatggtagattcttcattttattgtggttttctgagcaactgttgattgattgcacaaagcagaattccctttgatgaacacaggtttagtcagaatgctctgtgtgggttagtatctgtttcccttgaaattaaccagtctccccattcccaacctttctgccaccttagaccttttcttcatgtaccaccaacgaggccacatccttcacctatttagatgagttagtattgtttttcatctcattgggctgcacttttttgtgatatcttttccccccagtataatcaatgagtgtttattgaatagctagtttctctgtgcttatttctttaggttctatttgatgaacagaaaatttgtccactgtaacagttatggtggtgacgaattgcaataaagatttatttcttgcttatgctacatgaacactatgggtgcaggggaaagagggtgaggttggtgctctactctctataattactcaagagccaggttgccagagccctcaaggctcatctcagaaagggaaaagagcaatgaagaagttgcctacctgtttcaatgtggtgacctggcggtgatccatggcacttgttgcaacctgttggccttcaccttacttaaagggaggctgagagaaagtgagggcatgtagaatgttttctgaacaccctgtctttgctgcattccttgagtagtttgtaattttattcaaataagaccataaaaatggtattatcctttattaaatcttgtggtagccatgtttctcaaacttggttgataataacttggatgtgttctccaaagtgagactccctggccataccccaaacttaccaaatcagaagttcctgggtggaggacggggaatctggattactaacaagttgcttatatgattaatattacacttcaactttggaaaaaacaatataagcatgttcaaaaatatagtaatagagttagggagaagtaaatacttttataactatgtccgaccttaggatgggagatcttgacaaactctgaaatgaagctaccctctttcttgaatttgatgcaaatatgtgtacatatttatagggaatatgtggtattttgttacgtacaaagactgtgtaatggtcaagtcaggttatttcaagtgttcatcaccctgaatatttaccatttctctgtgttggaaacattttcagtcctctcttctggcattttgaaatatgcaatacactgtcatttgtcaccctattctgctatcaaaccttagatcttattccttctatctaactgtatgtttgtacccattaaccaacctctttttccaccccagctgccacccagacacccttcccagcttctggtatccatcagtctattctcttcctccaacttttttagttcccatatatgagtgagaacatgtgtcacttgtctttctgtcaagctacactcttatataaacctcttgctggtgtcacacagttgtacatattgcatcataataccatgctcaaaaatatgtaaaatgatataagttgctaatgctcattgagaactcaactatgtattaggcattgtgctaaggaccttaatgtttaacatctcacaaagtgggtcctctgatgagcattgcattttagataagggaactcaagctttaggaagcttatggatgagtagtattccattgtgtatacatgccacatttttttcaagggaacagaaaggaaaaaataataaaacaccacgtgtgtaagtgttcccttttctctgtaggttaaagatacatgaaaccaatttcagtctctctctcaagcatatacacacccacacagacttttcctcttcttaaatcagagactggagggctacatttttcttaatgatcttcctctgctagccccaaggactaaggctatttatttatttttagttttattttattttaattgacatgtaataagtgtacatatttatggagtacaatctaatgttttaatacatgtatacattgtaccatgatctaatcagggtaattacattattacctcaaagatatcatttatttgaggtgagaacattcaaaattatatcttctagttattttgaaatatacaataccacattattaactacagtcaccttactgtgaaatagagtaccagaacttatttctgctatctatttgtaattctgtacccattaaccaatctctccccattccccacttcctcctattttccccagcctctgttaactactattctactccatacttctatgagattagctttttaatattctgcaaatgagtgacatcatgtagtatttgtctttctgtgcttggcttatttgatttaacatattattgtccatgttcatccatgccaccacaaataacaggacttcattctttcttatggatgagtagtattccattgtgtattcatgccacattttctttattaattcatccattgatggatacttcagttgaccctatatcttagctattgtgaatagtgctgaaaaaaaaaataataaaaagccataggagtgcagatatctccttgacatactgattccatttcctttggataaatgcccagtagtgagactgctaaatcacatggttatttcactttttaaattttttgaagaacttccgtaatgttttccataatggctggactaatttacactcccactcgtgtgtaagtgttcccttttctctacttccaggacaatggttgttttcttttcttttcttttctttttttttttttttttttttgagacggagtctcgctctctcgcccaggctggagtgcagtggtgcattctcagctcactgcaagctccgcctcctgggttcaagcaattcttctgcctcagcctcccaagtagttggaattacaggcacccgccaccacttccagctaattttttgtatttttagtagaggcagggtttcaccatgttagccaggatggtcttgatctcctgacctggtgatccaccagccttggcctctcaaaatgctgggattacaggcttgggccaccgcgcctggcctctttggtctttttgataaagccattttaactcagaatagatgatatcttcttgtagttttgatttgcattctcctgatgattagtgatgttcagcattttttcatatacctgttggtcatttgtatgttttctgagaaatgccttctcaggtcttttgcccgttttttaactggaatttttttctcccttgagttatttgtgttccttgaatattctggatactaacctcttgtcaaatgcattgtttgaaatattttccccatcttattaatataaggctttgtattaatattataagaaatacatcctcacatgtatatttgcttgttagtactggagtaaaacaaatttcaacttttttttttttttttcctcttcactgtcttccagacacaggcatagcttctctgagcacaaatgtggggaatggccaatatagtgaattttctcccactggccttgtatgatctgagagctggcagtggacaagctaatgggagacccagtaactagcagcacagcaaatctaaggagctctcttaaaataatccatctcacaggaatgaacagattgcctcattttaaaagacatttgaaacactgtgggtttgaaggggctgcagtgctattgaagaacattttcatttcaaaagcagggctttatacgtctcaatttcaatctgtgttatcttaaacttggtttcacactaaaatgactaagagctatttcattgtgaatggaaatgcaagattaagaaagaaggataaaaaccagcatccttgtggttttcctctaaaagtgcaaatgtaatcttttagaaaacgaaacaaaatagcaggtgtgtagcacttaggagaaaaccacatgggtaaagtcacactcatgtaaaaaataaattatggtaatgggcctcttaatagcacctgataaccagatgtgtagaaaaccaagccaaaccttgccataaatgctttaagaaaagatgtcaatcaacatatcagtatccattatcatgacaagtagcacttttaaataaaccaagggctaagagctggttaagtataagagaagataaacctattcataagaaataactaaaagcaaggagtttcaagagagaaaatttagtcctgggattgatattaagtgatagaatttaaatagctaggaaatatgtggaaggaaaaccaagctctgagagaaagtggtttctggcaaattgttttctatgacattatttgtcctttgtggtttgtagttaaaataccttatgcttactatgctccgaattttcattattctgtaaaaataagatgaagtaaaacacattggttggaaattgtagaatgactataaaatagtgtctaccagtgttgaatgacagtttttttttattttagagtgagtttatacaatgaggatgagacaaatttaataaaaaggatgtatagtatttcttctatagctaacaatatcaaagttaatcttctgccctttatttttctgccctattttccataaaagagtggaaatgtcaaaatagggatgttcagtctgtcacattagcttgagagttataaaaaagaaagtaattaaactgtgctttctgggcatggccaccttctatgaaaaacaggaccttcagactctaaaatcctgctggactgggaagctgtgtgctaccggtgagatcctacctccttggattcccagtatccaaatgatcaattcattgtgttgtggcctttgtgttgtgtgttttccaggtgtcaacccaggtaggcttggagccttctgcgcaggacagggctcccatcctgtccttgaagagagtgagagatgccctccctctcttctccactgtgcagtctagcagtttggctgaaagattttaaaaatccctccttctacctcttttcccaaggccccaggccaaaatgcttgggagaaagacttagaaaggacaatcagaacagccaactgtaaacagctgattcattttttaatgcaaatgtgctctttcccctgggaattctagactactctttggaggagttagtatactttgactttcttcacttagagcatggggttccctggccaagaacagcctgtatttttaggaagtgcattgctgtcctcattgtgggatccttttctcctttgttttacctcacattaataatagttttctaatactcaagtacagtcagttctgctataatgcttgtttagaaagcatgatttttttttgttccatcatgattgatacatgaggaggaaatttgagcgtaataagaagtttgagtttgcttatgcacaatttcatttgctacaaacgctatggcaataatgcagaaaactgcacctagctgaatagcatcctgtaaggaaacacaaaatacacacacgtgcatacatacacacacatcctaaagcagggccagctacatgacttgcctgactcaatacaaaatattaaatatgagacgtcttgtttcagaattattaaggatttcaagacggccacagcagaacgttaaaccaagtttggtgtcctcctaagcatggggccatgtgttcctgcacaaggtgcacatccatggagccagctctccctcaaacatcttccagattcctcagtttgctgcttatgttatgagccacaccccatctattccttgagatgttacaatttttctgccaattttggataacccttgtattagtccattcttgcactgctataaaaaattcctggctggactcagtggctcacacctgtaatcccaacactttaggaggtggaggtgggtggatcacctgaggtcaggagttcgagaccagcctggccaatatggtgaaaccccgtctctactaaaaatacaaaaattagccaggcatagtggcacacgcctataggcccagctacttgggaggctgaggcagaagaattgctggaacccgggaggcggaggttgcagtgagcctagatcacaccattgcactccagcctgggtgacagagtgagactgcatctcaaaaaaaaaaaaaaaaaatcctaagactgggtaacttataaagaaaacaggttttattggctcacattttcacaagctgcacaggaaacgtgactggggaggcctcaggaaacttacaatcatggtagaaggcaaagggggaagcgggcatgtcttacatggctggatcaggatgaagagagagagagggaagtgctacacactttttttattattattatactttaagttctggggtacatgtgcagaacatgcagttttgttacataggtatacacatgccatggtagtttgccgcacccatcaacccattacctacattaggtatttctcctaatgctaaccctcccctagcccccaccccccaataggccctggtgtgtgatgttcccctccctgtgtccatgtgttctcattgttcagctcccacttatgagtgagaacatgtggtgtttggttttctgttcttgtgttagtttgctgagaatgatggtttccagcttcatccatgtccctgcaaaggacatgaactcatccttttttatggctgcgtaatatttcatggtgtatatgtgccaccactaacctcactatcatgaggacagctcctagggagatgttgttaaaccatgagaaactgcccccatgatccagtcacctccaataccagagattacaattaaacgtgagatttaggtcgggtcacagatccaaaacttatcaaccctccttccactgctgcttcacagtaattcacaagctacatcccttctgatgaccacttctataagtacgcttcagatcttttcagaagtgccacatttattgtattacttatgcatttattaaccatttcctatgtggaaattaagctgctgttattaggtttctattattttctctgttactgataaaaatttttacagtgctgtgcatctagctccaattttcccataagctctatggtttttatcgtgaaatcccacttagcgtggtgtcttttgttttattttgttttttcagaatgcatatttaatgttatagtataagtgactatcattatgaagaaaagacatacttttattagatatctctcaacacataaatttcatacttaactgaacagttgtagtagggatcattttaagagttcaaaattctagggagaactaaggttttaatgttgttatctacattgaggttacctcaaataacctgcttccagcccatcagactgttcttaagcaccaaagaagtcttgctccatagagctggattagaatttcagcaaggaattttagattattttaagaaaacttagaaaatcaagggattaagttagttgattgcatgattgtatcaaagaaaatggaagtgcctttgatcaatttattagttgtctgttcctcagagcctcagcttgcagacagtccattctctccagatgcattctgtgtggtggctttccaggttcagttccatccctgagggcaatggcacttgcaattcaaattcagggaggagagactctgattcctcctttgtaatgcaggcacaactaatgaactcattacagctggcccatatgtgcattgcctattccttggtaaagtgggcagggagactgtagtctgccaacatgcaccctttcgaaggggctatcagtgaagaggtttcacttgtagctgtgtaagtatttctacagtgatggagggtctggggtcagtgctgagtcttcccagttcactgagattgggttgtacaattgggaccagctgtagttagtccattggttgtacttgcatgacactggagtttatgtaaatagctaagtgaagtattatggccagtgactccacttggattcttagcactattgaattttgtctccatgccttccccaggaccatgatgaagaagtgtcggattttggattaatatatttaaataagatgttttgtagaaatattttaaatatatcatttaaatgaagcccatgttttagaagtaaaaatattcaaaatatccaaagcagtttttactaaaaagtatggaaacaaagattagttttttaaataccaaaaattggagtattctattggcacaattacaagaaagaagcagagacagaaagactaaataagttagacccaattttgaaatgttttcccttcttcttaaaggagaaaaattcactggacttaacatgagatgtaaaactgtacttctagccagaaaaaaaaaaaacaaaaaaaactgacttttaaaagtcattagtatttatcaccaagaatccatttacttcaaatgactttttaaggccagttagacagtctctgagctctgcttagcagagttaaagccttcaggaaaaggttaaacacacagtctgtttaagtagatactaagtctggtaaatatattgaaaattggaactatattgcttgctatacttggacattttgagatgtcctataccatctgaaattcttatttctctttttgtggcctgttatatctagtagaaaaatacatatgcatacatttttgaatgattatacttattatacttgtaaacaacaccattattagaaaacggcaataaactagtgcatcttttttattcagaggatactcagacaatgcctaggttcgagccattgaaataattttcagtgagatctattttttaaaaatctttatgattcacaattaggtcatacagttgatccaattcagttaatagaaagttagaaaagattaaaataacttaaaacattacatactctcttagacttacagccaattgtcctgacattaggttaagatataacaaaacatgttttatatctatgtccaaagaccccaactgataagattcagtaagttctgctacttcaatataacaattcatgatactgctctgctgaataatgcatttatagaatagctgtgctcttatgtctatggaaataaaacaataaaccacaaattcacagcattcctttttttctttcttgacaagagtagagattgcaactttatctctgcaatatcttccttctgttacatttggtaatatgaaatctgaagcataattatcttccactgtgacttttaggtatttttcttaaatgctgtaagcctcagctttttaatctatagaaatgtcaatgataattgtacctaatctcaagggtaattgtgagaagtaaatcaagtgatggatgtaaagcacacaacattaggtttggccacaggcagcacagaaaaaaagttaggtgttactatcattactatatgtccagaacttactgggttcttttgagtgattggattggccattagcctaattgactgtgcatatgacataagcttaattactcaagagacttagtattaggcatatcttctcagttcaataattctcaacagatcctaacatggaaaccaactttcatggagtcagcgttatatagagggtgaggcaagctgtgggtgaagactgcagtgctgctcgctagttctagccttgtccaacttctacggacacttctgaaacttctctagtttcttcatctgaataatgagctagggttcacatttcagacatatcttaattcctttcatggaggacattgccaagcatacagtaggtatttaataaatgtttgctgactgaatagtcacaccctactggcaatgaagtaacttccagctgtgaaaattagtttttcttcctggaaaaatagtgtaggagttcttcaggagccaatccttcttggtacacttaaggaacatccatttatttggtattaaaaattgacgctttttggttttgtccatataattagaaagagtattttctataactagtcatggataatctatagcagcaactaaaataaatgtattataataaataaaatacagtatacttttattttaagaatttttgataaaattatatactttcttttagcataaatgccttctgagtttctcaccttctgttatgggctgagttgtgtgttcccccaaaatattcacatgtcaaagtcctaacaacccccccatatctcagagtgtgactgtatttgaagataggccctttaaagaagtgattaaattaaaattaggtcattagagtgggccctaatccaatctgactagtgtcctcatgagaaaagaaaatgaggatactgcacacatacagtagtcccatgtgaagttacacggagaggtggctgtgttgtaggattcttagttcaggtaagacaggggtccttgcacatggtcatgaaaaattaggctcgcagacaatttgaagggtaaggaggggagggtttactgggtgaaaaggaaaaaagtgaaacagggactctccacaaggacagtccctacacatgtgctttccaccttgtggattgaatcccaggtacaacccaggaaaaggaggagccaggctcctccctgctgcaaatggcatgaacttctgtggctctaccccagtgcacactcctcccagtgcaggtcggttggagtttctctggggacctctttacacttggctgtctcagcagtctacatgtcaaggagagagacctcaggagaaactaatcctgtagacatgttgactttcgacttccagcctccagaaccacaagaaatacatttttgttgtttaagccactgactctgtgatactactttttatagcagccctaacaaactaatatatgtctcatctgaacattagtccagatccaatattttctaaaaagttttacctgataacgctggtctgtcaggtccctacagttgccttttgtttgtatttcattctatattttccatgaattttctctcttcaaacaggtcaccagtcccaaagggacatgtcatgccttgcctgtatctgtagttatataccactgtatgtgttccccatggcatctagcatacttcctcaaactcagaagttagttgatgtttgataaatgctgtcattgattttatgtactcatatatagatgtggattaaagatagaacgaatttttagttttatggaatgattcaatttagtatgtgccttctgggattttcttgggtaaacatcatcagcaagcttgtttctctatcatgttatacctccttggcagagctctgctgtggatgattgttgttgaagtgaaaggagggaaagggataagattctgaaatgtgatttgggtccttttgaaaactgacatagcatttcagattccaaagtacttgtgttgtccaccttcatgaaaagttgagactaaaagaaagaaggtattataaagtttaaaacattggattgcctcaaatccaatctagagatgtcaacttagaaacttaccatgtcttggaaaatcttttatccatggctaagttttaacaatgggaccacttgatatcattggtgctgacagtgggtatgtgagagttgctgtgtctttaactattaacggtaatgaaataagaggtaaagaagtaggccaggcacagtggctcaagccactttaatcccagcactttgggaagctcaggcaggtggatcgcttgagcccaggagtttgagatgaggctgagcaacatggcgaaattcatctctacaaaaaatacaaaaattagcccagcatggtggtgtgtacctgtagtcccaactcctcaggaggctgaggtgggaggatcacctgagcctgggtatgttgagaccactgcactccagcctgggtgacagagccaaaccatgtctcaaatatatgtatatgtgtgtatatatatgtatatatatatatatatataataaaataaaaactgttttccaaatggccacattttctatttgtgcatatatgcacatatatgtaaattatgtacaacgatagacacaaaaccactacacccttccactgccaccaatatgtctttacctccctcacaggtatggatccttttccaaaacgcatgtcaaattagtcttggctaaatgcaaaatcatttacatatttaagcagccaaacctcaaagggctatttataaaaataaacattagcactgaaaatatttagttctgagtttagatcagtcagaaaacaaaaatataataagcccatcaggtcatatcaagtagggacacattttctggattcaatacaaattttgttgacaattttcaatgagtttgatttttcaaaacagatggctgccaatttattttccttttccaatttataatttggcaagtcccttttcttatgcatttgttgaattctgcatttaatgtgttctcatgggtcatacttgtgagaaactgattactcagtaaatttacatggggaagtaaataagaatgtgacttcaaggtaactgagttttatagaagaaagacagtctttttaggttcagaatcatgggacactgactattgtaaaattctcatctttccttgtcccaaattttagaacttttctggatagctcttttgccagtgaagaggcaagatagttcccagctttaataaataactgcggccaggcgcagtggctcacgcttgtaatcacagcactttgggaggccgaggcaggtggatcacttgaggtcaggagtttaagactagcctggccaacatggtgaaaacccgtctctactaaaaatacaaaaattagctgggtgtggtggtagctgggactactctggaggctgaggcaggagaatcacttgaacccagcaggcggaggttgccatgagccgagatggcgccactgtactccagcctgggtgacagagtgagactctgtctcaaataaataaataaataaataaataaataaataaataaataaccaaagtttttgccacaaaactaaatttaaaaatagataaagcaagaatagaaggaaagggcagagactaggaagtgaaagaatagaaagtcggattatgatttccattcctttgaggattttaaattcttgttttgaaatttttgcaggagctgccactgctaatttatatagtattagaaaggaattgcatcccaggaagtctctaatcaggagttaggaccttacagttgaaagaccccataatttcaatatagtaaacatatgtttcccactgctttctctagatatcaaagagtagtttttaagtgaagatgaaagttactatttgttcatgataactttaacatactactgggtatacttttgaatgtactgatgcagtgaacatatactttaccccagcttccctcaatcccattcgaagaggatatgaaaactgctgtcctgttttaatttttaaattaataagtgtgatcttaaatgtgcactttatgttttcaggtcagagagattttagaatatgaaatatattttgatatgtttgttacttagttttggcttccaaaaacctcaggatgtcaaagtaaccttgttccagaacagacattagtgacgccttatgcattcgaccacctcctgcctgtcctcaactgaagacctagtctagtctggtgagcaaaactaaccatttaaaatttagaaatggccaagggtcccagtgaaaggtgccaggttaggtttttactgtaatcacttagaaccataaataaagattgtgttcatatgcaagttatagaaaaccctattaaacggtggtttaaacaaatttgactttttatttttcttctttaacaagaagtcagaatgtatccagttccagacatatgttttgtggttccgggatgtttgagtggctgtgtttgtaattatcttgatttttaattcatggctacaatatgactcctataacatttgccatcacatttgagtttctagaagcatgaaggagagggaagacacagtaggaaaggaaggaagaaggacaaagtagtatcggtatcaggaaagcaaaggctttccccagaatttttagtgaacttttacttatgtctcattgtgcagaacagtgttatgtggtcagtcgcaggccagcaagtgtgagggtgtgagtttttaactttttatagtaaaagaaaggtgaaagaaaaatgaataggaacaactttgagtaggcaaaactctagaatccaccacaaacctatgtagagtttgaactacatgaatataatgaagcgtagagctgaagggaagctgcttagatcaccactaactcagtaagaattatcccataatcactaataagtcctatccaaggacaaacacctatctttgtatatattttaaaaacgtattgggttttctcacaaatttgattctagatgaatttggcataatacagcttttttttttttacttatctatatctaaaattccttattgatccaaactttcatacaaaactggaagccatttaaaactaccaatttgtaggaacagtcttattttatgagaattcattattgtgtatgtctataagactcagaaattgaagaccttttgtaacgtggacacattatacccagcactgtcccatgaaagagagaaatttgtcatgaaatattgagcctccaatcattgcaaatatcccaacacaacctgaaggccagtgttgatatggaagaaattcctatttagagtagaagatggatgtcagaagtctattgcaaatagtataaaaaataaagaaaacctacaaacattataataattgcaagcaaagatttggatccatacccagaacaaagacctgagtggttttggttctgttgtgtgagttgtagttcaaatattcgccttctgttcattaaaggcatactcagagcaatgctgggaaatacagcaatctgtcttgcatcaaagcaatcccacagtgagatctgcccagcatatattttcctggcatgatgtggtgagattcagtctaagcacgttacttcagttttgatatcacagggaaagcacagaacatatcttttcatagtaccacagatttttgctgcatcctgtaaatgacacatgttaccactttttggtggatgagctccagggctaacagagcctgcggtttgtagtgttcctagtgtgagaaagaggttgccctttctccagcgctctgtgctcccattcccctacattgactaatctaactactcagtaattcaaggatttctttcaaggagaggacaaaactcggctccacattgcataattctaacacccttgagagagagagagcacacatactgacatattcctaggatagaaaaaaatgggcaatgttttgaggaagttagtctatgatgagggagagattagaaagctggaaaagtgttgtaaaggttgttttactttaataaatgctggagtttgtttataagttataacaacaagctaatataagattttaattaagatagtagaggttatatagccaatggtgttgtgctcagacgtcattggagtatttaatccaccgatggtcaaagcattgttgggatgaaataaacaataaataatggaaaacaaaacaattgaaacccctgattgaaattctgttgttggaaatgcctttcaagctagttgtggaatttgcaagaaaactagtatttatagtgacagaattaatcacaaggaactgtcgtagaatgcatgatcacatatccctgcctgttaccatgtgaggggcactgtttctctgggagcaatgtatttctacactgcgttgacattggacttgttttgaccaaagaaaagtgagatcagaaatctgccatgtcccaccagcagctataagagccactgcatattttcccagctctcttgttctttctgtctgccacaaaattgatatttcacaaataagatcaccttgtacattctgggcccccaaaataaggagacagtggaggagggcagaaaacattaactcagggcagtccaccagaaatatcagggagagataaattattactgagaacacatttttattgttttaagtccctgggattttagggttatttgttactgcagcaaagctgactaaaatgcatatttgtatgctttgttattttaaaattggacatcacctccactgtactccttcaaacagcacagaataatggtatagtttttttttttttttctctctcctcttagtggagcacattttcaccattcagagcagaaaccttttaggttatagcttaaagaaaactaaaggagtgcaaaatgctaggccttttcctccttgtaatgtttgaaaattcttgaagttggtttgtttatttggaggggatgggggcataaacagtgtaagctcaatgatcaatgctaacattctctaaaacaaagactattgggttcatagcaaaccttggcaatgtgagaaggggaggtatgtgtagaagagattatatacctactttactcgctttaagggtgcagtaaactgttatggcttttttgaacttgaatgttattatgtgtggcatatcttataattatttgtgctccttggaagactatttgagcctcctcattccctgcaatcttttaaggtaattgctgactgcaaggaaagtgattagtaaggcagagatgaataactagaggtctcttgccacaatgttttgccagactaattcaaatcaactctgggatgtaggtcttttgaaatttctctaacttttcttttcttttatacttctttgaaggaagatttatcgtctcaggttatgcatgtgaaatatggaacagattattttcagatagtgtcccaaacgctacagcctcagaactttcctataggtgatgttctatagaaaatgtgcatttctctaggatgagattaaccatgggaatcttatgtacagtcataattaaataataaggtccttgtaggcagtctatctatgaataaatctttgtcttgttttaaggaagcctgctaaaaatcaacacatattgccatatgaaagtgaaatttgcagcctgaaatgcattgctagaataggttgattatgatggaaggacagacagtttcttgaagaaatagaataatattcaggcaacatgtcctccatatgtagccgtcatattagagatgacaaatggggacattccaaaggtgtccagattgctcaagtcattttgtattatgcaagatggagtactcaccttaaaaaataaaaaataataaattataaaaacctagaactttcggagttcacaaattgctgagctttcaaaaaaaaatcaataatgaagtcaacatgtaaccttcatgcacactgtggaaatagagtgacacattgtagcttatagctaaaacacatctgagtttgatttttatgagaatgttcttatcacactgctgtaaaactgcactgttgtcatcaagtagatcaacaaaatgggcataacatttagtgatatgacatttggtgatattaactcccttgggattagcatactctgctgaggcatagcccttttatgcaattttaactattcatgatagttaagggctggttaattaacaatgtttcaaagatatagacaatagactgttaaatttatatatatcagaatcctaaatgttgaccaaagcaaaaatttatcaatatgagtttgttagccaaaactgttttcacttaatttagattttattttgaaaatgcattccaaatacaaaaactattacaatgtttgtatcttattaaaaaatgaatagaatcatctgtctggacatacagcaataactctttccaaggcatacctgtcatttagtttaataactctaatgagatccttttattgccatctgtgtctcagactaataggcatttcaggctttataattggaaaaaaagagacaaagttacagctaaagttgattaaagatgacaacaacattataaccatatacaaaaacgaataatcacaagttatgccttgagaatggtctttttaacatgaaaccatggaagaaggtataaagttcatgtatatatagtataatatctcaaaataactggttaataatgttgtaagttttatttccttaagatagtcattacttattccagaaatatttgcataatggcaaaaatagtgtatatgttaaatcaaaatactccttcacttagccaatgtttattcaactccttttatggaagtaaattctagatgctaaggattatagcaggaaaaacaaggaaaagcaaaataatgacaaaatctgctgttatggtactacattgtagtggaggaaaataaacaatgaaataataaaaaaaaaagtttgtcacgtaatactaagtacacagggaaaataaagcaaggaggggtaaaaaaatgaaatggagcaagggtaatatttaaaaatggatgctcagggaagcctcactggagaagtcattgaaactcactggagcccacagtatcctggactgaggagaaggtaagtacaaagaccctgaggaaggagcaagcctggaatagtcactgagctttcaaagcaccggtgtggctgctgcagtggggttggaggagttgtatgaaatgaaaacccttggggagccagaggagatcatttaggggctgttggataaatgaagttgttgaatttttcttcaagtgagatgagaaattttagaagaattttgagtattccgtgttatctgatttgtatttaaaatagactgtggatcctagaacaagtgtaaaagcaaaaggctgttgaaaaaaaatccaggtaggagaagatagtagcttggaccagtatggggtgatgaaggtcctgagagtggtcagattctacacatatctggaattaaagcatacagatttgctgatgatttggtttgcaagaggagtcaaggatgatgccaagttcaaaataattgcccgttttgtagatggcaaagccaaaatgaatattctctttcaaaagtaatcttatatcccagggttctctaagccgagaacattggtaaacaaaactcacagattctgcaatctggaatgggaaaaatttcatcttcatctttataaatttagcattactgtaattataaaggtagacaacaaaccactgtagaattaacaatgtctgtagctttatcaccaatagaattcacatacgtattcatattaccttatatttggtgcagatatctgaaaatgtcatttatactcatcactacttcccaataattactaccaattatatctgctgccagaccttatgatttaatatgttcattaataagcatatttatcaaaattaaaaatatctttataacttctttatgttttctttgtaatagtatgtgttttattttagggatttttagacattatcctgagaaggtcttcacaggcttcaggagaaagtcaaaagggcccatggcacaaaaatgttaaaaatccttttttcagccatatgcaatagtatacaccattggagattataccagcatgtgctctcaaggacaataggaaaaataattatcaagtattgcgtgcttactatatgccaagtacattatctaatttatttcccatcacaaatctcagaggcagagattatccttgttttatatagaaaaaaatatcggcttggaaagaataaataacttctacaaggtcatacatcttgcatgtggagattcaaattttagtctgtttcctaagtgcatcctcttaaccatcaaaatatattgcttcccatcatggaagaatgaaaactgatgatataaaacagcttgtaggaactctctatcaagaaatggaagctgaggcactatatagccacttgttggggagaaaagatagaataaaagcagccaagcaaatattttttttctttttctccctccctccccgctccctgtttcccctcagtcctccctcctccccactttccttccctccctcctccccactttccttccctccctcctccccactttccttccctccctcccttcctccttccttccttccttccttctttccttccttcctttgttccttccttccttccttcctaccttctcccctcccacccttcttccctctttatcttttttctgcttttccttcctttttttctctttccgttttcctctgggcaataagcattattacttttctatcatttgaatcctgtgtgttcattggaaagcatttgtgccattcacagagatggaaggattaaggaaaagatttgctagaatgcaactttatgaggtaactgctgttaacattttgaacaccatccttccacaaaccttatattttatacatacttacacaaaaatatgtatataatttcacaaaaatagattcaaatagtacatgcttttttcagaaaaaaaaatagtatccccttgctcttacactgcattcacaattgtgtcccactcctcatcccacacaccccacttttagaagaagccatcatatacacttaatgtcctctcctgaaaaatatggcaagggcagtgataggattcagttaaccattgactgatagtaaggattcatgtatcaaggtgtgggctgtgttcactgtattctgactgcaggggtttcacttgtggcccccatgtttatcaatccttactgagcaacttttggcaacatgcttaacacacgaagatctttctttctccatgtgtaaaatgaggatagtaataataggtacctcactgagtgattgtgaggcttaaatgagttattacatgaaagctgtatacaagtgtcttactcaaagtaggaagctgtaattcttgttgctttctcacagtcttgggttggacccttcacctcaccagaggagggcctgggtcacaaattgaatcaagtcccatgggagtggctcttggttgatcaaccagtaggtcagctcaaagtccaccttggaccccagcatattagtaacattctttgcattttataaaggaaaacattgtcagatttcaaagaacttgaaaagcatatcaagatattgtttaataaataggtgacacaaactcatgtgatatatactttttttcagaaataaagcaatacatgccaaatgaatacttaatttcataatgatggtatgtcatcatagttatactttatatgttggatatctatattatatataattatacataactgtagttagacatctaactggacttttgtttttcaaattttattttggaatcaagggcacctgtaggtttgttacaaagctatattgcatgatattgaggtttggggtgtgattgaactggtcacccaggaagtgaccatagtatccaataggtagtgtttagctcttgcctccctccttctctagtaatccccagtatctattgtttcccatctttatatccatgtgtgcccaatggttagctcccacctataagtgagactatgtgatatttagttttctgtttctgcactagttcacttaagataatggcctccaactccagccacgttgctgcagaggacatgatctcattcattattatggctgcatagtattccaggtgtataagtgtcacattttctttatccattgcactgttgatgagcacttcagttaatcccatatttttgctattgggaatagcactgcaatgaacatatgtgtgtgtgcttgtgtccttttggtagaatgatttattgtcctttgggtatacactcaataataatattgctgggtcaaatggtagttcaacccttagttctttgagaaatctttaaactgtttttcaagtatttcatttttatcactgtgattagagcttgctaagaaaactgatattttaagtcattcctacctctcatttttatatttttgtgtgctccaagattggccaggggctatacagaacaacgatttttactcattgctgacaatttgtagttgaccaattgaggcatagaaaaggaagaaaaacaatacaaaaatgaagcataatttactaggaaagattgtttaacagtattctacggcttctctaacagtttcatcacttgcagtggtttcatcagcttcagtatgttatgaagaaagcatgaaaggtgagatgttatcacattctaaggaaaatatttacttgccaagtaaaagagtttgcacctattttcacttaatctgcaagcctcagttaaagataaaacgtgttttcattacaactctgaaaatgtcagagaatgaatctggaaggtaagtagattggaactattttaatcactaaaatatgaatgaatattgtatttgtgatttttaagccattattttacttttggcttgtgtaagttattgtgcaatgagttcctcatatttagtattcattgtttaatatacttatttttattcattcatgaatttcaaagtttcctaattgagcatttggtgtgacagcatattcatgatttaacagacttcaaacaaatctcttcacagcctccatattttctctattgccttaggcagagtaggggggttcaaaactttacctcctggcctctaagagtctcagctgggcctgagaattaaattgacataagatagattaacaggagaaaagcacagatatttttacaagtacaagggagcccccacaggaaatgacccaaagaagtggccaaagctaaatgcttatataataggctgaacagaggtaggcaggtgtggaagtaactaaaatctatgggaaggataaaggaaagtaagagctattttaagaaagtctgtttgtacagatttttctgggtttcagctccccatctctagtgacaagaacatttcttctttcctggtaaggggaaagcatttttcacatgagagttttctcccatctctggtgataagaatgtctgtttatttgtcctcctatagggaggccagagttttccttttgtatctgctggttttttagtctttagctcaagattcttgttatgccaaagtggcatattttagggtgacgtattctgccatcctgcagcagcaatcctctgagagcaggttagccagccttctccttcttcaccctaaagccatgatgctttcccaggcattcagtattgttaagttgagtattattcaatacatcatcatttttcctgctctcagtggtacattgaacttctgtcttcagaaaacaggcagtaatgattctgatgtccttgttctgagtggtaatttatcactttaagctatgtaatcccatcagcttgtaagtatggaatatattatttttcactaagtacatcatcttgtacatgttcccattgaagcttatctcttgctttttaacctgttagccttttgaaattggtatgtactttatttcctttaggctcagagttacttcattatcaagaaaagtttatactgctgtaaattcggaaattatacttcttctagatcattttaaaaatgctaaataaggtcattctcacgacttatcacaaggatatctgtatattcttgcagtttaccttaatgtagtatttgcacttgaagtctcttcaaagccgtctaaagaaatagtcagatatgtgtacatctttgtcctggaatcacagcattatttatattagtgatcatttagaaacaagcccaacatccaacaatagggtactacttaaacaaattatggcgtttccacattacataacagtcatgaagctggagagaaagtttaagtaaagttaatggaatagggagatattcactgcttcattaaaataaatgtacagattatagtttgtgtaagcagcaggattacaggatttttaaatgactttttgtaggcagaggaattaaaggggatgaattttataaaaataatgatgatagttaataattgatgtggtgagattatgggtgacttaggttctttttacttcccatattgtcaacatagattactgttgccatcaagagtaaataaataaataaataaataaataaataaataaataaataaatggtggcccataaactgacattttattcctgtattttttccctgaaattaaggagtctggtgcaaaacttcgccaaatgcagccatattcaatgaacccactgattaaacacacagccagaattctttcagaatgtcctggcatttcacttgagaacatttcaaagcaattgaacaaaagcaaagagtgtaccaggaaggttacagtaggactgaagggaagaactagaactggaaaagtcagagggaggagtggagaaagaggataagaatcaggggtgatcagggagtggagaagggcatagccccagggcctggccgtcctgcaaggaccaaaggaaagaatctcaccttagaaaactgttcagattctttgaaaatattctgaccttaatttttcatgataccttataagtaaaatgcaatgagagcctactgtttttttttttttttaactgggtactttatggaggaccaatgttttaaatagacataaaagcataaaacatgatttaagaatttgcattggcaatgcagtaggtggattctgaaagaaaggttacatagttggttgtataccaaaatgacttccagctataaaagggaagaaataagaaccacagttcctaaaatgagagaaaatctccatgattttggcaaagggggagcaagcttggaaaatattttgtcttttttaatagcctgaagagtgatcatttctatgtgaacatgcctatgcaaggcccacgaaacaaaaactgttcctcgtacgtttgactcaaattccatcttgttctgccttgtttttgaagtcctcacgttttgtcgatcttgcttcactttctgtggaaaaataatatgctattcatggttgtatgtttacaatgtagaaaacctcatttatttttcagttcatagggcttctggatttgtaattagttgctgggaagtaaataatggtatgttttattttgaatttagcattatacaaaatggcaacaggagatatgtcttactgtagagtgtctgttcatgagagttctttatcatcacgctaaagcacgtctgctgaccatttaaaggaataacaaaatactattaatgactaatctcgtcccccgaccctccccagatatacacagttaccaaagaaaaggcgctcgacagtactggggaaattatttctgttagaatggtaggccctttagaaattttaccatgattttttgttttaaaagtatctgtacatttataagaacaaaactgattttgagaggcaccctcctctatcactagtatataattcaggaataaaaagaaggccaaattataaactatggagtttatattatctgcagtcatatcaaataatatgaccaaataaaataacttgtgaatttcctaaacataattaatcacattgattaatgacctgaattaactgcttgaatttagtcaaatttgttgaagcaagtagtcccaagctatgttttgagtttagattctgtttttttcattataaagtgaagacgttttccatattggaaaagtgaaaactgtggattgtttgcaaactagccaacaaagtacgctagtcagtttatcttggcaaattcacatttaatgtcatccgttgccagaaatctgttccgtaatgatgtcatcaacagtttgggatgagaaaaggctaagagaaaaagctgaaagaatgtagacgagaaagtaatccctacgtgttctactgaccatatgtccccccagcaattttacttattgggctatcaaactaaaatcctcatttcaatccggtagtccttgaagtccttaagttcttttctgttttcccccataatttcataatgataattatttttgtcaagctgtttcattaaaacattaattagttcctataacttgtgagaaaggtgttgttattataattttagatagaagcacaagtttaactgcatccttggcatcctgtatcatgatgtctgtggtggaatgaagaaataattagattttttggttccgtgttatcatgacatgaaaaaaaaaaaacaaaaaaaacaaacttgtgcttgaaaagcaaagtagaagtgaaaccttccttgactttgtaatggcatttatgctgaaacacagaactaatgccatgtcaacataagtgtatgtgacattcccattaaaaagtattcaattgctctagagacccagggactccgtgatattaatggagacatcaagatatggtctttgaatttctttgactagccatctaaaggtgataggctgaactgtctttaaataccatgtgtgagagcttaaaatctgggttaattatatatacaaatatatgcaaatttaaattgtatgtgtcctacaagtattctaagactgaaaatattcttgtttgaataaatgtggttataaaatgcattttataatatggatgtttctcttttttccagctaattttttaaaatttgacgtttcttgaatgaatacttattatataccttctatgtgccagatgggctagtcttggatatgtcttcactgaggttattgcttataagggagaaaagatatgtgctgaaatgtctatggcacaaggtggaaagtgagaaatataaaaaatgtatttacaggagttctggggaggaacataagactgaaccgggggagatttttgtagggaactcatgagaactaagggatagcctcgatgctgaggcctgcagagaccagacatgacttaggacgtggatgaggctcacatacttctgaggcctgggtcatccctttgtgctcatgggatcctgcccatcatggtcactaaattcctttcaatccgtgattcttccataactgtcacgtcaaatcacttacttcaaatgacaaatctttcacttattgcaactgcagcttattcaccatttcagttcgctcactgctttctctattcttgctcacatttctgtttctactcccaggacccatagcctggctctctctgtctttttctgttcaaagtcctgagagaccatgtcatgagtgaactggctaccaccagtcttcttgaatccgacacccttccctggtgtagtcacctctaaccaggggtatgaaagcaaatatcttgctgcctaaacacgggagtgtttgccttggaatgggctgtaaggactcctttccaaagtgtggcgagtggcaccatccttgaaaatggttcagggatggcattagaggagaaagatacatgaactgcccttgtcaacactcttgctgtccaaagccagcccctccacctgggtactgatgtcatccctgcctttctacaagagctcctgctaattggatgatttccctctcttgagactatgatggggattgagcataatttttaacaatctacagccccatctgctaagaggtcatggagaacacatggaaatcacatataatacaggtgtaaggcttctcgtgtatcttgatgaaagaaaattactgaagagaaaataaaattgatttttgagtgttgaatttgccaacccaaaagaataaagtgatgatattattaaatatattcatataggaaataaggaataattttactgaaattgtagcatgaacttagacatacatcctggaatgggagatttgtgatcatatttggccttacttatctaacatcttattatctttatccttgagccactgattcttaatgctgtaaacactgacgatctgacattgacagttgtgaactgcataggcagtattgcagagactgataaaaatgtttgcactattagaatctggcaaataagattattgtattaacttctgaacatggaattttatatccagtcagaatcccacgtatttcagtccaagcatcagtgcttatactccaggcattatcttgtagcatacactgagataatatagctataccccaaaatgcagagtcatagagtcagaaggtacctaaaattaatgtagtgacatcacccatgtcacgcaaaacttattttttcttcccaaggtctcttaagccttttttgaataaattcattgccaaaaggtgtagtacattaaggcttggtcactgtaaatgtcaaagtacattcaataaatgatttttctttgacccatagcatttttatttttcatttaaaaatttttgagataatcttaatggcatataataaattcaacaaatggcatgtggcttttagtaatctctttctgcatgatcaagtaatggtaacttgaactatatggatctgccatttttataggtaaaaaacatcagccatttcatttggttcaataagatatattttaaaaattggccaggtgcagtggcttacacctgtaatcccagcactttgggaggctgaggtggtcagattgcttgagctcacgagttcgagacaagcctgagcaacatggcaaaaacctgtttctacaaaaatttaaaaacattagcctggtctggtggctcactcctgtcatcccagctactcaggaggctgaagttagaggatcgcttgagccaaggacatagatgctgcaataagctgtaatcaccactgcactccagcctgagcgacagagtgagacccgatctcagctcatgttttagctcatgttgtgaaatagactctaaatcaaacacaacgcatggtatatttttttcatttggataggtatacataaaccatagattgtcttttcagaagtaataagtccagcaaaaaaatggtgagatcttattccctgctgtttatgacaatactcagactcttaggccaatttagcttctgttaagttttatgaaagttctttttggctttcttccttgagaactcgagaattattttaggatgcagataaagtaccacatatgtacataaagtcagcagtctgcttcagttaaaaaattctggacagttatgcttatgcagaccagaaatctattattactggaggaaaagggaagcaactcctgtcatgtggctaaaacacaatattttaaatatccaaggtcttttgtaaatttatttcacagtacattctgtggttcagaactacatatagttctggtgaatagacgcccatatttcaagagttgtataatattcttcaaataaaataatgaagtcttcaggagtagatttgtgataaagttattgtcttatagaaagaaaatggaaatgaaaatacttgatacaaaattcacatgtttcgtgattctcaggttcaggttaccaaatacatggatcctcaaactcttgctgctacaattcaaataatctacatttttttttcttttagggcaagatctaaggaacctgaattaacataagatcattttctagtcccaaacttgtaaatatggtttaattttcccaagtacattttgatagagcaatgtaagaaatattatagatggatctaaataattgactttccaaaattaaagacccttattcatcaagctttttgctcttgaaaggaactgggtttcagacaaatctgttaggcttcttacacaatgctagtcaattaggcaagtgccaaaaggatctcattctgagatacctcaaccttagaatgagccttcactgtaatcatgctccccaaaggaatggaaaaaaaaagtcaaagctgcgaactgaaaaaaaatactgcctttctaacacactgggaacacagagatgaaaaaatatagaagacagtttcatgatagaaatgtgtatgttaacagccataaacatagcaaaatcctgaccataataggtagtagcagaagtctttgatcaaggccattttccatgactgtcaatagttactaactactcagataaaaggccacataagcttattgttttaacattcctagtcaattcagtaatcagttagcgttaataggtatctcaagtattttaagttcagtccaaataattgactatataaaagatgcacaagtgcacctttggatgattacattctgttctcagacctgtcatcgttttcctcaaaatcacattttttttttaacctgcttctgtgtaatttgatgatacactgtcagcactattaattgtgggttagcagatgttcctgctttaaaacttccttgaaaaatgtgcattcatgaacaagcattaagtatatgtgaaaaaccaaagaagcccacaagtattagaactttcttcagtctgtacatctaaatatgcaagtgcaaacacaagaggcatcacccacctcccaccttttaatgaactctgcatatttttgtttggataaataaagcagcaggacattcagatgaaatactttaaaaatgcagaagattattaaaattgttattaaaaacaaaatagaaaaaccacctgaagtttttccaaaatacggttggaatctacctatttttttttttcatttttcatttcgttactttaggaaataaatgccaactagattctaaaaaatttgctttgtacaacttttctctttttttctttaagcaaaagcagaattaactgaaaagaaaagaagctgtttgaagaaacagctgagcctcaggaaggtcagtggtgtaggcaggccttggaagcaaccacaaccagcgacttacatgtcacctttctcctttgctacaaactagttttcttcataaggtgtaaatcctgcctgcaaatacctcctgacttagattgtgcaggtttagccaccagagagaggcaaatgactctttcagaacctaattcagaatttttcttaacataatccatacaactaccgacgcagtcagctccttcccaaagggacacaatgcagaccagacactgcacctggaggtgaggaggaagcctgggtctccaggctttctgggtggtatccttgcttcaccagctcaggcaaggtatgttgctccacaagcctgcaaactaaggcctaaaaactaaatcaatggttctcaaacctggctgcacattagaatcacctggggagccgttaacaaacaccgacgtccatattccactccagaccaattaaatcagaatccctgggcatagggcctgtacatcggtatccattaaatgctcccaggtgattccactgtgcagccagggctgagaaccactgggctaaatgataaatttaaacttaatggaggaaaaacaagataaccaccataaccaccattaaaactgcagtttaagaaaagtaaaaccatatagaagtcctaattgatctcaggcattttaaatcagttaaagttgactttttccaataacttgttcacaagaaacaaattaaaaatacattttgcctcttcctgtttgtctaaagattttatagaactatcttcatatattttccagtcttggatctaatccatgcatattgattagcggtgaatttatttttataatattaatttggtggatcttttttccaatgtcatgttaatgcatagaactcaaatattatctcactctagtctccacaacagactcaccttatgtctttccccattacctctactctgccccctgccctgtcaacatgcacccataattatatgtgcattaactgaactcagataacaagagcattccaccaaattcagccagtttattagggcatattaggtttcaagttatgcttattaacacccttgttaggaattgcatttttgcccagtggaggtagaaacagtggcttttgagttttcaactctgtccccttctatcctgcaatatgcagtcaagacatacctttaattgtctccatccatttctataggagaaactgggtttaaacttccaggagtgatttgtcattccctccacccccatcctcatttcaagcactaacatggtcttttccatatgacatgctgtgtttctgagtttgataggtaggcaataaataaatgtttaacaaaatggatatttttgtttcaggggttatttggtgagactttgaatgttacattttgtctatgtgttagaacagttcatttgactttcggtataaaaatacatctgccaaagacagtgattttacttggagcagttaagctacttaaatttgggtcaggatagcctacttttaaaagcataacatttatgtctctttctatgcaacttataatattcagatacttagggagaaacacctgaatactgattcaggaagacacatgtatactacatattgtatttaggcacctggtacatttacacataaagcagtggcttttagagagagaaccagacactttgtttaggcagctgtcagaatatgatgaatgctgtcagtggtttgcgcacctcagtttctctcccttgggcaccactggcttccctgaaagtatcctatagttatcaatatcatatgcaagtttctctcttgtatgtctatggaatcctagaatgtattagaggttgtattaggcttctggaagaaatcttgtaaatcaaaagaaatcacatgttaaattatattcttccttaaataaggatatgcatatgtcatgactaagagcaagtgacaccagaaagataattgaactctaaaaaacgttaagtatgtaaatgaatctcggcttttggcagtccaccatgccattttcacaagcatgctttcaccttcttcataacataagcattgtgtcaaacactttatttgaatttaaattttaaatttaatgtcgtcaataatcctatgaagtatatggccgtgtgtgtgtgtgtgtgtgtgtgtgtgtgtgtgtgtgtacatatatatatgattttaaacttaaaaaaaatatatatttttctgataagaaatagactcagggagattaaggaagttaaagtttactgtcaattttgagtagatttaatctcaaagctccaagttaaattcttttcaggcttaggaaatccagactcctttaggaaccatcagagtatcagaaattgtcaagtaataaaaatagttttagttacttataattttacctcaaagaaattcataaaaataaggcattttaaatttggataggccattgtgagacagttctctagtcatgcaacatcacacttttatccgcctagagaagcggaaatctgttttactctgtcactcattccaatgttttatcactttcacagccaggaaatggtgcattaccattgcaaaacttgaatttcacatgttgttttagctcatatattcattttgtatgttgagaagaaataacggttagttgggaccattcttttctgtttatttgtagaccctccttctaatgctgaatgatcttttaacttggcactgatgcaccatcatttttcttttccttatagttctctgatgttctgatccaccaagtgattagtttttgcactttaagtaattattattattattactatttatttattttttgaaacagaatctcactctgtcgcccaggctggagtgcagtggcgccatcttggctcactattattactatttttgagacagaatctcactctgttgcccaggctggagtgcagtggcgtgatctcagctcactgcaacctctgcctcctgggttcaagcggttctcctgccttagcctccagagtaactgggattacaggtgcttgccaccacacccagctaatttttgtatttttagtagagatggggtttcaccatgttggccaggctggtcttgaactcctgacctcaggtgatccacccgcctcagcctctcaaagtgctgggattacaaatgtgattaagtaattatttttatagaaatagaagaaagtctatgatttctgtagttagaacacatcaaatttcaacgtggcaaattaagtaccaggctaggtaactacatgttgctttccccaatagaaccccatctataaataaatatccttttattttccagtggagcctagaatattttcttaaaagcaaacttccaatatgaatccaaagacatcaacataaccagatttttttttttttttttgagatggagtctcgctttgtggcccaggctggagtgcagtggcgcgatctaggctcactgcaagctccgcctcccgggttcacgccattctcctgcctcagcctccagagtagctgggactacaggcgcccactaccatgcccggctaattttttttttttttttttttgtatttttagtagagatggggttttactgtgttagccaggatgtctcgatctcctcgcctcgtgatccacccgcctcggcctcctaaagtgctgggattacaagcgtgagccaccgcgcccggcccataaccagatattttatcagtcattgtgacttagaaatctcatgcatctgtggctgaatatttgacaacagttttctttttttccccagatatatgaacacaaatgctttcattgccacatatacccttggccacagttagatgattgaattataactgagtcatgcctgtgctgagttttagcagagtattcctgcaggatccaacaaggataaaaattgatgtccctcttgaaacagagtggtacagatggtgcagctttatagctgtctccaaataccaaatgccaaactgctcctttgataaggcaaggcggtgtaaaggtttaaatatagcctcttggtggaatgtcagtgaatgatggatcccagttacaaacacaccaaaatattctctgtttaaacattttttacaaccatggttgtgaagattctatatcaaggaaattatgcatgggggaaagaacaggaaacttaccctgaaaaatctatgtgtatactaacaaatcagttaaatttggaggaggggagtgtggaaaagtacaatggcaactagtaaagtcaatttttctgctaacacctgccacaagtagaatctaaaaatgttacgttaaattcacaagacttacatataacaacaatgaaatagggaacttggctttcctaaattagcttggttatcgttttacagcacagttttcaccaaaatgtcaaatgatggtcttgtagtaggagaatggcatacatatatagaatggttaacttgatcattttatatgtatgcgtatatgaatttattcttttgataaaatatatttttaaagtattgctaatattcatatccatcttcataatttgtactagggagatgaacagcaagaagtaaaattttaaagtacctgagaccttgtcaattttttgttaaaactggttaaagagccataaggaaaactggaattatagcaaacagtaggttcatgttttagaacctttaaaaattagctagtgaattagttaaaattatttcagctaattttgaaataattgtgaagatatacaaaaagaaacatattggataatgtaaacggtgtcagcaagtaaatcaagacaagaaagtcatcaaataattttgaaagatgtttgcagttattgattttatagtgaaaataaatgattaccaaactaaaatgttacccctaaagtaggtttataagtataccaatgagaacaatgttaagaaagcagcatttatttcatcattactataatgctatctctcctatacctggaccattgtaacactgagcacatcagaatgtcccacagaaagataatgttatatttctacatatggtttgtactttatttagactgttgtattttctgtaaatgtacttacctcttagaggcacggtagcctgactatccagttttcactcatttctgctttacaaatcacattgacttactgatttcagaggatatggctatcaatctgaactagggagaatatatctaatatttgcagcaaactcaaccaaataagctcctagtgagatgggttttaaaaaatcattttttgtgatttaatttacatttctaaaagtttctgaatacaaaatcaatgtgcaaaaatcactagcatttctatacaccaataacatccaagctgagtaccaaatcaaggatgcaatctgattcacaatagccaccaaaagaataaaatacttaggaatacaactaagtaaggagatgaatgattctctacaatgagaattacaaaacttttgctgaaaaaaattagagatgacataaatggtaaaacattccatgcacaaggataggaagaatcaatatggttaaaatgtctatactgcccaaagcaatgtacagattcaatgttattctgatcaaactaccaaaacatttttcatggaattagaaaaaactattctaaaattcatacagaatcagaaaagagcccaaatagccaaagcaatcccaagcaaaaggaacaaagtttgagacatgcattacccaacttcaaactatactacaaggtgatagtaaccaaaacagcatggtactggttcaaaaaataaacatatagaccaatggaatgggttagagaacccagaaataaaactgcacacctatgagcatctgttcttcaacaaagttaacaaaaccaagcaatggggaaaggactttctattcaataaataatgctgagataaccagctagccatatgcagaagattgaaactggaccccttcctttcaccatatacaaaaattaactcaagatggattaaatacttaaatctaaagcctaaaactataaaaaccctagaagaaaacctagaaaacatcattctggacatagatcctggcaaagatttcatgccaaagatggcaaaagcaatggcaacaaaaacaaaatttgacaagtgggatctaattaaactatagagcttctgcacagcaaaataagctatcaacagagtaaacagacatcctacagaatagaagaaaatatttgcacacaatgcacaaaacaaaggtctaatatccagaatatataaggaacataaacaaatcaacaacaaaaaaccaaacaaccccattaaaaaaatgggcaaagaacatgaacagatgcttctcaaaagaagacatacacacaaccaacaagcatttgaaaaaatgctcagcataactaatcattagagaaatgcaaatcaaaaccataaggaaatcccatcttacacttgtcagaatggctatttaaaataaaaaaataacagatgttggtgaggttgcagagaaaaaggaatgcttagacattgctggtggaaatgtaaattagttcagccactgcagaaagcagtaaacctgcacatgtacaccctgaacctaaaataaatgttggcaagaaaaaatacattttaagtgtaacatttgatgagttttgataaatataatcacttttacattatccaatcaagatttagaatatttccatcaccccttaaaattcctttgtgccacattttcaatcatttctctctgcttccacttcagaaaagcactgatctatttctcttacaattcattgtttttgcctattcatataactgatactttggattcttttatttagcaaaatattttaaaatatatctgcattgctgtatatgacattattttgttgttttaggaaattattctattgtattaatatagtaggtttatcaactcatattaatttttgataaaatagtaagcatgtttatgggaaattttcaaactgttttccaaaagtcttaccatcttacaattttaccagaaatttgtatttccagctttccagtgtttggtcatgtcactcttttgtcaaatcttgtttctacaagtactgaaaaaaatcttattttttttattttttaccctgttaatgtaatagtttacattgattgatttcaaatattgaagcacttttgcctttcttagataagctctaccttacaatgtattatcatattggtatattgtcagtatttagttattactaatattaaatattatagcatattataaaacatacttaatattaaaaacattaattttgctaatattttgtgaggattttggtatctgtgttcatgaaggatgtaggtcagcaatttccttcttttatgatatgattgtcagatttcagtatcagcattatacgagactcataaaatgagttaaaaatttttcctactttgttttcagaaagatatatgtgatgtcaccattaatggttcattaaatatttggtaaatttcatcagtaaaagcatagagaattttcttaatggaaaggtttattattaactactgatccattttctttgatgggcataggcttttcagattttctgtcttcttcagttttggtaagttatattcttcaaggagtttgtttattttgtaatttgtcatattcgttagtataaaattaatcatgatagcccattatttatttttcttttaatatctgtagggtctgtaatagtgtcctcctttggtcttctctttttgtggattagttccctaagggtatgttatttctaatgtatgaccatgtaaagatggtctaaagataccagcaattaaatggcttttacttcctgtgtttctctccatcgtactattcttttactattttgcttagagggacaaactcttctcaatctgtatgagaattctatcactaacagttttagtaccaaaagtcatgagtcccaggaatttagttacttaattagagtaaaccaggagtatttggcatcctaattatatatgacctgaactgaatcatttggtaatcaaattattgtcctacaattcccttaatgggatatttttcttaaaaaagcagcaatgcagatcaatcaacatagctgtatacatctagcttttataatgctatcaatcctctcgcttctactggggattcattacatataatatcttctttaattctcacatgaacctattctcatgttatcaatagttaattgaggcacagagatattaagtaatttgaccatggtctctaacctgtgtattaacaaagtgataattttatttaggtaatctaacttcattacctgtgactctgtctattctctcagtaagcatcttaaagtaaacgtattttatgtttaaacctcaaagcaattttgacagtaaaaaaggaaatatatatatgtgtgtgtatatatatgtatatttaacaatgtagattaacattgacaatgtgagattgttttggagtagaggcagagagttatcctttcattgtatgttagaaacttaaaactgttctctttttattgctataatcagcatggcatttcttttgtaactgaaagaacagaaatttgaaaaaaataattttctctctttaatatattgtgtctattttttattatgctaaataaagtctcctaatctggaaaaaaaactatgccatttaacattttcaaaagcacgcagttaaaaattctcatttccaagacaatttaggaagtaaaatagagcttttgaattacttatgaaccaattttcctggctatcaatgttatttttcaattcctgatttttcttccatgtacatgttttaagggcctgttgaggtaggtatggaaaaaaattttagcttctcgcagaaggtcagtaaattatggattaacatgtttatggtacttcttgttgagttgcagtgattaaagtgttaaattctttattgtcccttctgaatgtagtaaaacctgacataaaaacacttgcagaaaattaagatttagttaagcttagttttttaaaaaaatcatggacctatgattctggaaggatatataaattcaagctttgtccttgagagtcaatctgtttgtccaatctgttcacattttgtagtctttgcatacaatttacattttagaattcacctctgggaaactcttctgttcttctttagagttgtctctagatttgggctgagggtgagagatgctaaggaataatatatatctaaccattattgcacagctcctttgaactcattaaagaggatcttccaggagattgccttaatttacactggatctttagaagggacttgacaggtgctgcttctatttatttttccttcaaaatgatgcaatagcagcaggctgttaggctctttgacatagctcatgacccatctgagatgagtggaaatgaaaagcaccttctctcctatgggagcaagggttgggttcaatggaggaaatatagagcacagtctctgcagtgagcagactatcattggatcctgatttgcagcaaggtagctgaaaagatttactgcacttcttggagacttagtaaactcatctgtagtacatgcaaggagacaagaatgtacacatgagagaatggtggtcaaagatgatacaagcttaatagtgacaagtgttctgctatggtaatgtgctgtattacctttcttttttccttttcttttttatttattaggagtattattttttgagagagcctcactctgtcacccaggctggagtgcagtgaagcaatcttggctcgctgcaacctccgcctcctggtttcaagcgattctcctgccttagccttccaagtagctgagaatacaggcacccaccaccatgcccggctaatttttgtatttttagtacagacaggtattcaccattttggccaggctggtcttgaatccctgacctcaagtgatccacctcccaaagtgctgggattgtgctcgtgagccaccgtgctctgcctgtattacctttctttttatcaactctctttgaaactgaggaatatgggacacacaaagatctcataacttacagaaaggaagcaagaccttggtattgctacaaggctccagggaaggctgagtgatagggtaatttttctcaactacccagagagaaatgggctaaatgtcaatgctatctccgaaggaatggtgccaaactgtgctttgtagtaatcaaattttgtgagtggcataagaatattctagtcaaggatttatgaggcaggggttgccaatctttactacagattaatcactttatacaggcatataagagaatagtatgtcttctaatgaagacaattaaaataggctttcatggaggaagaaaatgaggggcactatatgtttcagataactccagagttcttttgtgcctgggccagctatttttcaatgagagtagccatgactagttactaagcttaaactttgctttgccctaaaaactgtgtgggatactgccggtccccaaaactgttcagaaagacaaccttgtatattctccctactagcatgaaatcatcccctatgtgagttagaagtcatccatctaattctgtttctgctttttggccccaggcttgtgctctccaaggcttgtgaatttcatatatgtttctcttccttcctgcatcttgagttttctgttattcataaatacataaggcatttgatgttatttcttgtagtaagtcactcgggctaatgtgttatcactgaaaactaacagtacctatggtggaaggtagggagcggggaggaaaaaggaaagagctatcaaaatacttctacatttaggctgggggtggtggctcacgcctgtaatcccagcattttgggaggccgaggtgggcagatcacctgaggtcaggagtttgagaccagcctggccaacatggtgaaaccctgtctctactaaaaaatacaaaaagtagctgggtgtggtggcaggtgccttaatcccagctacttgggaggcagaggcaggagaatcgtttgaacccgggaggcggaggttgcagtgagccaagattgagccattgcactcaagcctggggtacaagagcgagacgtctttcaaaaaaagccaaacgaacaaacaaacaaaaaaaaaacttctacatttcaagttaaactttaaattgaaatgctagtttgggtatattttccaccaagcatgtgtctccaagcagcaattccctatttgcttatgtcttgtaatatcttgaacttgatattcttctaggaataattcctaatgggacaccaggataatcaatgaaatagaaaaaaaattgaaatttaaaacaacaacaaaaaacaaaacacctaggcatgtgccctgattactcaatagagttaatcagaattctggtgaagtcaggtgagcatatcattatttttattgctaaccaggtgattctaatatacagccaggattgcgaatcactgtgatagaaaaatgacatttggtgggatctattcattcacctaggcattaacaaatgtttactttgaaaataccctgtgccagtgactggttgcaaaaaaaaaaaaaaaaaaaatctcaatttttaaggagttcagagactgacagtacagaacagaaagctagacataaaaagcctcctatgacttattataattttttttcctgataagttttataaagtaatacaggtaattttcacatggaactgttcaactcactggaccttatcatataattgttttgaattggaatcacatatagcccatagcatggcaccttgggcagaagatgcatttacaactatgtgtcaagttgatgttcatatatgaagtgacttttctcccataataaattcctttttaaataaaatctagcagatgctgagacagattattaaaggtctgttaagcttatgtacttaatttttgtgtttacagtcttattatatcccctttctgtctgagtagatatatctgcctctaagacagatccgtctctgaataataatggattttaaagttaatctaatcatattatgtttgagatttaaatgcaataatagcagttgcttttgttaatgtaaaattgtattgtaccttcttttgaagtgatgaaaacagaaatagtaacttcagggtcaggaaacgtaatctagacaatcttccacagctttcttgtctacacaacaagaagtttgtttaaaatgggacaagtcacttcatctttctattaaatagaatcatccactaatagcaaggactgtgctagatgtataggtaaaaatgcataaaatgaagtgattttacctgcaaaagaagtagctgaaccagttaggctataagttccttaccaaaaccaaattttattattctaaaattctagagctagaggaggcaagagcatggaagtcctcaaagcaggattttggtctttttccagatctgtgacttgagtaacactctcagcattagtcgttgttctgtataatgttagaataatactgacagtgttattttatatggttctgaagattgctcaaaatgtttgtaacacttttaggaaataaaatttacttggtaaacaataaaaaatgataaggatataactatataatttattctaaattaaatttattctaagtactttgaaataatttaataaggtagggagcaattctcaaactccatatatagtaatcacctgctgtgattattcagccatgtaaactgcatttttaattttcaagatcatgcttttaaaaagcccgttagctgcagataaacaaaaaaatgcatgggattcagtgaactttttcgtttttattttttaacttaagaaaagcacatatacaggtatttgtcactaggtagactattatttttggaaatcagagcatttcccttgttaagggaaactgatttggcaaatgtagatggatggctttttagaaaaacataccatttgatagaaacaaataagtgaaacacccatgatgtttccagtgtcattactattacacatgtttctatcattattgccatcttcaggaagcatactctgcacacaagccaattttgtttgtttgtttgttttgagacagagtctcactctgtcgcccaggctggagtgcagtcatgtgatctcggctcactgcaacctgcacctcccgggttcaagcaattctcctgcctcagcctcctgagtagctgggattacaggcatgcgccaccacgcctggcacacaagccactttctaaacatttttctttttacttggattagagaatgccaagtattctgaattaaaaatttctgttagagaacatcttcttaaattgacagacattaaagtaaacataataataattcacattttcaactgtcatatcagcaacaatttaaacagttgttattctcagtgttgaaaaaatgtgaagaaacctcatatacttctcttcaaagtgaatgtagcttcattattttcagaggcccaatcagctatcagggtagagcacccacacttgtcttcacacactactgtttggcccagaaattctactttaggaatttatcctaggcatacacgcccatgaatctgcaacctttaagtataagaatgtttactgcattgttatttgtgatagcaaaaacctgaaaacacccaattaccaatggcaaaaatagtaaataagtaatggtatatccataatgatatgcagccatgcagccatgcaaaataattgaactgatttgaaatgaagttcaagatatattgataaatgtaaaaatcaatttgcagcactctatgtaaagtactatctcatttgtgtttttaagtgtgtggaggttttctacatatattaatataggtctatagataactatgcagggatacgcttatgtacctagacatttctggaaggatttgaaaaagactgtgtgtgtgtatgtgtgtgtgcataaacatatgtttagtgaaggactttctgcatttcttagtgtttatattgtaagttttataataatgaaaagagacagaaagagttaagatagaatatagcatgctaataaagaaatattgtcttatagtaaaggatagcatttaatgaaagctgttgctaagagaaaaagttttgtaagagtgggacagaagagataatgggttaggaaagctcatagtctgtcgtttttgagtactgaagaaacgatactatgcttgtgtggatgcagtgatttaaatcttgtcatgtatgtaattcagaaacaaaagagtgaagttaacttcatcctgtcttgactgagccactttaatgataagtaccataaatgatatctgccacacgatgtggccgaagatcaatcatttattccctcaactaatattgaaaacctactaagtcctcagtgctatacccgtaagtcaggctctcctttaacaattaggcaattggctcaatcttcaatgtaaagattgaaaaattaaaaagagaaaaagagcagaacactcaactcagcatatactaattgttgaatgaactgaagctattattgtttgcttttccaggtagctttccttactgaatacatgtggatttaggggagggtgatcaagtgctggagcaaacattttcctgattgtactttcagagaaaaatctgtgagcaaataaataatgatataagttgcaaatctcttaatgaacctaaagattcttgccacaaatttcccaatgaatacatatcttttcaatctaacagttttgattttctaagactttaaatttgattttcaatttatactttaaaaaaaaaaaggtcaaatgaattccaactgaaaaagggcatgggaactccttgtgctaaatttgaaatctggctggaaaaattgcagtcctgtctgaacatccattttatcaatgcagacaaaaatgcctacttcactctgttgtcatggggctttgtccttcagtgttgtaatatatataaagcatctagcacagtgcctcatagagccaacgtttaaaaatggtatgtattgtaataatgatgataaggatgatttcatgatgatttctgaaatatagtatattttgattcatttaaaaacacggtgtcttttattcttttaatgtgtctttattttcatttaaaaccaaatttgaaactaaataattctcactcactaaaatcatgtcagagttagatcagcattgtgttaaaaggatgtacgccatcaacaatagacatatgataaatcatttttaaaggagctggtccaacagaaagtgccagcacattatggtttatgctgtctgctgacctttaactctgtatatttaactgtggaaatcggacttaaattattcatacttatttcttttaataatttataatataactttcttttgaagacattagaaatatggaataatgttgctacagtattcaaaataactttttttttggaacaatgctgtatttgaaaaaaagaaatagtttacatgtgttcagtctgtctctccagccgctgtgtctattttgcaaatatataaagtatgaaactggctaagagacatttttggtcaaaatacagatctattttggtatgtggctaaaagtagcttaaataaaaagctgtgtatctaactatagctaaacatttatttctttgaggattattgacataacagaagaggtaaaatttttttcagaagccatgttatgtgaaaattattgctagaatacttcaaatttttaatgatatagaccagataattccagacgatgtaaatcaaagagagagagagaaaaatccatggtcaagaaatctgcattactcaaagcaatgcctaattatataaagggtgggttctgcccctttacttgaagttctggatttttttttttttttgacaaagtctcactctgtcacccagggtggagtgcagtggcaagaacttggttcactgcaaccttcgcctcacaggttcaagtgattctcctgccttagcctctcgagtagctgggattacaggtgcccgccaccatgccaggctaatttttgtatgtttagtagacacaggatttcgccacgttagccaggctggtcttgaactcctgacctcaagtaatctgcccaccttggccttgtgctgggattataggtgtaaaccaccacacccagccaggacttgtttttttttttttctgtcaaatttgtattctgatcattttctgagcatttcctattcatctaaaaattaattcatagcagagactgctgaacagcttagcctggtatcagagaaaactccacggcttgagttagaacttgatcaattaacagacttgtataaaattgtagcttttttgcttttaatattaaagggaagttccttgcttttcaaaatcttgtcatttgacttgcatgatagacaccgtgggctattttttgagtttagatttgaaatgtaaaatattttcaattattgataacttggaataaatacatttgttcttatgattttgccacattttccacttccttttcaaaatgagaaagctctgtggccctcatggaaaatttctccctggcatggaatcttgcaagaaattcagtcacttatgcttgactcctgctctcaactgtaaatcatttttaaagggttacaagttaattttattctttttaccttgacatcaaacaagccaaatggaatattctttcccttccttattaaaatagccaaaatgttcctttaattgtgtaaaaagttgccacttaaacttcctgaagcatgatgagttaaagacaaatatttgagcttttggaaatttgatgatgatattaaataatttcttgcctgatagtgtagtgggttgaatggacgcatgtccctgtcccaatctcaggaacctatgaatacgaccttatttgcaaaacaggttttgaaaatgtaaataaattgaggatttttgagatgaaatcaccctgattaatctagatgggacccaaatccaatgacaagcactcctctaagagacagaagaagagaagccatgcgaaaggagaccgccatgtgaatatggaagcagacattagagtggtgcagccacaggccaagcaacccctggagcccccagaggctgcaagaggcacagaaagatccttccctaagagcctcctgagggagctcagccttgcctaccctgatcttttggctttctgaaaagagaacgattaactttttcttctttcaaactatcaagttcatgatagtttgacatggcagtattaagaaactcatacagctagtaaaacgtaggctgcttacctggaaacacttagatacatgtaatggatttcaacctaagatcaaggtgacttatacgaacaatcccttttccctgttattcgaataagataattcttcattttgagatattactctgacttattttaacattgtgagcagtttttctcagatggagccctgccatgaggcataatcttgtaggcaattcttattgcctgaacaatcaccattttttataaacaagaagatgagccaagagagaagaaagtcatacaagtgtatttcttgcactggatttctaagtagcttgccccagtgccaccataacaggaccatttttttcatttttttacttcatggaaagaaaaggcattgtattgcaatgccggggacagagtagtaaccatagattatgatgtaaattcatctggcatctcttgtgattttaaaacttcctaccttgtgaaaaatcctctattttgtgagaaacgggaagtccaagttaaaaatctctgatactggaaatagtagcagcttccctaagttcactacatgtgcagtgtggaaaaccaagagagagaatacaggaagttgtaagcccactgcttgtcaattcgcttggtacctctgtgtaccagacactgtgaagacaggcattggcaaatcactgaaactagctgtttaagggattctaagtgggactgggatgcagaacagcaagacaggtgcattgggtgcaagtgcctgtggatggtaacagttgagttttattcatgcaggaagtggggttgaagctgaggcctgtgggatgggcagtgaaaacaatgaaacaatgaaaggacatttcctaagatccaaggaaggaagagcaagcaagaagtcattgaaacttcaggctaacatttttgcaggacagggagctgtagtatcatttattccaatctgttgaaattagagtgggattgaaagccttaagaaaaaaaaaagcacatattgattagtttatttggagactaatacagatgttaattcacaattagtaagagatgcctacctacttaaaagtatttagcaacatatttgcctgctaggctgtttttaatttcaaggaggaagggttgtggttacctgatttgttgttatcagcttcagtcgcttgagtactctcttagagttctcacaacgggactaaattggaaatgtaaccaacaggtgatccattaaggacttgagagcagttaagtcttcctttgggatgtatacttttacagccaataagcctggccttactagctcctagtcagtttgcttgccaataataaagcctcataatgtaacagagtgacacccagtagagccactcctcttaggtttccaccgtcaatattgactctagaaagcctcttaaaaaggcatgggattcactattctgttagaaacccttatgggactcagaaagaagatgactgccatgtcttagttagcttggcacaggttcttgaagataatactacttttaaaaacacttttaaattatttcctgaaataaaagagagtcactaaatggctttaaaatttgtgttcagtaatattaatcatctggcatcataatgtatacacatggccagacagttatctctatgatttatgtcctaaccaattgatggaaaggtcatataatgtgtgggaatgagaatgacatttgccagcaagatataatattacataatagactggggaagctaaaatgaaagaatagcgataataatcagtatgaaagcaattcaactttaatattttaaatatattgtaatttttagggaggcatccccagatgtaataaatgcttcagaagactgctctcactcagtaacggttttacaattcagtagcagaatagctcatcgtacaggtcacctttaaaaggactaaatgcacttaagaaacaaaaatgtttattgcccatttgcagcaattgtttctggatgattgtgagatcaatttttaaatggctttatttttagtatcacgggatgctaacactggaaggtgcttagaaaccattccctttcattctctaattttaaagagcaaagcgtcctgccttggcttcttccttttggtcttgctccctttccattcattttcacactgttggcaaagcaagggatctttttaaagccatctgcttaatgtctctcaatggtttctcattacctacagcagcatttgccaaagtctgtgccatgaacaactagctcagcctgttgtaattggcattattttaaagaacagggagttccacaatcatgtgtttgacatactgggttcaacacaaatggtgccttttctgcaggacttctcaaacccttttatagacaatgttgaccaaacttgtttaggcactgaaacttttttttttttttcccttcctcgaagatctcccgggactgacttgtgattcactggcctgattaataaggtccacaattctaagcgtggaataccattccttcaaaactgacccctgccttctggttcaacttcatataccaatgctccatgtttagattctagatcacacttagaaccaactaaagtaagcttttctgaaaagctgttctgttgtatcttccctctggggtgttttggctttgcttggttaccaactacatgggctttccagattcagttccagtgtcaccaccaggaagcctctgtttgttttctctgggtttttaagggttttttaggggttttttttgggttctctggtttttttagggttatctgacctaaggatggcccacagccctctctcctcacttctcaccacagcgggtaccaaatggggctgtcatcctgctaacttgcaggtctcacctccaaaatccccatttccttttagttaggactgtgtttcatcctctttgccagcacactgcctaggacattggtggtgctcaggagagaaccatggacctatgggagggaggaaaggttaagtggcatgtcaggatgacatggctgcatggcatgcttttcaggccagtgcggggacactacaatgacctatggacattgaatccacaactcattataaagaaattcagcaagatgacactatgattagttctaattaattagtttaattactcccatgattgatttcataatgcccttaagcaaattctaaatatatattttgaaggaaagaacaaggaacagaacaacgtagaaaaaagggtccaagactatttttgcatttatatgatagaattaagttctgggtttttttttttttttagtagctaatagtgtgtgagcctattttaatgactgtgtgtgtgtgtgtatatgtgtgtgtgtgtgtgtatatatgtatatatatgttgaacacatatatgtttaagagaaattccaaatgtattgcagctcatatttggatataactattgagtttgtagtgtctgtggtggctttttcatgagtccaggaaacatcagaaatgatttttaccacggatattagttatcttgcctctgctggtgaaactgctattcagttaagcaagcatgtcagttcactgagagccaagttaaagtatgtttttttgatgatatgtagaaaaagaaagtaaaataagagtaaaaattggatttttttctcttaaaaatgtataaggctttctgtgttatctacctcttttgtatggcacattaaaaattggaaataaaaattgaattggacttctttcaaatatagagcattctcagtgtctgatatatatatatatatgccatatatatatacacacacaaacatatatatatatataatctcagtgttcattatatgtaaaattagatacatatataaaataaaatacattctctcagtagacagtgatgaaatgatatatcagatagtaatatcagttattgtatttgactaaaagtgcaccatacagtttcatgattaatgctgcttctgctgaaacattgacccccaaaatattttcaatgaggtatattcattagaggtcttcctgacttctttgagttctgttctcagatgttcctggaaataagtacatagaaaaatagatctttctactattaattttgttttttcaagtaataacattcctagaaaagacaaaagtatttttgaaaattgagtatagaaaaggtttactgaaaataaacgtgaagatgtagcacatagactgaaaagttagtagtgagtctgaggagttggatggcagttaggtggagaaaccaaccaacccaacaggcaagaaggaggaggcagagcatgagtcccagtgccagtggatcattaaccaggaggcagacctcagggtcctgctctctatggcaaaatgcaaggagagtgggagagtttgaattccaagttattcctccactatgttgtggtcagttatttatttcatgaatgtatcttttaatttttaaacttgaaatcacagagaatgaagaatttaaaaaggtttaaattctggccaacatgtaattccaacattttgggaggccaaggtgggaggatcgctggagactggaaggtcaaagctacagtgagttgagatagtgccactgcactgcagcctggacgacaagagtatatatatatggctttaaaaggggtctgttcatgttccttctgggattatataacgttgccttgcccctggaccaggaagtgacttaatgatcacctaaagtcctttgcatcttaccattattattattctttcctcaggtaaagtgaaaattcattaaatacaggatacttttttgtatgttaaaattcaaccacaatggttgtggtcatagtagaaaaaatgttccccaagttatctataaacagaatatggaaagatataacaaaacatttagaagtttcttttgactttttccaaatgacgtgtatttggcttttcaatttttatttttatgagaactttgtttgcctcacacatgagagatttgattacatcatggactgggcaatactggagaacactgaatccaaaaccatgttttatgtaagcatttatgttatccttgcatttcagttttcctcctgtaagtgtaggcgcagtgtttaaggagggaggatacaaaaagatgaattatagaggaggaaaattagcagacagccactggcagcagggggcaagaagccaagtggaaagaccagcagtagagataaccacgtaaatggtggaaaatggaagcaatgaaacactgtgttaacctaacaatcagttttggatttaggtcatcaggctgcgtgtggtagaatgaagatttcacttttatttactaaacactattggaggggtaaaggttgcctttaaacagtgtcatcccattatttctataatagaattgtctcacagaagccctaaatcaaaaatttcactttgggactatgttttattgtatcctttctaaagtagcttggttcccatcaacttgagataggcctaattttatgtcctatctttgactttagtttttgttaagtgtattaaacatcactttttttctgatgaaatgagcaatccagtaaatgcagtctcttatcttgtgcttattaactacagaccacgctggtttaaaatatgaagtggtttatgggacactaaattgaaaccatcttgggtgaaatacatttgaaagacacaacacaggcatgtatcactttattttcatttccgactgtcagcagaaattggagacaacactcttcctttctgtttgattattctattatcgacagaatgaggagtgttggagacatacatgctgatttagtgttgtgctgatgaaaccattcaggttgtgtgatgtgtcatttttcactgctgccttatcaaggtgttttagctgtgcctaaaccagccctggtaattgctttagttgcttgtggcaaagttatgtcaatgtcagtccctaaatgacttggctgcttcatgtcagatgttctctccaaagaaagacagtgtaagggactttttatacctgggtatgggtgttaattcaaagtctaaaaagaaaaggtgttgttttgttcttccccacctaatcaaaactcaaatgcaaaggctgccatttctgttttaaaatgaagagagtacaattaagttcatgattcacttcaagtgtgatcttatcctatattgatagcttttttcccttggtcctaactgtaaatgtgagtcaagtacagctttgaacaagtgcagtgtacaagtagttatgatgtaggtgcgcttccttatgcaatatctgcttaaaacctatttctaatgtttatgcaactccagtgcttctccaaactctttaagtctccagtttaggggtttttaattatgatgatgatgtttggatttgaggaggaatatacaattaaagaggcgaatgaagagtgtttttttccttaaaaaaaaaaacatctatagttttaatagttgacttacaaattcgtgttgatcaagattcagaggcacaaatatatatttatacatcctccacacatgtatggactggacactgttctgttcaccagtattcacaatatgctgtgatcctttttctacatcaattattttaatagttgtatacttcaccattgtataactcttcagattcagcatttgttttgtttccaatctgtgctagtaaaaagagtgctgtaatcagccttttgcatacattttagttcatttgttgaaaaattatctggaaacatttcagacatatatttactgcatcaaacagtatgtccattttaagaattcttaaaaatgtcgtcaagcaaaccctcagactattttaacccatttatatgatcacttagaacatataagaatgttgattactccacataaccaaaactagagatagagtgctttcaaaatcttaaccaatacaagaagtggaaagctgcatcccataactgtttgatttttttggatgtgagagatgttgagtaatttttctagatccaaggactactttttattactatacaatttcagaagataccaaagcaggtcaaagtaatgaagatttgaactgggctttaaaaaatggtgccagaggccaggtgcagtggctcatgcctgtaatcacagcactttgggaggccaaggcaggtggatcacctgaggtcaggagttcgagaccagcctggccaacacagcaaaactgtttctactaaaaaaaaaaaaaaaaaaaaatatatatatatatatatatatatatatatatatatatatatacatacacacacacacacacacatatatatgtatgtatgtatatgtgtatatatacatgtatatgtatatatatacacacatatatatacacacaaaagtcagccaggtgtggtggtgcatgcccgtaatcccagctactcaggagtctgaggcaggagaatctcttgaacccgggtagcagaggttgcagtgagctgagatcacaccactacactccagcctgagtgacagagtgagactccatctcaaaaaaataaataagtaaaaatagaataaaaaaataaaatggtattaggatttggggaatgaggagcaaattcaaatgtgtaagagagcttgtgggcaactgaggtaagctttccagggtagggactgttgagaactagagagtatatgtgcagcatggctggtgtaactttacagccacagccagtagatgataaacttcataaactgacactcaatgttgtcagatctcccaaaatttaaagagaagcttgaaataagatctttatttatacctcctcttagggagtgtgttctgtatgttttgccaaaaatctacctgctctctgaatttggctcatgtactacctttggtaaaccattgatatttatggattgatagggcatttcatgtcaagataacaaaatgaataaaagctggaaaacctgggacaagtttgatagaatgggatggtctggaactctatctcggtgaattgctagagatgaagcgaggtactgtagataagtcaggatagagtgaattgatttgcagactattttaatatgcaagcagagaagactctgctgaatctagtttaaaataaagataagattgttccttcaagtgtgttttgttttgtttatgaaagaattacattagtactaaaaagagagagatgtaagaaggagaagttcagagaagctgttgtgatattctaggcaagagatgataaagtgttagattgaagcaatagttttagtaatttagaagggagaaatgagacaaaggctgaagagggaatttaataatatgttctaagccattgcataaaagatgtctttcactcttgtttcttacattttttgcttctgtgattttaaattgtgtatcgttcttcttataagtatagttatccctacaggggatagtttctctagatgatggtagatgtcaataaatacagagtatattattcaccatttataattggattacaaaggcaaaacagtgattggtaatatataagtgttaatgattaaaggaagttatagtttctcttctaagtcattacaaaggcttattatatataatataatacataataattattcaaggcttcttcagatgactaaagatattggcaatctgggaacaatataacattaatttggcattgaaatggtcggttgagactaaactgtgctcagactgtaaacaaatcatcagcagtggataaagaaggccagaggaccacataaatcacttttactctctttaataaactgtctgtcattaattattggtcacatgactaattacaagggttaaaacagagataagggtaaaatactacccaggttttaaaactttgatgcctagaataactgattttggaggtaagataatttctataaagcatatcaacttgttgagcaggcattacactgtgggtggcccatgggataaaatggataatactgatacctatgtaactaattgcatttgtgttaatatttcaattaaactcaaattttatatattgtaacataatttatccacatggattaaaaaatttaaatactaaaaggtataaagagaaacatctttcccacctatggtcaaaaatttcccaattctcatactgccttctgccactgtctcctaaaagggtagctattctgtttatgtatctgttcactttctctatttacaggcaaaaaatgtgaaattgtatctatattgttcaccattttttttcctgttttacaagaaaagataccataatatgcataccctttcacaacttttttctaaggtggctttatctcttagagaactttgcataccagtacaaggaaagcctacttatgcttgtttatacaatacatagcattccattccatagatatagcatagtctcttttaataattcagtattgatgtagacttggatacttccagtattttgctatgatacacaatgttgtatgtgagcgactatagttgtaggataaattcctaacacatttttagtagttgtaacacctgctatgtttgtgaaataatcttagcatgtctgaatgtaactaagtctaaatagctgtcaactgaagggcttaagttttggctacaaatggtaccagtgtatctggcaacacttaaacctagacaattgtgcaatataaagtagagaccactccctgcagtcagagttaggagctcttttctcttacagacctgattatcttgcctttgtcattggccattcatcccactcacctaccacttcaggaaattctaccctatagctgcctacattttgacccaatagtggtctctgaattatcacatgactcacacaccagatttaaggtggaacggagctcagtgggaagctaggaaattttctgtaactgctgaacatgtcagaatcagtatggaatggacaacctgggtccacctgaacttccgctcttccttttgtctgcagaaaaagaagggcttgattggaccaatttcagtatgagcatctctacactgtctttaactcttgctttttgcagtcaggaagctgtgttagacctcagacctggagaaatgcctctacattctcctgaagagctctattctgattttcatttttgatttatagaaaatatatcgtatatatttttttaatttggaaagaaattgagaaacatattctgaacctagtgttttatggcatgcagatggaatgggtagtatctgtacagatagataacaataggaataattttaaaatgttgtatattatgagattcccttttgtgaaacacagccaagagaaaatgccctctaatggtagataaatatgcaatttgacctagtggcctgtggaccaataatgggaaattcagaagtttaaatccatcaagagaaatgacagctagtagaccatggagtgataaccactctaaagctgatttatacgcacctgaatgtaactaagtagatatgactggaagagtggcaattttgctgctgagtccatatctagacatgccaaaagaaaagaatgcttatttttaaaatgatgtccctatttttaaagtgatataactattttgtttgttcatgttggttttgacctggaatatctctaaaggtcatcttgttatctagtcatattggtacctaaactggaacaaatagaaaattccttatggcacttatgtgcagccatcatgatttcatcacaaacagtgtatctagtcagagacctcaaagtctagaagtttgtgatctttctgaatatttgacattccctttacctcagcagcttgttacgtgaccaagaccattactaaaatggatggtgatttattaatttcacaaatattcgctgagtgttcaccaagtataatttattgtgctaggtgttatgagcaaaaaaaaaaaatgaacaaagcagtcactgtccccaaggatatgtgcacacatattattataattataataggctaaaatgggacatgtgccctcagtgcagacatttcaaggaaggaaatgtagcttccagatggcagatcatgacaattgtcatggaaaaatatgccctctcagtttgtggatatggagaaatagaaacaagggactcttatgggttgaatcgtgttttcttaaaatttgtatgttgaagttataattcccagtacctcagaatgtgattttatctggagataggatgtttacagaggtaatccagttaaaatgaggtcgccactgtgagtcctaattcaatatgactggtgtccttattaaaagggacacagagacacaaatggaaggaagacagtgtgaacagacacagggagaagatggccatctacaagccaaggagagggtcctggaataggtctttgccttacatgccccagaaggaaccgactatgccaacaccttgcttttggacttctaaactgcacaatagtgagacagttcatttctgttttttaagccaaccagtttatggtgctttatatggcagtgttagtaatccaatacagggagattctgagcagaggaaaccagagaaagaaagcctggtatataggtttagaggaatttggctggaatgtgaagtacgcagagagatagcagatgtgactgaaatgggagttgaatgggattaaggagggtcttctaagccaaagctatagaaccagaaatacagagtaaagtctcaaagcaatgcatgacagatgactgataacgcttatatggtccagtctggtcagtggaagaggctgctctcatttcaaagcaactgacctaggccctttctatgtgcccagattcgattctatggccacaagatcctatgccgtggcaacaagaactgggggtatcaatatctccaagtatgtgttattcgtttttggcctccctttttgagagtctttctataggaaacaaagagccattgaaagcttttgattagcagtgtgacacagtaagagctatgcttgaggatgattgcctttgatggctaggaagggtaccagactgggcaagtgactgggaagcagtttcaagaatacaggtaagaaataatgaggttttgaattaggacagcagctgtggtattagacagaggatatggctgtgtcttatgtccacattacatttgtcattattctttggtaactttgcttccatgactgttaaggtgtttctttcgatcttgataagtatgaagaagataactccaaaggagttagagataaggaataaaaagggatatttagctttgtttattaccctttttaatggtattgcagtatgttgcaattccagaagtagaagttctcataaaactaaagataatttgcttataaatattctgattgatatttgacaacttacagaatttatgtggataaatacaggacattgtattacttttgataattctgctatttgaaaaatacttatatatttactgctgatatgcaatttaattgtataacatgggatttgggggtatatgtttgtgaatgcttagcaaactgattaaggaagatacggcaagagctgacaataaaaactaatggtaataatatacagaaatcaatttggatattctatggtattaaataaaacttaattacattatgcctgccactgggtggactaaattcatatttctatgttacctagagtggttaaacatgtttctgaaatcgatcaaaaattgatatttggttatttatcatagcaatttcaatatttcttcagttttaaaggaagcaatccatttaaaatacattttataatgcgagaaatgttcagaatatgagctgacttattggaaatttcagagaaatgtctaaattttctcgaactttaactcaatattacccaaagatatcatgataccttgtgctgctaactagattattttattgtctttatctattgataaatgctacgggttacattgatttttagctgtgttatccctgcaagatgcatttttgtattttctttgagtttaacttttagtaccctttttttgacagctgcttaattgtattgatttttttctaggtcaataataatttagagaagaacattttagtatattttgtttagaaaatattggctcataactagcagtattctgaaaagtctagctacaaatgctacacattcactgaatagactgctagataataagcagacaggagtaaagatttattccaaactcattatctcagaagagtttcccaggaagcagacttaagatgaaaatgcgtttgcagccaatttatggggcagtgtcccaggagcaacgcaacgtctctagggaaagtgaaggaacaaggatgcaaaagggggagttgtactataaggcagtgagaacaataaccccagctgatcctaccagtgatcccactgggtgttttcaaactgggatgcccccatccagccatgagtgcgactggacccttatgcgtacacacaaaccagtctctggacatagctgccctgaaggtgctgtcaggggtttgagctttgagctgccagcaatccccagtagctgggagaaatgagtgcctccatccagaaggaagggtgtaagcggcattccacagcatcctctgcactcgcagctccatatgtctataaaacaactgattttagaaggcacattcagtttctggtactaagtagttcctaataattgaaatatttgctatttagatttctctgttatcagaatctgcccattttctttgaaaaaaaatatatacatctttagaaaatgagagaaaatgaaatcgtctaggctgagcatggtggcctgtaatcccagcactttgggaggctggagctggcagacctcttgagcccaggagtttgagatccaccaggggaacatggcaaaaccctgtctctacaaaaaaaaaaaaaaaaagggaaaagtagccaggtgtggtagtgcacgcctgtaatcctagctacttgggaggctgagctgggagaattgcttggacctggaaagtggaggttgcagtgagctataactgcaccagtgcactctagtctgtgtgaccaagcaagaccctgtctgaaaagaaaacaaaaagaaaaagaaaaagaaaagaaagaaagtctagatattaaatccttaatttccatgtaactctgaaaaataacatttatcattattaagtggttcctatgagtatgtcaggattaatatcagtaaaactgttttcttactggtaactgaaaaaataaaaaagatatttagctttgttcattaccaccccatacaaagatcatttgctgttaagtaactataggaaatactcaatacaatatctttttttggtatttctgctttaatattaaacatatagcttttcttttcaaaattaatcttgtcaaagaggttccacagtgacctctttgacaagacttcaatttatgatactgaatttaaattttaggcatatgaataaggatgaatcattttaattaggacttcatttgtatttaataattatttttaatatatagcaagtctaatgtatacatcttaactggatactgttggtttagtgattaaaacagtacgttagccatcaaaaggcccaaattctggtcctgtatacattttaaattctattctcaattctttgaactatcaatactactgtttatattttgcctgaagtacaatttatatttttacatatatgtgtgttttatttactcagttaagctgtatgctcctttcaaacagaattgtgtcttctttgtagatgaatgcttttacatcttgaaaccttaattattgtggtgggagggtgaagattatttgtttttagtccttttgggctgctataacaaagtattatagattgaatggcttgtaaatgacagaaacttatgtctcacagttctggaggctagaagtctaagatcagggtgtcagcatggttgggttctggtgaaagtcctcttccaggttgcatgctgccaacttctcattgtgtcctcatgtggcagaaagcagacagaagaagcaagctctctcatgacccttttaagggcactagtaccattgatgagggctccattctcgtgacctcatctaatgctatactcctaacaccgtcacacaggggcataggatttaatatatgaaattggcagaacacaagcatgcaagccatgacagatttattacttcatacctctctattctcgattttccactgcaaattttttgtttgtttgtttgtgttttgagatggaattttgctcttgttgcccagcctggagtgcagtggtgtaatcttggctcactgcaacctgcgcctcctgggttcaagagattctcctgcctcaacctcccgagtagctgggactacaggtgcccaccactacgcccggctaatttttctgtatttttagtagaggtgggatttcatcatgttggccaggctggcctcgaactcctggcctcagctgatccacctgcctcggcctctcaaattgctgggattacaggtgtgagctaccacgccaagcctgcaaaatttttaaatgtgttacacaaaacttcaaaatatttataaagattaaaatgaatattttctgctgactcaaatgtcatgttgagggtagcagagcagaaaagcaaaggactgaagttttttataatgtcactgagcaacctaggggactattttattttatttttttcacctttatattcccagctctaagaacagtacctgacactcagttggaacttcttacatacatgtattttaagtaaaaattttattgtaatattacaaaatactctaaatgttaaaaaaaagaaggatagcatttaaaactcttaaccacattatcaatctggaaacatcagggatgcctaaagttaagaaggagccatagataatttatctgcatgtaggacaaacaaaatcctgaaatagtttattatttctcccatttcataaggagctgtaaaatgatgacaaaggcttttctggaatgtcaaaatcattcttttaactgaaaaaaatgcatcatatatctggtagcaaaaaatcactgctttgaaattgacttaatattatgaataaagattttaagatatcttttatttaagtcactaccacccatttccaagttactacagagaactattttaattgcaaaagtctattttctctttcatttgagagtaccagtgtattcatttttaaaaatggtctgtggtaggcagcacaaaggcctcaaggcagaccagtgcctgtagtaggactgagagccaggaagctttggctgttccaggtagcagtgtcagatgccaagagcacctgaaagagctgatgtcaagtctcacgctttgtgaggcatgcccattgcagcctggttgtcaattgccttatatccggggccatgcatgtagtagttccaaatgatcaaggtagagacatttcaattttgctcatactatctccacatggagtgctagttttttgtattttgttatttttaatttcatattggcattatggagcatgaagtgccagagaatgtataagcttaacacctgccatttaaaattaattatgaaacacctcatttaacattataaacacattactctatttcatgtgcttgaaattttattttgaaatgtgggtggtcttatgccacttagcttaattggttggactctggtgctgatgagcctggagtcgctagttgatttttctataaggtcacattagcttcccacagataaaacaaacaaacaaaaaaacaaacagctcttttcctacactgacatttcacagttaagggggcatgttatattttatgaaaaatattttctcaaatatttttccttgcgttcacaacaaccccagtaggaaagattgaagagtatttttatttttatcctcatttttcagattatgaattttggaagaaattcatacctaataggattaacttagttgacagagccagaaatttgctaggccaggttctctgactttaaatctcttctctgttatatcacacaacaactcaaaaactgtagtctgatgttgatgtgcctttgtcccagaagtggttactttgcttttattaactagtcaatttggatagcagttttgataagtcagcatttatcttatattgtgtcctatatgagtacaaatctttatatcccccatgattttgtttatatcacatcactttaaataggtttaacccagttgccttcaccttcaatgcgacataatcaggattaagaatccaacttctgataatactaatgaataatgatttcagaagcatactggataaaatcagaaactagtttcaatatttcaatgatgtagcatttagtagagtattttaaatgttaaaataaatgtgtaaagttgtacatctctcatcttgacaatatcctttggctgtcttgagattaagggtgtttggagtctctgtgatcccattggaaggatgcatgaggcctgctggaggctgtcctgttttcttctgtacctcagtacaacagtctcatgggactaaaatgttttggttattggcatataatcttggtttcactacagcatttatttggtgagaaagaacaatactgtgtcttctgctaccattgactgcctagaactttttcatttttaccaaaatgagtaaacatacattgtgaatcattctttttaaggaattgttaaaagagtcatatatgactaaaaattgttttcaaagttttattcaactcttgccttctacattttcttttgaggtggtgaatatagagagtttacagagtttgaatacttaaaaataaacagtttatagtcacccttttttggtattcttcatttaatgaagaacagtagttttgatgaatagctcctcttgtttttagcaatcaatctttatattctctaatatattgagctgaacatttttatatggagaagaattgagcatattatcccattgccgattttaaagcctatataacattttatttttctaaggtcacatacaataaattaaaatactgtaacaaatatcttcagatatttgtgattatgtaattaatcaagttcatttttgtcaagctggaattctttgctggaatattttcatttcttaaatttcatgttcttgtcatatatgtagaaaatcagtttaatttaataaataaatgcttgtctaatgtgtgtactgaattatctttcttcttagtatataattgttttcttacagaattataattattttctaatcaattctgtccccctcatctctgaagcctttatcctatattcttcatcccaatattaatctggtttatattaggttggtgcaaaagtaattgcagttgttgcctttaaaagtaatggcattacataaatatttgttgaagtaagccaatttatggctgagtaactgagtattgcatatgaatcagtcccagcacttaagacttgtaaggaattgaaagttgaggccaactcattggctgatatttggtgtgctatattaagtagtggttaccaacagtctctgcagcaggaatgcttgggtttaaatactgctagagccatttcttattggccttgacttatttgcttaatctctgttgcttagcttgttaatttataaagatattttgtaaggcttaaacaaattaatatatatgtaaagttcttaaaatgctcccaataagtgctaacatattaatgttatctgttactactatttttaaataggctagttttaccaaacctatcaagaaaggccaaggctactacgtatcatgagaagggactgaatgcattgtctgggctcctagaggcccacttaaccctttcatcccttccgtatattaaggtaccttaatatttcaaagccttaggatttttgtgtgtttggcttttttttttatgagaaaaagtttatttctctcttatacaaaagaagtccagaggcaggcagtccaggtatactcaagagctttcttaaaaaatgagttaatcagaaaaaaaagcaaaagccattcataaaattaactcactttttaaagaaagctcttgagaatatatacaatattggttggattcccaattcattctttagaagccattatttatttgctgtcaacgtttcaatttatcaaccaattgggattatgagataactttgttttgataggagagaggatgtataagatagagtgtggggtggcagatactgaggagttgaagaaataattgaattcagcagctaaagcaagaagtaagagagaccagaaataagcacaagttgagagaagaatgagtagactttattagtgcttagaaagccctttctcatttaactattgtaaaagtcagggagttttggctgttccttaaaaagttaaacatataattaccatgtgatccagcaattttactcctaggtataaatacaaaagttaaaagcagagcgttagatatgtgtgcacctatgttcatcgcagtgtttttcacaagagacagaaggtcgaaacaacccaagttcccatcaacaggtgaatgggtaaacaaaatgcactatatacacacagagaaatatgattcagctataaaaaggcaggaaattatgacaacatcctacaatgtggatgaatcttgaaaatattatttaatgaaagaagacaggcataaagagacaacaattgcatgatttcacttacatgaagtacctagagtgggcaaattcgtagagaaagaaagtagaatagaagttataaagtgctgaggggagggcagaatcaagaattaatgtatagatacacagtttcagtttgggaagatgaataagttctagaagtagatagaagtgatggttacacaacattgtgaatatgtctaatgccattgaattgcacacttacaaatgttaatatggtaaattttatgttaattatattttagcacaatatatttctaaaaatcctatgaggtttgcttgttctctgatttatagagtatctgagacttgcccaggggaacctaggtcatctctatttctactatactataagctgctattttaaacctcagatttacttcagggagttattttctctacagggtttatttttatttttatttggtctaagtctaaccctgcttagtgaaaacacactgagtactcaggtttctatttaatagcacaaatggcgatcccagaaggcaaaaacaaaattaaaattgaagtattatttttaaataaacagcttgctgaaggatgccattgcaaacaatccacaaaactttatttgagtgactatgatttactacttctcagatatgttttttgtcttcagtgaacttaaagtctgtttgaaaatacagatatgtaacaaatgattatcttttaaataaatgttaaaagttatataagtaaaatcttacatgagtgcaaaacaaggagtatcaagcacattaggggggattaataggagattaggagagaaggcacacagactcagacttgagaaatgtatggcattttaatagggaaagcaacataggaaaggcattccagttaaataaatatctcaggcaaaggccagagtcagaaaaacatgtggcctgtttgtaaattgtatgtatatggtcctatttcccatttttctctgtctatccaggtcagacctaaaacattaaatcacaatgactattccctccatatttaaatatttacttcttgtccttatctaaatatttcgccctgtttctaatttgcagcaatgttgcctatgtgccttttattttaaattccctgtaattatttttggaagcagaaaggatattgattatacatttaaatacaattccagtttgtcttaaatcagtcacttaaatcagtccagtgtcttagattagtcattcagcctaagcaggccttatatatagtgaaaccagtatctgttagattgcttatgcatttctgttagaatgagacctacagatctgtagtgatatagatactcaggatgggaaaatttagcatttagttactttaataacaaagaatatctttcacttggttttaggggatgtaactgatgattgcactttgaattaaccttttggaaaacttgcttttaactcaatttagacaatattcactagagtaagaatagggataagtttgcctggagtaaggagctggtattgggttaagctgaagtcaatttttgatgtggatgttgatatataattgacctgggtaatacctaaagtcaaacaaaatttaatttgtgataaataatggctgtgggtggtagtgcaagtcaggaggacaaggtggggtccaaagggtggaaaaggatcattcactaaatttgttagaaagtctaggaccatggacagctccctggcagctgagatgctctgataaagtgagcgaaatgggaaaaaatatatatatatcctgaaatatacccctttatttgatttttatggcctctcactagaattttctgattctaaaactgattttttaattttttttttaatgtttgccatgcctcctacaagatcaggaaacctattcattttcccaagaacgtcattcttttctaagactgcgttactttctagcccgactctcaacatgagaacacatttccacagaaagctatggcaaaggagcaggtagaatttcattctctatgttaaacctataaacttctggttgcccaccacctccaccccatttttatgctgaagcaagatctaagcctggaattgtagccaagatttcctctatgaaattgcaatttcagttttaatgaagaggttattttattttattttatcttaccttttcctatctgcagcatttttttctttttacaaaatgatcatcccaaataacttatttttaattagtggatttcttctttgtcatttagttgttccctagccaatcctcactatgctggagtgcctaaaattgtgcacctaaaaaacaattagtgtatttcttctctctgacccatttttaatctattcgcttcagctttactgtccagagcggttttctctaagttatcccattatcatttatctttccttaccaaataaagagaacacagtaagattttaaatcacaaatatccttttctttcaataagaacacaagtaatttacctcttgcagtgaaaggtaacaaaatgaaacatcttattttttctccagcctcctttctctaccccaaagtcagcagctgctttaagtctgtatattttagttataatgtagagaagtgatctaccaaaagaacttttgtgcatcaacctttgggcagttgagaaattattggttggttatgctcattgtgactacaattgcaagccacttttgcttattcctatatattttttttaaattatctttaaactcctctgtatttatgaaaggaaaatttggcttcttctgtaggattaaaggcttgccatggtttttttttttctcttatcacattgaagataaacctgtttgacgctaatctgataaaagagttttcagagctgatgacttcttgtttttccatgaaacacttttttcagattcatactgctatttcaaatgaaaaaattattcacaccttcatgtttctgaggtttttctaactgaatgtttattacattatacaactcttggttttatttatataaggccaatagcttaattgttgctgtcctgtatgggcctggaagttgacattgactatgttatgataagttatgaaatttaaaaaactttaaaaaggatcttatatgccgtgatatattgttaaatttaacttgttcagtaatcaaaaaatcatgttttagtgagcaaaataatcatcatttagcaagtttcagacacatggattttggaagttttatagttagagagaacaactaatatatatacttcagtacctaccctatcccattgctgtaaaggttgacttatatacaatggttatttgcatcattgaattgccatttatgtaaaatgctgaaattacactttggggttccactcatagaggttcagtagtatgtgtaaagtcatgcggttagtaaataaagttgctaaaaagaaaacctaggtcagtctattatcaaaatcttatgatttttctgcttcactgtgttgccttttgcccatggaataagatgcgacctgaaattacaatttctgtattccaacatgactgaatgaagcatatttctgaaattatgttcccagatttatttcccgtaatttaagaaatttcatgttcagtcaaatgcattttacaatatttgaaactattttaagaagtcagcatttgtttgatgactattaaaatcacagttacaatgtttgaagaaaagtatactataagtttttattaagtcatataattgtttaattacagttacattgacaatgaaatggaacactgttgatagtgaatggcctgcttggcagtctcttatatttgataaataaatattattaactgtaagatagttctaggaactgttcgttagttcctgtgctgacagttactacatttgctttaacattatggatcattagaaaatatagaaattttccttctaccatcttaaattttagtacttattttctcactcttttttcagttaaatttttgatgaggaaagccttttcttcactcactagaatttataaaatcaggtgaagcaaatatttgaaaatttgtatttaatttgaaaatatgtatagtctgttcaagaccttacttttctctatatttatataatcagtaacacataaaatttctcttcttacatctctcttaattttaattctttcatgaattaagtgaataaaagtactctatcatttacttttacttaaaagcaactttgcatggatcactttgtattaaaagcaaatttgtgtgggtcaaatacttgttacctagcctggtttccataaattctattgaactatgatgaatcttttcttgctaaaaagtagatttgaaaaaaaataataaaggactatgtaataaatagcaagatagaggagaggaaatttctggcctctcttttctgctagattgttagcatcttcaagcctgggtgtacattgttgggctaatcaatagtgactagggtgatacactagtcaagggctctccaattgctttaaattgttaagaattatacatgtatcattaacttacataagtcttagtgctttcacataaataacaatcaaggtaattaatacgtctaaaacagtaaaggtagtttaaatgataaagttaacttatctttttacagatgatcatcaaactctatgagaagctattgataaatagtagtatgctctccaaggccaatctgtaatttattcttaatgtgtcattcatatatatatatggagatatatgtgtgtgtgtgtatgtatatctgtgtgtgtgtgtgtgtgtgtgtgtgtgtgtgtgtgtgtgtagggagacaggctcttactctgttgcccatgcagtggcatgatattagctcactgcacctctgtctcctgggcgcaagcaatcctcccacctcagcctcctgagcagctgggactacgggcatgcactactatgcctggctaattttttgtatttatattttttggtagacacagggtttctccttgttgcccaggctggtcttaaactcctgggttcaagtgatccactcactttggcctcccaaattgttgggattacaggagtgaaccactgtgcccagccaacgtgttatattttgaaagaacatttttctttatagtttaagaagcagagcttaggagtactgagaattatgccaattttaagtgcatattagttaaataaaattaattgtttcatgcccaccttctatagatttctagtaaacttaactacttatggaaaaattcactgtatttaagtatgtatgtaagtaactgaataagcttttattctgttaaaactctatacaactctcattgaaatatccataaatgtttcagcatgcctgatataattatacatcatttatgaaggagaaacagcaacacatctgatttttccaattctctctccccctctcttgctcttttattaatatttctgaaataaaaaacatgcaacattccctgttaagaactctgtaaattgtggctggattctttttacttacggcacaatgtttctctttatgtgcatagacagggccctgaaatgcaacgtgaagtggtgaatagagcccatgaggcttgccttcatagatttgcttgatgagatgtttatctgggtgagaaattggttgttgaaaataaggatttccttatagttcattgcctatttcaaaatatattttcccgtatagcttattgtatgttattcaaaagtttcatctctttccacaaaaacatattttaaaattgtgctccagaaggaacacaaattgaaaagcagcagtcaaagttgatacctggactctacaccaactgttgaaagctgttgaaagtggtaatgctcacaaaatgccttacccttgcaagattgcctaatccaagactgaccaatgtgattaaaccgagttacacatcactggtggccttgtgccagatgcaggcttcggaagaataaattgagttgtgttactgtcaccgcacaactttattgaaaacaaggcagtatcagcacctttaggtcctactctcaggcaaacactgaagatgacattgctgaagcttgagttgcctttctttttttgacttaactaacacttgatattccccaggatcagcctcaacaacattcacctatgttgtcattctcactgggccttgaccaaaatctcagttgttctcaattagcctgttttgaaataataaaaaaaaaatcacacctctgttctggaaaatgatgaaaaagtcatccttgtacttctaatcataaacttcctctttagaatggaatctcataacattaaataaattttctaactgctcagaaacgatgcatatgtgagttaaatctgtgctaaaagaataatcaagcttgttcaattagaaaatagtcatagaaatgagtccataaataaataaaattttatgaaatatttagcaatgaaagtttatggaataaactttacttagaagtttactgagcctccactttttattataaaaatacttcctgaaatcaccctaaaatatgtttgctagcagaatgagaaattgatttacttactttttaaaattgtgtttctcagattgacagcagtaggtataatgcaaataacaatattccaacatgttattttttaacattcaataaaaagcacttctattcatttttaaaccaacaaaatagagaattgaaatgaacttgaaaaactacacatgaatattagaaatattaaatattataatttaaatatttatttcaacgtgtactttcaagcatcatataatcctttgatgtataagggaacagtgatttgaaaataacttttataaatacacttttgttttagatactaagaagtatcttttgagtaaattttctctcaaaatacatattggcacaatatttcttagattttttaaaaaatatctttaaacatttccactccaaaaatgcaaaatagtgtaagatgaaaaatggatatttaaaatatgctttcattcattttcctttggtaatcaactcaagctttttcaagctatgtcaaaaatgatgagctcaaaggcattttggaggtgactgtgacattgctgatattaattggtactttattttcacttctattatgctctgcaggttttgaacctattttccacccatttttgttcttatagttagaaggtaggcaggaataaacaaagatgataatgaattcttatctaattatgagtatcatccagattttataagaagaaaataattccagaaaatgtcttcaaaatcaatttaatgcagtgtttgcaaacataaaaatgctaacagcatgtagaaagacttttgacatttttcctttttgaaatgtattcccaaatacatggaaatatgtgtttttaggtttgagataagtctctgcgaacatgctgtaatgagattataatccaagaaaatgttatatttctatgcttatgatttctaatacggcttttcaactggcaaattgtggtaaatgtgcttgataagacagaaagcatcatttccaactgatgtaaattttctcctctcaacttcacaaactttgaatatttagagttttggtattgcttttaacgaaagttaaaactaaaatgtcatgaaagccatggacaggatgaaataatccacatactaaataaagataagcaatgaaatttagcaatccttttctcaatcttagtctaactactatttggactattttaatacaccttttcttgttttatataacttcatcattagctatgaagaataaacaatgaactcatttatactttcttccctccccctttttttccttttttttttaaaaaacaaaaacaaaaaacaaacaacagcaacaaaacttttatactggttacctccataaattttttttttttttttttaggcagagtctccctcttttgctcttttgcccagactggagtgcagtggcaggatctcagcttgctgcaacctccgccccaccgggttcaaatgattctcctgcctcagcctccctagaagctggaattacaggcacccaccactacgcccagctactttttgtatttttaggagaggcggggttttcaccatgttggccaggctggtctctaactcctgacctcaggtgatctgcccacctcggcctcccaaagtgctaggattacaggtgtgagccactgcacctggccacctccgtaactttaaatgatattttaaagctgtatttcttgagtcatcaacttctgaacagtgtctcttgccttcctgctgtatagcccaaggaatccctttctccatacatcttcttcctctcccagtccccaatttgtataggattgcttgatgaaatcatccccgcatcatgttcaggagatcaagctccttagcatgacctgcaaggccctactgataatacctggccccagcctttcctttggatatcagctctcacttcccttcacccattgccttttctctggactcaggcttcttgctgggactcaaacatgagagaccattacctgatgcactggtcattggatgcattgctagagtgcctttttatggctgtttctctggtatttaggattctgatgaaagtttcctctctcagagcacttgctttacatcccttcataaaatagccatgcaccctcactcctctttgttactactctgctttattttttgccataacatttactactatccaacttaattctatatctgttttactaatttgattacttttctcccactaatgtgaactttcacatggccagccattctgtcggtttttgctgttgaatccacagttattagagcaatacctgccacaaatatatgttagacaacgaattagcatagtttacaaaacttaaatgctgttctgtactgtcaattaaccgtccattactttgtccatacgttagttccaaaattttagaactaacaaataatgttatgactatataaatatcataaattgcagagtccttgagtgtgattagatcatacgttgattagatcatacataacactccagaactaagtctgtgccattcaaaagagaatgttctaagcatcaagatcaactatcccttttcttataatccatcaactgttcaaaacaataacatgctttcatctttatatttattttatgattatcatgtgctgcttttatttcccatggaacttccaactgcatttcatttatcttgacaaatgaagtgagtgtggccttcaaccatatctctaaaataatctgattcctaattgtattacttgtcaaatatcctaaagtggagaaattctttaaggagtacgccaaagttgtcatcattgagtcctttctattcatccaaacttaacttctcttcttcttggctctcacagtttctacttcgttggattctttcttcttttattcagcttgagtgcttgtgaggtatgctttggatgacacaactaattaataatgtctttattttgccctggtatatggtgaatgttttgcttaggaatggcttattgtttgtagtccttttcctctagacagactcattgtcattaagcattcttcgttgcaatgaaaagtctgaaacaaatcagactcttgtccctgtggagaactgtttttaattctacgctctatgcctttttgtttttatcttggaaatgttatcagcatgtgtttaagtgtatttttatttttgtttgttttatctattctgctactgtgtgggtctttttttttttttttttttttttttactgtcaggttagggcgtttgttattttagaaaacattttccttttattagttagattatttcctcttctacttgccctttgtcatttgctggattgagtaaccttgtacatttctgaattgatcatctattcttctaaatactcctttcactttaaaaaatatgtctgccccatcttctgggagaaatccttttatttatttacttactcacttaccgatggttcttgaaaatttaaaaaccaatgtatttggctttcacaatccttcttttcccctccctcttttccctctctcctcccctctttcctcctccttcttccttttttctctcaatgcaattttggagttcgtgattatatatcttgacttgtaattggagcagaactactcacatatcggaaaatttgaggtgggtggcttctgttatattatgcattgacttagggagaataattctgtgcttcaagaactaggagaactgaaaagctaaatgtttcagcacaacttttaatgggaacgaagtagaatatccagcagtccatgagaattgactgttcagccaggagcttgaaaaagtaaagagttaattagaacctgggaaagactggcacaagggagggagcccagaaggataccacatactttcctatgcatgagaaactactgacccagagatttcaactctcattttgtgcagccaagattgcgaagtttaagttgacacatttatccatgggtgataaatttaaattaaagagagaaggaagcaaaaatatacaaagggggaattaaaagataaaaagtagcttgtgaggaaagatcaagctataggctctgtgtaacaggatggctttcaatttagggaagggtaaagggaagtggagtggaggagtgtgtgcacatgcatggctgtgaaagaacaggcacgcttcttcatccatgtgacaccactgtacagagaggtggtcagtcatacacagaattaaagtgtcatcttgatagacccatagtcctaaatcatgcctgatttccttttgcccatataaatattatgagattatatagggaatatacgttgttgactttttataaataatatttttcttacttcaggtgtttttcctcaaaagtctttttactgaatataatttacatagatcatatgctttctataggaattgtggtaaataaaattatttaagcaactatggagaagtcctgattctattactatggatatatacactatagatttcaatttaaaaatgattttttcattattgctaacaagtggaatacatgcgtttcatacctatcacactctttttttcttcttagagaaatctttcctaatgacattattttttttcttacttacctttccttggcataacataagctgaacaaacctatgatcagtatcaggtaaactcatcaaatgtgctcttgagggggaagaattttaaaagaaggcagtagcacaaacctgatttaaccagtttacaacatcaatcctcttaaaaatcaaaggaaagacaaaaggaaatattttcaggtgtataaagattacaatgctcttaatactatattaagtccaagaaaaaaatgtggcgcacagttatgaaaacaaagctgtccagcaagacatgccttttctctgtaaaatgaaaccacttcagtttctgtgttttatactgaggatttatcctagcacactggtcagtacattattttatgatggctcactatgactgcatcacttacatccacagaaaatgccaatctttcttagagtaaatcatttccagtcaaggcagaaggacttcaaagcagagtcagtgaaaacagatataaggatgttctacagcaatagccctggcaccagtgtaaacctaccctgctcctcaatctggtgtgtttctctcctttacagaagcactaaccctgaccaatccagcaagacttacagaaatctcctgggctgcctaaaagggggcccaagtgattcttgctgctcctgtctgacctttttaaatgaggaaaatattgattaggagtttttctttttgaagtatagaattaatacatttttggtagtgatacattttatagtaagactgagtaaggtttgatcttacattgtccttgtagtctgcatacttttacttttgtgttatcagttcttcattaggaaaacccagagttcaatgaataattcaaaagcttgatatgaagtatttgatgcttaaacccaagttttctcaaagcaaggatatcatcaagagacctctggtacttgtgactactctgtgactaaccaggtcatttacttggaagagaggagggaaggtcaagattatgtgggacaaaatattcattatcacatccacttagacttgagcaattacaacacaggaatatttgtatttgtttttttatttaggctttcagttaaaagttttttgcagagatcaaatgtaaaacaatttgtacttacactgattagagaaacaagtgcaaatgttagaaattacatatcaaaaaggaaatattttaagaagctcacaaagaataagcaatgattaaggaccttgagaatttgacttacaaggagaggttataaaatatgcacatcccagggacatttctgcatataagcacaacactttaatgaataaacacaaaaaccaaagagaagagttgattatcacattgtgtattatacaggtaaactagagatattgcagatgcaggtctagacaaccacagtaaagcaaacattacaataatgtcacacaacatcattggtttctcagtgcatttaaaatttgtgtgtaatagcattatggattaaaaaaagtacatacattaataaatactttattgctaaaaatgctaatgatcatctgagcactgagagagttttactgttttttttctgatggagggtattgtctcagtgttgagggctgctgactgatcaggacagtggctgctgaaagttggggggctgtgacaattgcttaatgaaagaaaacaatgaagtttcctgtgtcaattaattttcacaaatctttcacaaaaagatttatctgtagcatgcaatgttattcagtagcattttactcacagaacttcttcaaaccctgccaccactttacaaaataagttcatgtaatattccaaatcctccattgtcatctcaacagtgttcacagcatcttctccaggactacattccacctcaagaaaccactctttgtcatcttcaagaagaaacgcctcatcctttcaagtgttttcatgagattgcagcaattcagttacatactcagcctccacttctaactctagttctcttgctagttcttccacttttgcagttacttcctttgctgaagtcttgaagaaagacttcaaatccatcagggttggaatcaactttctccaacctgctgttaatgttgatatttgacctcttccatgaattataaatgtttgtcatggcatccagaagagtgaactctttccagaaggttttcaatttactttgcccagatccatcagaggaatcactatcaatggcagttatagccttatcaaatgtatttcttaaatacaatagacttgaaagtgaaaattactccttgatccatgagctatagatttgatgttctgttagcaagcatgaaaacaacattaatctttttacacatctccaccagagctcctgggtaactaggtacgttgtcaataagctgtaatattttgataggaatctttttttttctaaatagtaggtctcaacagtgggcttaaaatattcagttaaccgtgctctaaacagaagtgctgacatctgagctttgtttttttgtttctagaacacagacagtgtaaagttagcatcattcttaagggccctaggattttcagaatggtaagtgagcattggcttcaactttaagtcaccagtttcattagcccctaatgagggagtcatcctgtctattgaatctttgaagccaggcattgatttttcctctccagctgtgaatgtcctcgatggcatctctttctacaagaaggctgtttcatctacattgaaaatctgttatttagtgtccccatcttcatcaattatcatagctaggtctcctagataacttgcggcagctcctccatgaccacttgctgccccagcttgaagttttctgatagtggagacagcttctttccctcaacctatgaacctctgctagccttcagagttttcttgtgtaacctcctcacctctctcagccttcatagaattgaagagagttaaggcctttctgttgattaggctttggctgaaggaaatgctgtggctggtttgatcttctatccagacccctaaaactttcttcagaacagcaataaggctgtttcactttcttgtcattcgtgtctttattggagtagcacttttcatttttttcaagaacttttccttcacattcagttgactagctgtcacaagagacctagtttggcttatctcagcttttgaaatgcttacatcactaaacttaattatttctagttttttatttaaaataagaaacttctacttgaatacttagaggccattgtagggttattaattggcctaattttaataatgtcactttatcggggactagggagacctgagaagagggacagggacaagggaatggtcagtgagtagagcagtcaaaacacacacatttattgatgaagttcatcattttatatgtacgaggctagtagcaccccagagcaattacaattgttaatatcagaggttactgatcacagatcttcataccagatataataattataaaagtttggaatattgtaagaattaacaaaatttgacacagagatgagacatgaatccatgctgttgtaaaaatggcactgacaaaaggctttcttgacaaaagcttgccacaaaccttaactatgtaaaaaaattcaatatctgcatagtgcaataaagcaaagcacaataaaacaaggtattcttgaaaattctaatggtcaaaatacattctggaaacatgagttaattaaatcaaaagattttagtccaccccccgcccccgttaacaaatgagaaagtaacaaagatatctaaacttatgacaagttaaaaatggtaaatgctatagcacttttagaactatctacttaatatttgaagtttgggggaggagtggtactttgaagacttatccctaggtctgtgattttatagaacagatgaaaagaaactctctatttttagcagccaactgtttaatatcaaacagatgttgttataaccgtgattacaggatttcatttaattcagagcaaaagtatttgggacttaccttggcatgagagctggctttgtaatgatgatagagcacaatttaaacattacaattaaactatccatgaattgtcaaccaaaccaaatgcataagtagccaataatttagggaatttttgtttttgacatagtttttaaaaaggcattatcccttgcctctttgagctcgagcccaatattgcccatatttattgttttcatattacaaattatccctcgtgcccttctgattaacttaaaatcagttcattttcttttcccctttcatgggcacatatatggaagggaagtagctagattattttctgatgtgggcatatatttgtacttacatattaaccagctatggaaaataagcccccaaataaggaagaatttattctgcaaataagccccaaaataaggaagaattagttctgtacgatttctttttgagccacaatgcaaaataaaagctagcaaagaagcatcacgttgtcatgaactaaaattgagagttaaatgattaaagcaggaatatctttaattttctctcaataaccttcatttttcacctttttaaaaatattacatatacttatattttaatattattaattttcttaactgcattatttaaaaaagaattaacccatagtatagcataaaaccatgtgttctcagaatcctattgtttttactcatggaagtcaatgctggatgaaagaaatttatccatctgaagaaaatactcaattttaccttgaaaagttgttacagaaccaaagtgagtctgttggcacatgcacaatgtaaaagcaaacatggaagcactgggtttttgcaatgagccgacttgcagagaaacagcaggaaatgctcaaatctgtctctaccagctgtaggctgagtctattcttataagcatatggcaatgaggcatgatctggttggatcttgtaatgacgtgatgctggatggcatgatctgactggatcctcgccatgtgggtgacaccagggcagtctgcttggatcttgtgtcctaccatgtcatgtccatattcttaattcagtccctgttccttggcctgagcacttagattacacctgtatttgcatacgtggttcctctaggcatgttcaggttatgtgaccttcaacttggggattcatggcaacagaaaaacaactcacaactttggtacataaaatatgaatcagattggtctggagcagttacaaagttactagttttccttttctatatctgcttttgaagtgtattctatatcatgttgtccatacatatgtcatatacaaatacaaatgtagttaatctataggtttggtctcgataagtgctgccaaagtgtagtttgcaaaccaatgctcttctgcaaactcttcctggtccataagaaaataagaatagaaattgagagaaaatgtttagaaacttttatagcagcatgacagagtaattttgttgttgaacttacaatttaaaatgccctagtattttgtcttttttgttattgtaacttaaatgtgttttataagtgtaatataggtttgtgaaaatttggtgagaaaattcgtcttcagcacagaaaacttgagaagcactagttctcaaatcttgggaagactagattcaaggcagctagagggagaggagagggaagctgtgagcattttgcaagatagatgagccaggatggaattaagtagtgtttcagatagttaatggatattggggatcaaaacatgagaaccccaggacagtctcctgacccaactccatgtaattggctctcccaatcctctggccaagtcactctcaccgacgtctgtggcacactgagtacttgccaataattagttactcttctgaatgccccagcatcctttctgtttttttttttttgtatacttcctaagagtaagttgtttttattcccaagtgattttattctagctgtaattttcttgtaattatgtaatttaattaaatattatataaaccaatgaaacatgaatacatacagaaagatagctgttgtttccatgataaccaagcagaatgtcttggggaggctcagtaagtctaattaccaaaaaatggaaaaaaatgtagaatctggtgctgttaagtagctgtaaagtttgccagtagacagtaaaaggtatctacaaggattttgcacatggattctttctcaattgtctttaagttcctatttcaccttaaaaaattaaaattggaaattgtaggaaatgtaaagctggtgtgtcatacaagaaatactattcaaaaatgcaattattagacaactactttaaatatttttgaaaatgcttcttcctaaataaaaagattaagaaatgaatattcacctatttaaaaaacttaccatcttcaccaatttttaaccagttatacccaatcatatcagattaaaagtcttctattataattgtatataggcatttgtacaatttgtatactacctgtcgccaacatatttcaggaatagtaattatctgcatgtaatcactttaataaaacgtttgtttttgaaattcgttgcaacacagaattagatagaaatcttgacagattctcctttgcttcagttaatcactgctatcaaaagccaatttattgagagaaaacgtagctgtaattaaacttctggaatgttctagtcatctgcaagtgtcatgtagggaataactaggcttctggaggaataatttgacttgattactaaatttaaagaacccaggagttggggtccagtcattcattcatccattcaatagtttaataatggagaatctaatatttgccagtcactataattaggttttagatatttaaagaaaaaaaaccatgcagctcttgctcttgaggagcttacagtctagtggcagagacaaatgtggtaacagactagtgagaatacaatttggtaagatatgaacaatggtccttcagaacatgccttgagagtagacaagatgagagggaattgcactcattgtatgtgggccttctctagtgaactgggcgacgtaggtgttgagtggtgaggatgtgaccaggagctatagaaacaatgtttcttctgcttttgttctctatttcctcctaacattatctgcttggggataggcttgaaagtaattttcttctttatacttacctataatttcaaatttaaaaaaatctatcatttccatagttagagttagctaataatgtttgtgagtgctaaataattagaacacatggacacacagaggggaacaacccacactggggctctttggagggtggagggtgagaggagggagaagatcaggaaaaataactaatgggtactaggcttaatacctgggtgatgaaataatctgtacaacaaacccccatgccacagactacatttgtacttctgaagttaaaataaaaattttaaacatgttttttttaatacagctttgagtgttatggacttagtagcatattccatttggtgaagatagtgtttcaagaaaaattggatggtaggcacatgaatacttctagtaatgataaatctaaaacaatgtttctacctcttaagaaatgaagtaggctctcctgtccccatcaaggcaatttctggactgtacatccaggtgttcctagaccaggataagattgctatgcataacaagggtttgcctgaagctgaaatacctaacactaatgaaagaaagatagctagcatcttatagtggagacctttcttttatttcttatttcttgtgatatttttagattcgtcattctgcgatatgtaagagtaacacatttaaggattatattttactaaatgatatttttttcttctagatgatctggtataaagatgtccatatcacagttgagttattccacatgttctggcaatcacacttttgccaccttcggcataattctgataaaacaattagaagtttatagccagtaacgaaatcaacaaagggaaataatatatggcatacaaaggaggaatcaatacatgatatggctaatgtccaattcctattaattttgatgttagctcacatatctcaatatcatacagaaatattactaatacatcatgttgaagaataaacatcaaacaataatgatatcactcatttagcggaaaacattataaatattttgaatataatcttatttcatgacaagtctaattatttacaagatttcccttaattaagtaacatatatgtgggcacttgtatgtgtacataaaatattgtattttaaacacatagtactcaacaggaaaaagcgtgtcatatattttgttttattttagctttcttttaaattttcaatgtactggcatatctttttttatccctgggatgttttagggcctgtttctggcaattatctgctggcagagaatcacatttgccttaccccagcaacttagcaaagatagcaaatactacaaatgtcttaaatggcattgtgctcagtttattaaattttcttgtgtttagagatatctttcagcaatgactttggactttttatcagtctttgaggttttgctgttatcctctgatattcacttactgaagattgtgttgtttttaagtgacattaaattattcctctttatgagtgtccaattcacagtgtgcatgtgaatttcttttctcaagttctatttgtcataaggatttttggcagacattcattggcacacagttttactactgtctttttaacaatgacagatatttaacatgagttcaaagcatatttatggtaagccaggccactaagattgacacttcagtaaaagatgctactgccctcatggactccaatccaactagggaaaccaacttagaaactagtgacagaaactcactcctcccaggtgtgatgctgagctcattagtaacatttgtgcttgctaggtttcagaacacatcttcaaagttaagcaaattgcccaagccacacagggagaaaagggcagagtttgagttcacaactttctgactccaaggtatgttattatatacgatgtattgaaggatatcatgcccattatttctcaatgtagacccagttaagatgcacaaattaagtgagaatattattttgcaaccaagaaaataatttccattgccatttttagcatgttacttattatattactaaagcaagtgcttcataaaacaagaaagaaagtaggttataaggtggatatcaatctagcctgcctttcttccaacctaaagtttcatggatagatgaaatttaattaatctttaaaatactgttcacatcttcacttcttaaccttcccaagacttaataaccttctgtgtgtggctgttctgccttccatctaagttacagacattccttccgtatagagattgagaacatctggttaacaccctcttggtaataaccttacatatttttttttgcttttaaagtagaattaggcagcattattcttagaaaatgacatttttatattgaagttcctttagctccatgacttttgaatatacacttctgctatggctattagacatttctctcttgagaggtttccataattctgaaaacatcctttcttcctactgaaattctgttgtcaattactttgtttgtgcagctgagcataatttgtcttaaaatgaaagcaggaaattcagaaagagatttggattctttggtgtttcatcattattggaaaaaatacattgtgtatctccaaactgggactttgggtttactcaacagtgttaaagataaatagtgtcactaagtgtcttttagtgtcaggcctattttggatgtggttctcttagttaattgacagagaaaagatttgagtagtttacacttggctggttaaaaaccagattcccgtcaggaagtactagcatatttttcaaattattaacagaaaatattataaataacagttcaggactaggaacaaacataattaaaagcacattcagaaaggctatataaataaggtccatcaattacaagggtttacatagcttacttccccttgcttgtaaattaccattggaatgaatggtttcaatttcattttcagtggaaatacttacattcatggatagagtattctaggaaacaaaaataggaagatccttttggttgaagggcttcttttcttgaatgcatattttgaattacatgaacataattgaagtaattaaaaattggtctggtaaagaagaaattattgtaatactcttgaacaaaagtaaatgcatctctaatattgttagtgaactccacagaggattactattaaagatagtatgcatatctgtcatttaaaaggtagcacctcaggtggactttaaatgacccaagggtatcttggtacagagcactaggagttgggaaatttagttcatgtattttgcatgttcatcctgccaaatctgtccaagatatcacatcttgtgtagtgaatcaggcagatatgatccttgtgatgtacacagaaaccaataatggtatgtgtaggagagcaaaacacaatggtgttccaagaaacagagccagcttcctcatctcgtctattaggaatcgttatctgtccactggctcctataagttatcattctaaatattttattattttgttcttaaaatttgactattcctcagttttttgccttgtgtaaattaatttgtcatttaaagtccccccccccaaaaaaaatatggtctgtatgaagaaacttatagaaattatagtgtagaattttctgaagggtttgaaccattataattttaagtaatagcctctaatgttgaaaattaaactagcctattttcctaaatgtgtaaacatgcttattgtgcataacttaagtactcttgaaggtaggcaaattataaattgtaattaaaacaccttaagataaacaatataatcatatactcaatgttaaaaataaattacttattagaagactgaaagcatttctgttcataacttgttcattctttttccacctttgccccaaattattaaaatcacctgaatatgaccatatgtttaaattcattacagattaatgaagtgcagctaaaacaaggctgagaaattataagtgataagctagagataaggagtaaagccttccaagttcaggtgacaaaatggtacatctgaaagaagagatgacattaaaactctaactaaatgttttcaaggtcttgtgtagctgtttctgagtttctggatgtgactcacagttccacatggctgaggagacctcacaatcatggtggaaaatgaacatggaagcaggcaagagagagcttgtgcaggggaactcccgttcataaaaccatcagatctcgtgagacctattcactatcatgagaacagcacagcaagaacccgcccccaagattgaatgacctcctactgccctccctcacaggacacgtgggaatgatgggagctacagttcaagatgagatttgtttgggggcacagccaaaccatagcacattcagaaagccagcataatgtcatggtatagataaaatcagacataaatatgtcatcccatctaatgtcttttttaaatttttttttttggtctaagaatctccagttgttctgtattggacattcttggactctaatacaccttttattctagccaccagattaagtcaaaccaagagtcagcttccttagctgcactattctgctctaattttctgccccagggcatttctgacaagaccactggatactggcaggacatcttcctttattcacccaagcatagcctggaaagggataggaactaacatttaaaatggcaacccatgattatgagaattggagaaaaaatgcccccctctctgtttcttggtaagacaattcacaagtacattatacatggttccttagaggatcatggtgagatcaagcccgagttgcccgctgtgtagactaactggaggacacacttcacattgattttccctccctactgatgcatgctacctccctcactcttgctacttggcatcacttttcaaaggaaaatccttgcatggcagcctgtgttccaggctctgctttcaagagtcaaggagcacaggaaaccatgtctcacaatatttaaggagtagtccgctctatcatgtctttcatatagcagcattttatcagatgcaaatccttatgatttatataatttgctcaccaagttgacactaaaaaatatatggagtaatgcgcaaaaatgccaagacactattgacaaagaatgagagagaagatatgtcctttcagattaaaaactatcataatagggcaatcatatgaaatataaaacattgaaccccaaatagaccaagttaatgaaatgcagggaggtagcacgcatcagtagggtgggaaaatcaatataaagtatgtcctcacctgtcccctgtgtatcaatattttgttttggctttgggtacctagtttattaagtgataataatctgatcaaatgatggttttgcctatcaagtctgcctgtcttttcctgtgtgaacaccttgaataaaatagaagactgtgccccttatatgtatgatcaaatttacctattaaaataatttttggggagtcctaaatggagtgtagtttttctatccaatatttctgatatattttgtcctgttttttttctcttctgtgtatgcctacccaatttatattaggtggtgtaaaattaataccagtttttgccatttttttaagtatgacaataaccacaattacttttgcaccaatcaaatattttcctggggaacaaaatcaattccatttatatttcctgaaatattaggacaagactgctaataatatatatttcagaagataatagcgtattttaaaaattgctaatgtattaagccgcattttaaaaaaatttctaaaagtaggcaacatacagaatgtattttcaatcaaaatataataaaattatatattcacttcaaaagaattggcaataaatatatatttatgtatgtatttattaaaaacctcttagcaatttaagagatgtatctggatggctctttgattaaacagaaattaaaaacataaattttaacattttagaaatggaggtgcaaaaacacattttatccaaaatataggattcaatattaagattaaaaatttagcaataaatgcaattactggtaaacataaggactaaaagtaagtgagcaaagtagtaaactctaggagctacagaaaaaattaacctaaagaagtagaaaggagataacataaaagcagaactcaataaatagaaaacaacaaagtaaagttgttaataaagcaagatctggttcttttaaaaagccaataaaatagacaaattactgccaagactaattaagaataaagatgagaaaaataaataacaatgtcagaaacaaaaaagggagagaataacacgtacaaatatatttattttggatttatttatctatttataattggagacagcagcttgtgctgtcacccaggctggagtgcaatggcataattatagctcactgaaaccttgaactactttcttctgtacagtacatactttatgattttatgtcattactagaaaatgagaatcattctggaattgatttaaaaataacttctagttctatatttagtgatgttaattgcccatttgtaaaaaaaatgagctgtttaatactacttaatgtaaacttcatgtaactacagcagtttatgatatttttatatcagcaacacttattctacatatttggtaacgaaggtggtatctcaggctagcagctctaacagcacctgggagagcattaaaaaggcaggatctcatgcagaagaatgaaattggacccatacctttcaccatatacaaaaattaactcaagatggattaaatatttaagtgtaagacctcaaactataagaaccctagaagaaaacccaggaaacaccattctgttcatcagccttgagaaagaatttatgactaagtcctcaaaagcaattgcaacagaaaagcaaaaattgacaagtgggacctaattaaactgtcgagcttctacatagcaaaagaaaccatcaacagagtaaacagacaaccaacagaatgggagaaaatattcacaaactattcattcaacaaaaatctaacatccagaatctataaggaacttaaacaattgagcaaatgaaaaacaaccccattagaaaaatgagcaaaacacatgaacagacacttttcaaaagaagacataatcagccaacaaacctatgaaaaaatgcccatcatcactagtcatcagagtactgcacatcaaaaccacaatgagataccatctcacaccagtcagaatggctattattaaacagtcaaaagacaacagatgctggcatggctgcagagaaaaaggaatgcttatacactgttgctgggaatataaattagtttggccactgtggaaagcagtttggaaatttatcaaagaaattaaaagagagctaccatttgacccagtgttcccattcctgggtataaatccaaaggacaaaaatcatactgatgctgggcagacccttggtccttgagggggtcatgggagatgggttcttgattttgtacaagaaggaattcaggagcaaatcacaaggagaaagccaaagtaaagtttattggagtgcttctccacagatggagcaaggcagtctcagagagaagacatgctgggagggtcttaggtcggcagtgttactatgtttaatatgcataattagagggagggttattcataagcttttcatggaaagatgcagtgatttccaggaaccagggaacagtcccttttctttatcatgtagggcttttccagtggttgccatggtaaacaaaaactgtcatggtgacaggggtatatttttactatggaaatacagtataattagcatataaggagcaatgaaggtcagttttgctgccatcttggttccagatggtttaggctgatttctttactgtatcctgtcttatcagtgcggtcttgtgacctgttgtcttggaaactagttctgctgaatttctatctcagtactaccaaaaagacacatccactcatatgttcatcacagcgctattcacaaaaacaaacacgtggagtcaacttagatgcccatcaacggtagactggataaaggaaatatggtacatattcaccgtggaatactacacagccataaaaagaatgaaatcctgtcctttacagtagtatggatggagctgaaggccattatcctaagaaaattaatgcaggaactgaaaaccaaaaaccaatattctcacttgttagtgggagctaaatattgggtacttgaggacataaagatggcagtaatagaaactgagtactactaaagaggggagggaaggaggaagggagggaagcaacggtggaaaagctaatgactgagcactattctcagtacctgggtgatgggatcattcataccccaaacttcagcgtcacacagtataaccaggtaacaaacttatacatatatcctctgaatctaaaataaaagttgaaaacagagaaagatatcagtttcaagaatatgaaatatatgagaaatagtttaattgtaagctatgcgattatgaaccattttacttaaattctgtattttctcatgtgcaaaatgggaatggtgattattttaaactacattggcatatcatgaggattaaataatgtatgtgtaaccaaaaaaatacagaatctcaagcctcactcagtcctacagaattagaaatgtattcgataagattgccaggtgtgatctgtatgcacattaaagtttgagaagccctgtctattctagatatcatatacagtcatgcattgaataaggatgtttcagtcaatgaaggactgcatctacaatggtggtaccataagattataaaagagctgaaactttcgtatcccctcgtgactcatagctatcataacatcataacacagtgcattactcatgtgtttgtggtggtgctggcgtaaacaaacttactctgctgccagttgtataataaaagtatagtacttagaattatatacagtacatactacttgaaaataataagttactatgtcactaatttatgcatttactatactatgttttaatcattatttcagagcgtacacctcctacttataaaaaataaaagttacttgtgaagcagccttaggcaggtccttcaggaggtcttctaggagaagcattattgtcataggagaggaccgcttcatgccagcttcaggtcttgtccctgaagaccttccagtgagacaagatgtggaagtggaggacagtgatattgataattctgaccaggtgtaggcctagggtaatctgtgtgtttgtgttgtagtttttaacaaaaacaaaattaaaatgtaaaaaaaaaggaaatagaaaaaaggatatagagttgggatatacagaaagaaaatatttttgtacagctgtacaacgtttttgtgttttaagtaaagtgattttacaaaagagtcagtaagttaaaaggtttataaaataaaaacattacaataaactaaggttaatttattattgatgaaagaaagtttataagtctttgtaagtttagtatagcctaagtgtacagtgtttatagtttacagtagtgtacagtaatgtcctaggccttcacattcactcatacctcaatcactgactcaccaaatcaacttccagtccttcatactccattcatggtaagtgctgtatagaggtatactattatttatcttttataccatatatttactgtatcttttctgtgtctggatgcacaaatacttgccattatgttacaattgactacagtagtcagtacagtaaaatgctgtacaggttttcaggctaggagcaacaggctatataccatgtagtctaggtgtgtagtaggctacaccatctaggtttatgtaagtacacactatgatgttcatacaaggacagaatcacctaaggatgcattactcaaaacatccttgttatgtgatgcatgggtgcgcacacacacacacacagtgtaacaaaaagttgaatgcttaagaccagaaaaaaaaatctactttttaatgcagatagttcaacttgagtactgtagttattctataaataaaaggtccagtttaccttcataatgaaagcatatttatttggtttttaaaattagagtcttctttaaaattctgatttaagtgtaaataagttggaaaataaataaatatgtaggtgtgtaaataaaatctacctgaatgtccttgaatgtaattataatattatggaaatgacttcacagtgggtaatccttactattgagttttcaaaaagcaggggaagaaaaagtcatgtggaatgaatatatgtggataaaaatggcatcatctattaaatatatgcctaataattcctggcatctcttttataacatgatgctgatttcactcagtttatggaaaacaactattattttttagttattattatttaattatactttatgttctgggatacatgtgcagaatgtgcaggtttgttacataggtatacatgtgccatggtggtttgctgcacccatcaaccagtcatgtaataggtatttctcctaatgctatccttccccttgccccccacccctgacagaccttggtgtgtgatgttctcctccctgtgcccatatgttctcattgttcaactcccacatattagtgagaacgtgcagtgtttggttttctgttcctgtgttagttggctgaaaatgatggtttccagcttcattcatgtctctgcataggacatgaactcattcttttttatggctgcatagtattccatggtatatatgtgccacattttctttatccagtctattactaatggacatttgagttggtgccaagtgtttgctattgtgaataatgctgcaataaacatacgtatgcatgtgtctttatagtagaatgatttataatcctttgggattatacccactaatggaattgctgggtcaaatggtatttctagttctagatccttgaggaattgccacactatcttccacaatggttgaactaatttacactcccaccattagtgtaatatcatttctatttctccacatcctctccagcaccggttgtttcctgactttttaatcattgccatactaatggacatgagatgatatctcactgtggttttgatttgcatttctctaatgaccagtgatgagctttttttcatgtttgttgggtgcctaaatgtcttcttttgaaaagtgtctgttcatatccttcgcctacttttgatggggttaattatttttttcttgtaaatttgtttaagttccctgtagattctggatattagccctttgtcagatggagagattgcaaaaatgttctcccattctgtaggttgtctgttcactctgatgatagtttattttgctgtacagaagctctttagtttaattagatcccacttgccaattttggcttttgttgcaattgctcttggtgttttaggcatgaattctttgcctattcatatgtccttaatggtattgcctaggttttcttctaggatttttatggttttaggtcttacatttaagtctttattccatcttgagttattttttgtataaggtgtaaggaaggggtccagtttcagtttgcccaatggcatttattaaatagggaatcctttcctcattccttgtttttgtcaggtttgtcaaagatcagatggttgtagatgtgtagtatttttctgagacctctgttctattccattgttctatatatctgttttggtaccattaccaagctgttttggttactgtaaccttgtattatagtttgaagttaggtagcatgatgcctccagctctgttctttttgcttaggactgttttggctatacgggctgttttttggttccatataaaatttaaagtagcttttttctaattctgcgaagaaagtcaaaggtagcttgatgggaattgcattgaatctataaattactttgggcagtatggccatttttcacgattgattcttcctatccatgagcatggaatgtttttccattagtttgtgtcctctgttatttccttgagcagtggtttgtagttctccttgaagaggtccttcacatcccttgtcagttttatttctaggaattttattctctttgtagcaattgagaatgggagttcactcatgatttggttttctgtttgtctattattggtgtataggaatccttgtgttttttgcacattgattttgtatcctgaaactttgctgaagttgcttatcaggtgaagaagttttggggctgagacaatgaggttttctaaatatacaatcgtgccatctgcaaacagagataatttgagttcctctcttcatatttgaacatgctttatttatttctcttgcctgattgccctggccagaacttctaatactatgttgaataggagtggtgagagagggcatttttgtcttgtgccagttttcaaagggaatgcttccagcttttccccattcagtatgatattggttgcatatttgtcataaatagctcttattattttgagatacgatccattgatacctagtttattgagtgtttttagcatgaagtcctgtttaattttatgaaggccttttctgcatctattgagataatcatgtggtttttgtcattggttctgtttatgtgatggattacatttattgatttgcatatgttgaaccagccttgcatcccagggatgaagccgacttgatcatggtggataagctttttaatgtgctgctggatttgggttgccagtattttattgagaattttcgtattgatgttcatctgatatattggcctgaaattttctttttttgtgtgtctctgccaggttttggtatcaggatgatgctggcctcataaaatgagttagggaggattccctctttttctattgtttggagtagtttcagaaggaatggtaccagctcctttttgtacttttgatagaatttggctgtgaatctgtctggtcctggttggtaggctattactgcctcaatttcagaacttgttattggtctattcagggatttgacttcttcttggtttggtcttgggagggtgtatgtgtccaggaatttatccatttcttctagattttctagtttatttgcatagaggtgtttgtagtattctctgatggtagtttgtatttctgtgggatcagtgatgatatcccctttatcagtttttcgttttgtctatttgattcttctctcttttcttctttttggtctggctagcagtccatctattttgttaatcttttcaagaaacagctcctggattcattgatttttgaagggtttttcctgtctctatctccttcagttcttctctgatattagttatttcttgtcttctgctagcttctgaatttgtttgtccttgcttctctagttcttttaattgtgatgttagggtgtcaattttagatctttcccactttctcatgtgggcatttagtgctataaatatccctctaaacactgctttagctgtgtcccaaatattctggtacgttgtgtctttgttctcattggtttcaaataacttatttatttcggccttaatttcattatttacccggtaatcattcaggagcagattgttcagtttccatgtagctgtgcagtttttagtgagtttcttaatcctgagttctaatttgattgcactgtggtctgagagactgttatgatttccattcttctgcatttgctgaggagtgttttacttccaattatgtggtcaattttagaataagtgctatgtgatgctaagaaaaatgtatattctgttgatttaggatggagagttctgtagatgtctattaggtccgctaggtccagagcttgaattcaagttctgaatatccttgctaattttctgtctcattgatctgtctaatattgacagtgggttgttaaagtatcccactattattgtgtgggagtctaagtctctttgtaggtctttaagaacttgctttatgaatctgggtgctcctgtattgggtggatagttagctcttcttgttgaattgatccctttaccattatgtaatgcccttctttggcttttttgatcttgttggtttaaagtctgaaaacaactattattattaaaaggaacaactttatttgcttttagagtagctgattaaagtaaaactaagagaagggatgaattgttagaattttgattacttcagacttgtttcttcttatccataagtgtggcaaaatgcaaacacaaatttgctgatgagattgatgaaataaagagtctccagtactaattaaaattaaaaaggatgaacagatggtcttaacacagctggaagtattaggatgaaattctgcccgtgtgtttagtcagacagcacagttgcaagaaagccacacctgtttacttttctaagagcaaaaatattattaaatgtggttttgatttactgctattttggctattaaatcattccttagtccttatgtgtctgtggtatcgagagataatcagctttaagtaacttaatagtatacatgtatgtctgtgtttctttctgtctaataatattgatcatgacatccacatattaaggcaatcttttgctacttatgcgatttttgtggccacatagtcaaaacaccgatggaaagggtgaaaaagaaaaataataaatattagaatatgcatttgctttgaaaaattctaagtaatgttttcagatttttaatatttaagataatcctctaagccttactcattattcagtgtcttggaatttttgacaatatacagcagataaatgattttaaatagcttcacttaagtactttaataaataacattgttttatggtattcttaataaatagtaaatatgcaaaaaaggaaagtttaaagattaagggataatattaatgtagaataatccttcaattatggccattttaacctttcattaatcatgcctgaatatttttatatgtagaggttccttttatatatacttgtaattaggttctacatacaatattatatttcattcaccggtatttattaagtaactaaataattattgagacactattaccagaaacagcatcaaacccaaacaagagtaatatgacaaatacttccaaattttactggatttttaagtatttaaattaatttgtttaatttaaaggaacgaagtgtatgtattagcccttagattagtaagacctaagtcttactagtgcccccatcctcttattttaataaatgtaatttgtctgtttacctatcattgaagagtccccatatggctggcataaagatttttatttcaaatatcaaagaagcatcaggaaaattgttactttgctttctgacttacatattgtattcaattcctaggactaccatagcaaagtactacaaactgggttgcttaaaacagaaatttattctttcatggttcttatagctgcacgtctgagatcaagatgttgacagggccaggctctctctaaagtcactagtggtgaatctgttccctctgttccattcctgcaattcttggtattcctcgacttgtagacacatcgctccaatctctgcctccatcattgcctgtccctcttcctgggtgtctcttctcctcttcttgtaaggacactagtcatattggattagccactccctgccacttgagacccccatgacctcatcttaacttgactgtgtctgtgaagaccttattttcaaataaaatcacattcacaggtattaggggttagtaccccagcatatatttttggagaataccattcaacccataacatacatttctatttgacaacatttagctcaatggcaataatcttggtaattactttcttaatataaggatgctttactttttaaaatccccttgcctcttttacctaccaacagtgcattgttgtaggtagagctgatattgctacaggttttactgatgaagatgagaacatatttgcagaaagccagcctttgttctggagcatccaggatgcattacttgtgttttgatgctgatgtttcctatgggaggcagtttctgatgtgtcttttcgtgatctctgtaccctggtgtgcataccctgctgtaatccccttactttaaggatggtcttacctagcaactcacttctaatgaaggatgtacagcaaaaggagcagtatatgatttcacatcagattgcaaaaactgcttccaagccaagccttcagataactgcagcttggcgagagtcccagagccgcaggagtcaactaagccacactaaaatttctgacctataggaactgtggcataaggaatcttgttctaagctactgtcttttggtgtcatttgttatccagccatggataactgatagacttcttcatccacatctgctacctgtagtcaaccaaagcagttttatacaaaggtactattttctggctttttattccaaccagatttcacaatttttttgagtgtgggtgtagaggatggtgaaatatccatggaatagaagattgttgaataagaaagtcagaggtagcaaggaaaatgtgtatttagttcaaaaaaatcctatcaacctagttgtatgtgttgataataaagatctctctgtctttcccagcaattcggatcaaccttgttaaggttgaacagagacagacccaggtgtttgaatggttcatatttgtgttttactcctaagggtgaagcacctgtaatttttagggcttaagatatcatcatgaaaaaaattaaaagaggatttttaatggtgaatggagatgctaagcttgtttaatggctattttttttttactacaagtaaataataacttattttcataagcttttaccgatggtactggccatgctagcttcagattccctgactaaattttcccatgtagggacagcagttgcttatagtagatttggtttgcatcacaggtacacactttcagtttgaagatgtattgctttcagggggagtttgttactaatgttcttcttgattcatcatttaaacaaaattaaagcatgtaattttgttcttctgaatttactgtgactctcagcaaaagctatttgttgatcatttctgctgatgaaatcagcaaatcctgtggttagactgtttgattacttctatcttatactttctcgtgagattctgtttcaggaagcaaaaacagtgaattcttcatcttatatgtttgttttaatgaagtgtttctaaataaaatttctggtacaacagagaaattatattttgccatgatctcaaagacatcaatttctgttatcaccagacttcaatttaggtgatcgttttttggtgattaatgcccagatttagaagtaatctgagaaataaagattcaacacaccttttctctaatattatgttgtatttcttttccctggtacattttgttatacttttggatcacttactgagatttatttacctaaaattgtgcatccttggcatatcactttaaaggtgcgatcattcattgatgcacaatttatcttgatttcatagcagtatgatgaaaatccatcccttagagatgttacatccgtataaatgagaacgattttatcatcttctctaaaatgtttgctcttgttgcactcatggatttaaggtgctatagagaatgaaactaattgtatctctgtgaaacctaacatttaaaaaaaagtgccttctgtgcactcaaaggcaagatttgatcaataatgatgtaacctatacagttcaatgctcagtcttaaatcctgtgttgtttacctaaagaagctaggtttagtcatttttaattgactttaagttataaaattaccttgaagagtagaatcaaaatttcaaatatccttaaaacttgtgagcaaaatcaaataatattcagtgagtggaagaacagctaacattattgggagaaggccatgtagtgtttttgctgttttttaattgtttttaagtatcacaaagacaaaaatcatctttatctcatgctcttagtagtctttgagtttactcttggttgtaaggccttaaaaagatttatcaagaaccaacataataagccagccacttatgatgaaactccctttctcctaaaagcagaattagagggagaaatatcaaataaacaaaagaatgcttctcagaccctttctaacctgctaaatctagttatttagattatagagcttgaaataaaaaagagtagaaaattttactccaaaaaaatagagagagtagatttctcagagggcccccatgcccggtaaagatttggtcagttcatcttgatgcagtttacagtttatacagccccaagactgtgcattaccaataatcatcaatattagagtcattaagttgttgtactttatgtttcctctttgtccctattaatttgttaacaaagcatctatatccaatagatgatttgtttttaaaactagccatttgtaaaataccaaaaataccaaaaataaaaagaagaaaatcagtgttttccacacatgcactattaaataatttggtgaatggataataaaatacattcactttattttgtctctttagataatctagcaagtcagtaaatttttggccaatagaaaacaagacagactttaacaatgggtctgtattaattagaatgctttcattttgtcccactgaaaatgtagtggcccaattaaagttcatctaatttatatttagatatccatagctatcattcacttcatggaggacaacaaatgcaatcagatgcaaaataaagactttttccttcatacacacacacacacacacacacacacacacacacacacacacacacacatatcaagcaaatgcccacttatggaggctatttatttttcttcttggtggcactgtttgagctctctgattcgtgtatcgaacatggtgacatatttacgtctgtgcattcatgtcagtcctttcggaggttctccctgcttcctagcagactgtttgaaatagctctttgtcagtttcagtttacacccataaaattggcttcaagtttccaccttgtttgaaactccctggccaataaccttcctaacccaaaccagatgtgaaaaagttcatccaaacagttttgaatgtgttgaccttgtccacatattacagagtaggggtttgtaaaacctaatctaaaatcctattttccttccctcggggtatgtcagagaaaatttcataacccttctaaggtcagatgtatgtagatctgcaaatctgtaacatctccactttttttctaaacctgttttagttccttgggaatcatccagtgtcctctgtcctcccacctttttgaggatgggcaattggaatgcccgccccctgcctggaatttttctgtggttagctaagtaatttcttttttgtagttatccctgcacaatggcctccatcttcccattcatcaagagtcacattcttccaatacaaggacaactacccacttaggactagaacttaatgtcttccacctgtaagaggctttgggctgatggcctcctcattagcatgctcagtgtaagggatgcccaaatggacttgctccctgaaattattttcttgcaggataatgttgatgagagaaaagtcttgtttgcaaaatcagctggagtttatatgttgatatatttatataaatagggctccatttactcattgttttatgcataattgaatattggggacagtcttgggaaaaggttttaaggaacaaatatttactgacacagtgacactgaaaagagaaggcaagcattttacctactggcatgtgatttcattttgtggagcacctaagtcgattactgtaatcagagagatgtgtaactctgaagataatagtaataatattttccactaaaatatactgctcttaccatgtaaagttgaaagctttcaaatatggactctgttcaggaattgtagaagagcttaaactgaccactggctacagaatattgcatttttctttctgtctgtaattcttctatagatttgattacacaatctccccacaatctatccacatttcatcactccccaccccatttgccctatctggcccacatcatctctttcctggaccactaaataatctcctgagtggtctcccagcttacactcttgcccttccccgtggtttatgttttataaacagccatagtgatctcttaaagggaagataataaatgttttgggcttgtgggccatattatctaaatcacatctactcatctctgatgttataacatgaaaccacaaaaccaagcatgaaaccagccacaaactggtttgtgcataggaaagtgcatagctgcattccaataaaattttatttacacaaactgatggccagccatttggccagtttgccaaccctgttttaaaactaaatatcaggatgtgtcactttcctgtctgaggccctccttggtcttcttattttacaaatataaaatctgaactcctctccatggcttacaaagcctcccttctgtgaactcgctgctaaacattcctaaccaggtatcctccttcctggctgcttcacagagagagtcactatcccctctagcctgtttgctgtgactgtgtccttatgaccttgacatttgccgttccctccagctgaaaccctcttcactcccatcaacaccttgctggggtatttttggttttgtttttaaacacttgggttttagcttcaatctacctctgtggagaagcttccttgaccctctgtaaaaattattgcactctcatttcctgtaccaacactgttcatccatttttgcagactcgctttcttcagagtctcactatttcaagttatctttttggttttgtttgtttgtttgtttgtttgttttttgagacagggtctttctctgtcagtaagactggagttcagtggcccaatcatggctcattgcagcctcaatttcccgggatcaagtaattctctgacctgagcctcccaagtagctgggaatacaggcctaccaccacgcctggctaaatgctttttttattattatatatatatatttttattttttgtagagacagggtctcactatgttgcccaggctggttttgaactcctgggctcaagtgatcaacccactttggcttcccaaagtgaaaggattactggtgtgagccaccatacccagccttattttatcttatgttatcttatttatttatttatttatttttgagacagagtctcactgtgttgcccaggctggagtgcagtggtacaatttcagctcactgcagcctctacctcctgggttgaagtcattctccagcctcagcctcccaagtagctgggactttaatcacccaccaccatgcctggctaatttttgtatttttagtagagacagcatttcaccattttggccaggctggtttcgaactcctgacctcaggtgtatccgcctacctcggcctcccaaagtgctgagattacaggcgtgagccactgcgcccagccttattttctttattaatttattgtatgttgaggcatggactttgcttttctagatcagcaatatccagagaagtgtatgagtcataatcagtctacaactaatggttgctgaatgaatagatgtaagtatagctttttttagtattagtgcagagtctaagtattaagtattagtagaataaaaataataaatccttaaaggctgattgaaacaaagtaagaggatgatatggaactgcttatatctgccttgctacttgatctgttaatagaaatagagggtctaatagtcttaaatagagtcctgctctcttctctgtgtagcttaacctacacccagaggaaaattcagtgggcaatgctctacaaggacattgagattctaaaagagtccaggagagagccatcaaggttgggaaatgcatcagaccacattctcagaggagcaataaacacaatctgtttttgttcagcctagaagagattcacagcattaggtgctctatgttgacatactcctttataatgtaccatgagctcaaatatccaaacagcagtaaacttacataaaggtacaaggagtcattggtcatgagagaagtatcaatgaaaacctcagtaattgcaccactgtatactcatccaaatgcctaaaagaaaaataacattatgtctttcaaggtacgtgtcatcttagataacatcaagagttggcagggttgaggagcaaccggaattctcaatttacagcaaagtagaaattggtacaaccattttgggaaactattggacaggatctactaaagctaaatatagcatagcttatgattcaaccatcctagttctagatatatactcaacataaatgcttacatatgtgtgcacatggctgtactattcaaattagcccaaactggaacaacacaaagtaaatggggtgtattccttcagtggaataccaacagaaataagaatgggaaaaacagttgccatatgcaagaagagaaaaaaatggatacatctcataaacaatggcaaatacaagaatagtacactgaagcatccatgctgtctgagcttatttacagaaagttaaatttttaacaatctctgctggaagtcaggggcctgatgattgggaagggagtgtttgtggcattggtaatattctgcttcttgccctgggtgctggtcacacaggcctgctcatttacccgtatactgatgtgatctttctgtaagtaagatatgtgttaataaaatgttcacttcatcataagttgcttgatggcttccctcaccatctagaatacagagctcacatcaactttctctgatttctctcccaaaactcctaccaggtcctctcctataccagacactcatcaagtgcaggagacagtgctcttaggaggaacaagacagttgaatatattaaggaatgttctagctgttttataaatagcactggatggaaaaaataacaatttgaccttaataaatcatactcacactctcacttgctttttgattttcaatatcaaattgcaaaactctacaaatgtccttgttgctgtttcattgcatattagttcctgaatggatttatgataatcctcctgcttccccagcagagatgtcactggcatggccctcccccagagcctagtccctgctctgtgccatttattataactaattggcctagactgcatgagatcacatttaacaaaacatctgatggctcctctggttgatatgtgcttcagaaggctccctaaagtgtctaaggttttcattagtttttagagcacactgagttaattatattgctcactagcttttcaggttgaatagtcaactagaaaaagaagtaagcatggagaggctggagagggagtaaaaccatttcttgttttggcagccttcaaaccttgtcctcagaacttgagagtttttaactgcggcctttcttgaagcaaaaagttgatgacctaggagtgacttactaaatgcaggtggctggtagaagaaataaaacaggacctcaccccttgctggaatgtgcaatttgtggtaaaacttgagggcgcattatgatatgttgacagcattcctcttgaaagatcaggacaaaaatgaaagctagagaagcaaactgcatttagattgtgcagttgctctgtggtccacagggctttgtcatgagggagtgtgggatacagtgggatacaatgaaggaaaaggttaccgaagattgtaggggtgctcattccctgcattacagtactagggagaaaatgaagagggccatcgtctgtagtcagtgatagtgctaggaccagttgacaagtgagttagcttttatggctctttctggatctgaattctttttccaacaggaatatggtagccacactacatcacaaaactctcatgtgtttttgaggtcttgccagattgctcctcaccgtggcaatgatgtctatggggagaatctgtaggaagcttactgagtcttttagccctgaacagagcacctagcttctgaatggaaggacggttgtcatggaacattccagactgctggaaattagcttggtggttctatctccttcacaaacccaccattgtgttagctttctaattacaggactttgcaaaccaagcgtctattctaaggaatattaattatatcaaatgtattgtatatactaaggatagttactaaagtattcactttttcagtcatgtgtatgtgctgtatattttaagtatggagtatagatatacatgcagatatgggcatccattgtacatctagatatgagtggattatagatatggatgtgagcgtgaattgtatacaaatatggaatattcacataaaggaagcctagttataaagggaagaaagggccatattaaggcatttttattttttgaagcagatctgtccctccttattagccttgaagatcaattctgaaaatctaactaatttgagaaaaaaaatgacagtatatatatgtaataatgaaagtgacttagggtgtgaaatgcttaaaggcatggatacaatattcttcatctctgtattcccagcaccttcacacaatagatgtgactgataaatgcaaaaatgaaagaataaatagcatatgccttcatccactcgaagcaaagaaaaaagaagtaaatctctaaatgtttcccatcataggtagatgcagctttcccagctttctattctgagagaaaaaatgctgcaaatcacatctcccttgtcctatagttttccaaagtgatgtccacatgtccctgcaaatttatgctgggtaggaggccggctccttgctgcacagccagggagtaatttcagttgttctctggtggaataagacattttgtgcatcagcaaggatgtttgcagctgacagtcctatcagcaaatgcagcttattaagatcaccaccaccacaacaaaaaaacaaatattggagatgaatataagacagatgattttgtttatctcaagtgaaaaagacaagcaatgagacccctgggagcgctgaaatgagaaacttctgaagctaattgagatatgattaaaaagattgctgtgtgttattgccagcagtcatagagttttgtcattaggtttccagtgttggagcaatcaaaccagttatggcttcagcaagcagcagagtatcttttagtatacatatttcctggaaaactataacttattaaaggcataagtagggtttctgaaacaaattcaataaatgtattttaagaaattgctctctttggtatcatttattatagactcagatgtgtcactagattttgtctttttatatggcagtgctgtccaatacagataggatgcaagtcatgtgtgtgattttaaattttcttgcagctacattaaaaaagtaaaaagaaagaggagaaattaatcttaatattttcgattaaactaatctatatataatatcatttttacatgtcttcaatatgaaaattattaatgaaatattttacgttgttttttttctgtaccagtctttgaaatccagtgtgtattttacatttacaagacatctcaattttggccagctatatcatggctaatggctaccatattgcacagggcagactaaagcttctcctctacttggttattgtcagagataaattatataggttatattacttccagtatgccacttggaaatttcaggactatactctttaagtgatattatatttgctaatggaggaaatttatccttctacactcatcttactgtgactcaaaactctcaaaatatgaaagaatcatctgataatgaagaatacatcctggttttgtagaaaaccattaataagtaatactatgtattttaattatatttttaccatgccccaagttattgttcaggctaaatttcaggataaaaattatctggcttttatatatggttcatgacgatgtgttatatattgtaaaatcctcactaaagaaaaacagaattactattcacaagattatctttagaaaaatgtcactgtgtattagatgcttaagccaagtgtgaaatagtgtagtctatataatgtgatcaggcataaaatatatataaatatataaaatatataaaataaggctaatcctctatcacacttgaaatttttatgtaaaaaaaaaaatctgagaagtcaaggatcttagctgtccttgaagagttggcatgaaatgattggtagtccattcccatagtccatctcatggtaccattaagttcagttattttactaatgagaaatatttgtatggagagcacatgcagaacaatagaaccaagggcaagtaatggcagaaacacacgaggacgatgccctgacttagaaactcagttacgtggcattgaggtagctgagatagagaaaaggaatggttgacgaagaggcaggttcactgtgcttaggaactggtgagatgatggtggatgtttttctttgctcttcttcttagttgattttgatagttaatataaatttcatgttctttcattcatggtcttcaatattaagctatccacacccacatactttaatgaccccctagccaacattaaggtttagccaccttaaatatttgctattgaattcatcatgtgttaaacctcagcttctacagaaatgtaggattagaattctgcagttttgggttgaaaatgaaaatattgttgttttagtaaaaacaaaagtgttttgaaggcttgaaatcccacaaataagccataaactgtattaaacatgaatgaaccataaagctcttcaaaactcaaatttggagtcattaaaatcgctttgaatttgtactacttttgttggtaattaaaacgtttgcagaatctcactagtgggaacaattgtagagttattgtttcacaatgacgttagcacatcccttaaacaaaagctgcagccacagtagacatggtagaacctgagcaatctgagtgacagattgacttgttctccaatttgtctgggtgaagagcattgaacaattaggcatacttttgagggactggaaaaccactccctgttccatcactggggcacttaaaattcagaaattttaatttgggagtaagaatttcattgcttttttatccaagtagaatctaggtttagacatttttaccaacttattagaataatttcaaggatagactatgtatattaaaaaacaccaaattgtgatggagatattgtaaatgtaaaaataatgagccaattaatatatccaaaaataagcacatgaaaattggctctgatggaaatttttaaaaataaccaattgcctgattattgtaattacatgtttccctttcttattctgcctcctgtggaaaacaaacaacaaaaaaatacagagaaactacacaattaataactattaatgattaataatggtttataaaccatttgaaatcttcctgaaatacagtagataataaataaagtactaaattatattaactccaattcaaattacaaggtttcccctaatatttttaatgagtagaccttaaatcttaccttataacttaagattaatatatagcctcttattgctgacatgttttgtccatatgtgtatgtatattgtccttttaccaatacatctcaattggtgataatgatttttgtgtcaataaagataattactgttgtatgttttccaatataaaggaaaaacaaggagcctataataataattcaagaaaactcaattaactatttcgtgcatacctggtttctgtacccaggactccaaagtcttatgtgaagaagatgtcgaggttgggtgtggtggctcaaacctgtaatcccagcactttgggaggccgaggtgggtggatcacgaggtcaggagttcgagaccagcctggccaacatagtgaaaccccatctctactaaaaatacaaaacttagctgggcatggtggcgggtgcctgtagacccagctactgaggaggctgaggcaggagaatcacttgaacctagtaggtggggttgcagtgagccattgcactccagcatcggtgacagagcaagactccatctcaaaaaaaaaaaaaagaagaagaagatgtccaaggatagacagaggatgatgagtaagggatgacaatcatctttgatcaatctttgccaggttagtcatgaaactgattcttctgaaaagctagatacacttccattttgtccttcgtctttgaagttaatgcctggtcaattttcaaagccaaaataataatcactacctgtaacaaggctgcctgacgcattctaggggacaccattgtattatggactatatgaatggctggagttttgcagtgcatgttctgtactatttgtctggaggatctgatccatttctatgctggatatttgcatccattatttggctaattaattctgaaaagtaggtcatattttacctgaagttaaatgacttgcccaagggtcttgttccttttgcctatgggcgtgacagtttataacttctctacaagactaacatcacttcaaaattgatcttaaaaagagaaaagtatacatcctgaaaaggattttttaaatggaaagagggtgctgtgctcttggcattctcaacttccagacagcatttggctctagaagagtttatcatctttctttgctaaaaaagacacataccatattatggaaggctctcaggggcccagacagtcacatgttaaatgaatataaccagaccctttagagctgaaagctctcttgaaactagagatgtatgtgaggaatttcaaaatagctatatatgaaaactttaaatgtgtgggaaactttaacagcaagttctcatctcctaaatatgtgtgacagcacactgacatccatgaactatgagtaatagggctgctattatgtttcattgccatatacatacatctatttttaatatgttccaatataattttcagttcaagagaatgcatgccacttctctttaatgataatgatgaatagaatattgattagaaaacagtctgaataacaggtaattgataggggtaggagatgtggcattttccatcttctttttacataataactacaaatttccaaactgcaacaatatatatatcaggcacaatcaagaaaatgaaatatataaattaatttttaaattaaatgtctgatgcttaaataaacatagccttataattgtgtactacaaataaatttgatgtatttaccagttgaagaaaaatagtatcatttgcacggagatagaggatactgattagtgtttatggtaagaattttgaatgtgtctttcaatttgtttcttggatggaaggtacatgcacttctgaaattatgacattcacaaaatacactgttaaggttcttatttactctgatactattgagtccaatagcatgagaaatgcccacttctgttagctaaactgagaaaggccacaatttcctattaagctttgtatagttttatgagaaaataaagataaaaggcatgaggaaatgaacgagattgaccttctccattttccaatatgccattgcaggcattctgtgtccaccttacttttgcttttctctgcaactctagttgtacctttttattttctttctgctgtttactttgaatgtgtgcttcagagcgtcctgcatgcattgcttggccattgcactatgactggcttaagtaagttgaacaaacaactatttgtagaaactagaatcctggttgatatggatttatttcaagcaagaagaccaaaatcatctcttaatggattatagtggcctgcgaggacctttaaaataagaagccatattactcatttaattaaggctttgatgaaagtgcttaagatttttcctacaactgtgccatgttttctaatcttctgaagtacattaaagatagatagcccccgttctcaaaggtacttcaattaaaaacaacaggagcaccataatccttggtagaaaatacttggaaaacttgataaaaggagtgaaaggaagacaatcaaagttcaacattcatcgatttatttttagaaaatgcaatttaattaagtatagtctccatctctttacctgctttcactacatcttgagagactcgggaaagctttttttacaatagaagatgagtgaataacaatttctgtgaaaaaatatgtttcttcttaaaaattattggggccattcttcctagaaaaagtaggtgaacaaatataattttttataaaatgttcctatgttgtgaaaatgttgattggtaggactctatactctagaaatagctttgtcaaaacattatatttattttggatgtctttacagaacatttgaatttgctgttagtctcaaagctttttctaagatcagcttttccttaataatcaagcagaagtatgtttttaaaagtactcggaattatgcagccttagacttgaagcaacactgaaaactcacttgatgtcatgctcctcaaacttcttatattttcagactaaagatatctacaacttgtgccagattaccaaccacttttttacctggacaaacaacttgatacgtcataggatatcagtgaatttcctgttcttaatatttgcaaatagcaacaaaatgcaatctaagttaaggaaaatgctagtgcttcatgtaatatggctaatgcctgctaaatagtcttcgaatatatcttcatgaccaatggaatgtctgagtggatatataccttattattatcattattatatttttcatatgttagctttttcatcattaatgagctgaatattcttgacttttggcctacagtagacagaagttgttctgaatagtggtatctggtcgggcttggtaaaatgatcacccatgttttctgaaagcacagtgaccataaagaatgatttgggtcatttcatgacagttttttcccatatattagtttcccatagcttctaagccgttttcagactacagcttcacatattactttaaaaacaaaattaaaattcatataccacatatttacttagaaatgacttcaaaacagagccaaagagattgtcagcattttcccattctgcatttaatcctcatggttaacattataatagtcaacacttccatcacacaataattctcagaggtagagacatgggggtttggagtaggagagagaggaggggaagtaaagcacccctcgtaggaagccatattagaatttcagattgtggactggacagtttgaaagaaagaaaaacaaatttgaattctacacattctgatactttatgaaaggattatgcttatttccttcctatctgccactgtaaagttcactgttttagcagttctctagttcacataaaacctgtttttgttttagtctgtcctccaaaacaactcacagtgatagtttaaattccaagtgcacttggttttacacacacacacacacacacacacacacacacacactcacacacatgaaatatcaatggttttcagtaaagatataatgacattctggccagttacccaatacagaggtcagatatgagatgggacaaaaggaagctgctactggaggtctccagtatctacaagagttcttgtagatagctagatatggaagtaatatggcccgcagtgcctttcccattagttgaaatgtgcataaattcatgggaaaattgttagaatctcccacaatggactttccctaccttccccatcagacaatagataagagaagaaaactagttaggtgatgaattttctccttctataagcatgacatgtggcttctgtaatgtgcccttgaatatataaaagggagtcatttttcctgtatgtattaaagctcaaaagaaacttttaattatacataataaataagtaaataggaaactttttatttcttaattcttcaaatacatttttttttttttttgagacggagtctcactctgttgcccaggctggagtgcagtggtgcgatttcggctcactgcaagctctgcctcccgggttcgcgccattctcctgcctcagcctcctgagtagctgggactacaggcgcctgccaccatgcctggctaattttttgtatttctagtagagacggagtttcaccttgttagccaggatggtctcgatctcctgacctcgtgatccacccgcctccacgtcccaaagtgctgggattacaggtgtgaaccaccatgcccagccttcaaatacatatcgagtgtccattgtatgtcaggcccttttctaggttctaacactagcgtagggatttaatcccttaggaaattactgcctgcatgaaatttatagtctaatgagagtttggggaaagaagtcacacagtaaatcaaatgaataagtaaaatacataatttgtcagattgtgaaaggtactatgaagaaaaaataaaatgaggaaagagatcgagagaagggttttcattgtatggggcagtcagagaaggcttcactgaattggaattaaaaacctaaagcaggggagataaatcatggtgttcccctttatttgggacttcaccatcccctttcaattacaaatgatctaagtcattgaagaattgtttccaataaccagtaagacagttgtaaaacacctttgaaattacaaatcactagagaatactatagcaacggcacattgttctatgtcgtaaggtctaattttaattatattaataatttattgttgatatacattttgttgaaagtgtactaaagaagttttgtgcagtaaaatgatgccagattagaggacataaaggagtaatcacctaaagtaaacatgtagctggaactaaattatttactttagaaacatttcaaatgccagagtctaattccatggacaagtgttttcttaaagcattgtgcggcaattaaggataaagactggaaaaagtcaaggtcaagaagcattgttctgtaattaggccagagttatggcagctttttgctgggaggaattcaaaacatgatcagaatgataagtggggctgaaattgataaacagtttaatattacaattgctctgttgtaccatgacagtatcacatttgctaaacaatgcaaatattttatgagataaaatctcctgatcatatttcaaagcttttagtagaaagcaagtggcagttcagcttgtggcagttcagcttgcaagatacattagatgaatttaatgctaatttcaaagaacaattctaaaatgattgaaaaataaattcaggtacaaaaagaataaatacaagactcaaacagtctgatgcctaattacaatctgggacattgtggctaattttgaggcaaagcttcaaaaggtcatttactttacgtagaaaactatctcgtttaaaagagaaaactgtgtggttaacaagaatgtttctggaaagggaaataaggagttgttatggtttttcattagtttttttatatgtttgcaattagaaaaacatgatgctattgattttataattattgaagaaaccaaataatgtacctaatatatcacaaagttagtttttctattatgtttgaacttttgtagtataccgatacccatccagaatcttttttttttttttttttttttttgagacgaaatctccctctgtcgcccaggttggagtgcatctgggctcactgcaagctccgcctcccaggttcacgccattctcctgcctcagcctcccgagtagctgggactacaggcgcccaccaccacacccggctaatatttttgtatttttagtagagacggggtttcactgtgttagccaggatggtctcgatctcctgacctcgtgatccacccatctcagcctcccaaagtgctgggattacaggcgtgagccaccgcacctggcccagaatcttcttaatcttgtcttctacaagacatggagtcacagggcaagttatttaatccttgttagaatgtggtctcctgtttctcatgctcatgctcatctcacatattttctttgtcattacttctcttacaaacctgggattcagtgctcttccttagacgtaatatagacagcatagccccgcccctgagtttaaattatattgtattaatctccctatatctatgtttgctttctataatttctgtgtccatcctctgttgcataaataactttattgattggttattagttttgcttttttccataaaccagtaaatgcttacccccagcactcttactctacttaaatagtgttagcatgacctacttgttgaactttccattagtctttatacacatccctaattctccaaatctctggcaaattctctctcatcttaccttgttgtatcaaattatgactcctcccaattttatagttttcactatttaaaaagaactatatttacatattatatttttattccagtaagaacagagtcagaaaatgagacagaactaaaaaaatgtaaataacaaatgtagaattgtcttgagagttgcttgattagccatatcctgtgtcaggattaattcaccctccataggtccttggctggattgttttataagaaagaacatgtaccaagtttgatatttgacataaataaatactttgtggtgtctatatttttattcgtggagatctgtcttcaaactgaaaatttagaatgaacatttcaaagtaggaacaagatggaaatatgattccatgtaaagtgtgccaaataagctcaatttaaatataaatattgttgagtttaactcatttgatgctggccttacttctattttgatggcctttctaggtgagaagaaatctcctataattcattaaatgatagagagtttgaagaagttggccctaaaatacaaatggctgattatcatgatctatgcacttttgtttatgccatgtttcaagggaaggttacaggcattgtgtgattagaatttaggaaacatttttcaagtatctcttgatagccttgtgaacaagatggataaatgtgggccagatgacaagacagacaagtggttttgtatctgatggaacagttgtctccggatgggttgattaatgtggggatatcaatggagaggctgacacctcatgtcatgcctctgggtgctgttcttggccgtgtctatatagctcatcactgttatcaaagatcatcacactgataagaagcatgctcatcaaatttgctaatgatgacagacttggagaaaattaataaaatggtgacagaatcaatattcaagtgctttcaacaagctggaagtatggatgcaaacaaaccagatgaatattaccagtaaaatatgggtttccaacattcccgtctgcagtacttgtgtacgtaactgaagaagatacttcagagcatgtttcactatggaaaaatgagtgggtagatctacacggagggagaaattttaggggtcgtgtacaggattccacagagaatatgaagaaggcctgaagttacaggaaaaacgtggaggtacagaaataaaagtagttgtagttagctacaagcagtgatttagagaaatggtggtctatgagtagaagaataacttccaagagtctatcatgagcaacagggcccagagatagagactgcaggtagagaggatatctgtgctggcaaatatagaaagatcttggtatgtgagacactgaaaggtcaagtagacaggtgtaggtatcacagaccatggggtagaggagttacaccaaagctatggtgtctgaaagacctaagcttgaatttctatctctaatgcttacaataagtgttttccttaaaaaaatgaaataataaaaaaattaaaaaacgatataatgtggccaatactattcatcctaatagataaaaataacaaatcactaaatggagactttgaaatgtattatcttaaggtattcatcattagactaacatttttctctaattttcattattttttactgtggctcttacagtctatttccttgttccaattttctttgtttataggtttttgctttaaaaaaatttaaatttgcctgtgatttgtctgttttattgtactcttctatgagccaactctttgtttatattattctgatttttaatggcttctaatatatttattgttcctttcatctttattatttccttccttttattttcctttctaacagatcttaagaattaaaatttattatttttccctttttaactaatagaaacaattcaagaatgtctccctgtgtactattttgaccaatatttaatatcccttgctttcattggtattgtgtgtatggtgagtttacttcaatcctgatcaaactgatacttagaaatactgagcagaaggtttttttaagttttctgctgatactgaatggcattaatttgtaattttactgactttacgttagtgaaattaatgtataaaatacagttctaattttgtatatattgaattttggttttctggcgaatacagcaaaaatactttagagtacagatttattccctgctggaggaggtttaattccttttatactgtgtttcagattattctcagtttttgccaatgtgtttgtcactagatacatcttctgtggttgattttcctctcccggcggttaacattgttgacctttccacatgggaggtctctacccgcttgacttccatggccagtgtttttcctgacctctgacttttctcatcactgtttcttcttcactcttttatcttcctcagctcagtccttacattgatgaagctcgtctctacccatgaactgctgccttcaacctgcttttctaatctatccccttgagtttctccatccccgtgcattccacttcttagtgcccactgacctctcttcccaggaaatcaagtggacttctctgcctggattcctaccaggaccttcaactcacgatgttcacatctaaactccttgtcttcctccaaacctgctttccctagtcttttttttttttttttttttttttttacagttgatcaattcctccacttttataagtaagaaaaatagggtgttgtcacctcatctgacatcaagcactgtcaaattttgtaacataaatatatctctcggccaggcgtggtggctcacacctgtaatcccagcactttgggaggctgacgcaggtggatcacgagttcgagaccagactggccaatatggtgaaaccgtctctactgaaaaaaaaatacaaaaattagctgggtgtggtggagcatgcttgtagtcctagctgctcaggaggctgaggcaggagaattgcctgaacccaggaagcgaaggatgcagtgagccaagatcacatctatctctgcactccagtgtgggcaacagagcaagactctgtctcaaaaaaaaaaaagtatatatatctcaaatccatttccttctctccatttcctcctctccacctccacagtgggggaacatagctcatttccaaaagccttcccaactccaatctgagctcaggtcagtcagttccccaggctcacaggtgagtcctccatttacatgcaaatccagctcattccctggacaaacccgatcttaggctctcaactctctacagaagagagttcagaatacttacattgcttacctgacttcctttgtttgtaattttttcctttcagccttccagcctcaaatctcactattcttcttcctgctctttatattccagatgttttctcaagtccctctatgtcccatgccttttcaccatttccttcttctgcctggaatgactcctttttttgacctttatctgacctaaagaaacttcatcatcctttaaatgtctccccaaatatcttcatctgtgaccctctctgatactccctcctctcatcaccttgttaagtcactgacttctccacactaggtctttaccttgcatatacttcttactgtttctattattatttaccaaattacagacagtccaaacttacaatggtttgacataactactttttggctttacaatggtgcaaaagtggtacacattcagaagaaactgtacttcaaattttgatcttttctcttttgagatgataagcagcagtaggaagccacagctcccagttacccacaggatcaggagggtaagcaaccaatatgctagtgtattgtgttgccagcttttttggatatgatgttttttgttttcccatcctacgatgtctatgtgcccatctgtatcatctgcttctgatgataagaagaagaagacagttatttttgagacgaaactcaaaataattgcccagcatgaaagcagcaagccagtaatggccatcacatgtgagttaggactttcacaatccatgattttgaccatcatgaaggataagaaacaaatcagtgataatgaaattgtcagcatcagtgaaatccactcttttcatgaagaaaagagctaggctgattgatgatttggaaaccttagttatcacatgagtggaaagccagattcagaaccacataccgcttagtctaatgatgagtcaggctaagataagaagctgttttgatatactacaaaagtgtaccaatgatcttatgcacatgcaaacatttatagcaagtcagggtgattccaactcttcaaaagctgtcataattgtaggtgtcacaatgcgaaggtcagtggtgaggcaggaagtgccagtacagaaggtgcataggataattgcagatgataaatatttgccagaacaaatatttaatgttgataaactgagcttattctggaagcttatgtcggagcatacatacattcatgaagagtccaagacaacgccaagattcaaggcattcccagaacatgtaaggctgcttttcggtagaaatgttgcagggttcaaattaaagcctttcttaatctaccactcagagaaccctagagcatcaaaaaatgtgagcaagcatacacttccaatttattatcaccataacaggaaaacctagatgaaatcagcattgtttgaaaattgatttttgaactgttttaatccacaagcaaaagaatattggaggcaaaacaacaccatattcaagactcttctgatcttagacaatgcccaaaggtgtctatagcatagcagcaatatgcatcttgatgtaaagatttgttatggaacacaaccaaactcatttaaccagtggaccaaggtgcaacagctgggttcaaagcctactcttgacaccaaatgtttgtacaagctgttaaagtgatggaatctggaccaatgctctgagagctttggaaagggtttaacattctaaatcctgtccagaacatccctgaaccatggaaagaagccttacggcaattcatgaacaggatttgcaagaaaattttgaagacatatgtgaacatgttcaaaggcttttaataaatattctgctattaatgaaatattaagtaataaagtcttattacttgaggaacagctcgaattagacactgatgaagaagatattcatgagcttgttggcattgaggctgaagagttttccagtgaggagctgattgaactggcagaagaaagaagtaaagaagttgaggccaaagggaggtagaagaagatatacctgaggcattaataaagtttacagaaaagaaattggtggaggcctttgccactatcagcagtggcaccaggatgttaaaagaaatgaacatcaatgacaagagatgtgaaagagctgacaggcagctacaggacgctcttgcttgttatagggaaataaataatgaaaagaagagactgtacagtcaaacctagtatcttcctgaaacacactatgcctactaaaccatcagcaagtgtcagtgccccagtgccttctaccagctattctccagcctcatcagaagagagagaaattgatggccctgtcgctgtcgcattcccatcatccagcaattaattttagttcaattcctcaaatgttcttcaggcccaatcaatgtgcttttggctgcgtatgtgactacccatacaaccattctgtttttcacttttagggcagtattcaataaattacatgaggtattcaacacttcattaagaaataggatttgtggagatgattttacctaactgtgggctaatgtaagcattctgagcatgctctaggtaggctaggctaagctatgacatctgctagattagatgtgtgacatgcatcttcaacttaccattgtttcaacctacaatgggtttaccaaggcataaccccattgtaactcaaggagcctctgtattcagcagttacctgtttagatgcctttcttctttcctagactgcgggcctttcaggggagggtcttattcacatctgtattcacagtgcttagtgtagtgcctggctcatagtatgacttgataatagataatgtaaaaacaaaaatgttttaaagtacagtatttgctcgatgaaaatatgatgttgtgacttgcttctgattgactgtcttttataatggtatgataatctgctttaatcgaatgtagtgcttactgccttaaattctgttttgctcaatattaccaacgatactattcttttgttcaaatttgattgatagatctttgttgaatttcttatttttagcctttaaatgacatattgctttgtaagcagccacttgttgaatttttaaatgcaatctgagaatttctgacttttaaatgaggtgagggagacagtttcatgttttatgtagtaattcctatttttgatctcttcctacttatttcactttttatttgtagctttttgtgatttaatttttttttgctttttttatttttgtgtggaatttgccatgttttcttctatctttaagtaatttaaaagtttatcactcaatttttaatcatcagtgcctattgcaaaatagtatacaacatttctaattctatattttcttaagtttttataaatgacaaggaattttgccgtttatggcttcatatgcagtttcatcctatatcttattccattcataattaagtcttaagaattctctaaattggttaatattattagcagtaattcacaaagttctttaattatgtcttcaaatgagtagcatttactttggtaattaatacaatactttattaattgtccagcggattttgtagtgaatatctttagtgaattttctaagtctttgaagggataagagtgtcttattttcatgaacaagtgaaaacgaacaatacctcagttttgagtatatgttcttccattattgttacgcttttactttttcatagaggaacacaaagaaatctgacttatatctcataatagactacgctgtcttcttaaaagtacatagaatactgttcgtcatttgtatattttgtctaaaatgaggctctcagttggattcagtttcttattgttatatagtacatgagaatcaaagatgctatttctagtcctatttctttttcatttctgaagtaatcaactatactatttttgttcagaaatgttattattacacattggatcccattttccattcttcagatgtttcaacttctcacatactctttattatttttaatcctggaattttcttaagtgtactttaactttgattgttttaaccttaagttcctgttaattatattttgtagttcatattttccaacctacttttatctttggtaagatattttaaccatattataattctatcttacacttcctggatatggtcaatttttggttttatcctaagaaattcactgctttctaccgttttgcagtacagaattttttctttgactttttttttattttccttgactattacttgataatctttgatatatgctacttgaagaatatttactgagtacttttcctaggataggtcttttacaacacaatctaccattatattaggaatctcaatttattttcaaacagattacattaaataatttatacttaaacagtagagcattataataaaacttaaaaattgcaataaatatttataacatgtatgacattatgctttgcataatatgtaaaggttctataattaaaagcaataatagtaatgaaaaatgaacaaccccagggaaaaaagacagagggcttaaactgatattacccccaaaaagccaagaagccaatagcaacctataaatttttcagccttacttgtgacgaaaaaaatacaacgtcaaatggcaaaagattatcctttttctaacaaattgagatggattaaaatcactatattttggagaaaatattgaaaactgggcatttataaataccatttattggggtattctaacttcctggacagcatatttgagtaatagcattttattttctagggctcttttggatgttttgaattttctataacaaagaacagaaagttgtgaaaaagaaaaggtagtgtgcatttaagcctaataaatgacaaacagacttaggggagagaaaactgtatctgggaaatggtaggaaaatattagaataaatagaatttaagcagagtctttaaaatttggtaagatttgtctgtaaagacaaaggagggcaaaaggaataagcgatcagggagaaagtagtagtgaagattccaatgatcacagtgtgtgggatgtttctacgaaaatttgttgtttgggaattctacttggctatttctagtagcaaactagaatacaaggagctactgctggaaggtagttaaccttttttcccttttgttgagaaatatgaatattggatctgctattaaaaaataatggggaatggcatataactattcataccaaaaaataaaagtggcatcataccctaagactaacttcttcagggctatattttctcaaggataaaagttactttatagtggttgctacttcctatttcaatcagatctgtggtaaaatatctctgaagcagatagagatagattcagtgtaaaaaatatacaattggaatataaataaaaatagacacaccccagtatagcccacgtgttctccgttctcagcagattagcttaaaaacacagctataattgtgatcagaactagaaacaagcctgattagttttaaatgacaccaactaaccacttcagtcaacccttgtgaggcgcatgattttacctagttggttggatgggcgtgaggccaggcatttggtagctgcttagtatggttttaactgccttgtttctgaactaccaccatggtgattccaaggcgagtccaacagaagttgagcctgtgggagtggttcacagcatatgccacagtgcttttccagatgtccaggggaatccggagaggtctctgtctacattcacttctcctctggagacaaaaccagtgtgcaaaaggagggaggaaagcaagcagaaagcctacttaattactctctgtatgcctccaaactccctgtctttggatcctcatctgtagagtgaggagtacagagttggctactttgcaagaatagagtgctgttttgcaagttacagcttttcaagtcccaaaaaaagaaaaacaaacaaacaaacaaacaaacaaacaaaaaatgcctagaagtaagaggaagcaagcctgtatggagtggaggcagactcaggttttctcctcctgaaatcagaggaatgtaggggatgtggcctcaccaccaatagtagctagaggatgtgctatacttcattgtgttagtcattaggtttaaagttctgagaatacattatttttgttgagtttcagtttctctcccatgattgtgtgtctgataactactccttttcaaggttttcagaaaaaagaagaaaaaaaaaacaccatttgctttgtccctgtggctataagtcctttttacttgtaatttttatttatttttatttattttttaaattttatttttatagagatggggttttactctgtcacccaggctgaagtgcagtggtgcaatgacagcccactgcagcctcaaactcctgggttcaagggatcgtccctcctctgcctcccaagtagctgagactacaggtgtgcaccaccatgcctggctaatttttaaattttttttttgtagaaatgcggtctcaccatcttgcccagggtggtttcaaactcctgggctcaagtgattctcctgcttcagcctctcagagagctcggattacaagggggagctccactatgcttttagtggaaggatttctcttcctcccccattggcctaccacttttcttttctctcatttccattttgttctctcacttaaattccagccacaccattctgatttgtgtggtatgtatgtcagtgtggcttgacatgccctttaataattctctcaggctgtattttctctgacagtatttctaatatactattaatcagctctattgtttctgatgagcatactgagtataatagtccagaaaaaaatctatgaactctaattctgattgtaatgttgtgatttggattctaggagtaagttggttccgagtaagtagaggaccacatagactgtataattttcaatctattttaggtcacaagaccctgctaggttcttcctatggtaaacaagccatcttacaaaatacggtatggaggagttagatgatgtttcagagctcatgttcgtctgcaatatgcacttccagcagtttcttagaagacatgccatcttcaggagctcagcagggctctccttatgtaagtcaaggctgagatgtttcaaattatatgtcaggcaaatgctatgctcttcacacaagagatgaactgttgcttctctatgtgttttacattaaaaaaaaaaaagaaaaaaaaagaaaatgcctaaggtagcacttaggaataatcggttgcaatctattaccactggcaacattataattttagctattgaatagctcaggaaaaccaccacagaatctaattgatatctttgggaaaggtttgattacttggctgttgaggagtgtagtagtctgcctgttacagagttgcatgttgaaagggcatctgtcagcgtgggtgaggagttccagaaacgtgttctctgctgtcatccccacaggacctgaggacctaaaggcctgactcatgccactgatggctgcaacatttatgggacaggctgcatgtcttttattgggagacaattactggggtagtgctgaggcatgactgagcctctgggcacagtagctgtcatccctactgccgaggtttgtgaattaatgatcagatggattcagcgggttgcacaacattaactttacattgtcagcacccctgtgagtgtccaacagtctcccctttacatcctttctttcattctcagtctgaatttagaagaataaacactttttagataacctgcttccttagttttaagctactgaaagagcctgagtagggatattaagagggagttcttgcttgcgctctggtaggctttggtgatgacatattcagaatggattattccttgcccccagcttcctcatgattgacacagtaagagaccctgttacttccctgaccatagtgtctcgttacttagtgttggcggaatgtcttccatgtcacttcagtgaacatttatatataaccatttctttaccgcatggttctaacacaactaacaacactgtcagcttttcctcggcatgtgcgtatgtatgtatgtctgtgtgtgtgtttgaaataattagcaaataagatatcatgcttatctacagtaacacaacaagaagtagaatatgttttttataattttatttattttaggttttaaatttttatttttaatttttatgggtacatagtaggtgtatgtatttatggagtacatgagatatttccatacaggcatgcaatgtgtaataagcacatcatgaagaatgcggtatccatctcctcaagcatttatctttggtgttagaaacaatccagttatactttcagttattttaaaatgtacaattgagttattgactataatcacccagttttgctatcaaacagtaggtcttattcatcttcctatgttttttgtgcccattaaccttcccccaacccctccaccaaccacccaccacccttcccagcctctggtaatcatcctttcactctctgtcttatttatttatttgttttaaagatggagtcttgctccatcacccatgctggagtgcagtgatgcaatcatagctcactgtaacctccaactcctaggctcaagtaatcctcctgctccagctttccaaagcactgggaccacagatgtgagccattgcacctggcctaggaatatggtttaatattctgggctgaaattaatttaaggagactgcacatgtggagactgagtatgtgatagaaggagcagagtgaaggggtagcaggcggcttggcaaccagggcttccttggaagccagcatgctctgttttatctttaatattcttgtgacaatttaaaccatattataaggtattttcaaactttctcctcttcccagtgaagattatttttggaggaaaagatagtttctccccagtttttacctaatatgtcaattaaactggagatatttatattagctccaaagagaggacattagtaacagttagaacctatattattctgaagtattccatctaatttagaatcttggcaatcagctaagccattttttattctcttttcctacttacaggtataatattgattcttaacacctactaattgtgagaccttccaaaatgcttgtatcccttcctctgtgttgcctttagaatgaaaacaacttacccagctaaaagagataaataattaatcgcttattcccagtacaagaaaatgacacatatggctgagtagcagggtgcattaggtaaagagctgtcaaagggtaccctttattccaaaatgttaaagaatgctattttcccctacacttagaatcagagtaccagtaagtattgataggagtaaaacccatcacagtgctaaataaaaggaagtctagagaggcatagaatagagccaattttttatttaaaaaaaaaaaactaaaatcgatggaactactgttctcataaacagaaacataattaattgcattcctatttagattctgttccctgatttaagttaatgttagtaacctttgaggccacccaaattggtctggaatccacttggctactacaaagcctgagcatgaatctagcacagtcccatgatacagatcttcgggaactcctgagttaatcccaaggggctgagttaaaattcataagtataccagtttctatagactggataaatattattttacacgtacatgtactaatttttaaatgtagacaggtacttttacaattgataaaatacagactcatatcattttattcttaaacatgtatagctttgttttcttttgtcattgtgcattgtgtcaatcaacagtttctaaacatatagcaagtgtgggtttccaaaatatttttgccatttgaagagatcctcatattccagaagattaggacccaccacaatgtagaagatctggaccttgccagcaggaaggtagtgcaagctaccctgacacacggagtgagattttccctggaggaagcatcctccttcagtgatggccgatggattttacaggaaatgctggaggccatggtggcccccactgcaaaaaaatccaccacttttgcctcctatagaagcagctctgagctacttctacttctgtgcaaaagagactaagtaaatacagattatgtggcaggaattttagagctctggaaaggccctattgtcatttgaaattcttctcactcactgaaattcactttagctcatggatttgatcccttttaagacagatgccctagggagaggttagcactttgcttttgtatcattgtttatttctttgtgtcaatagttggttttagaacgttgggcatttgaagtgtatgaatactatctgctaaaagggttaaaaagagattctaaaacctgtgaaggttcatttgctccacattttgtccacacattctgttcttccataagttgagccatcgtagtgaatagcattgcctttcaacattttgaaagaaagattcatttatacataaaaatagagtctatgacagacatacagtgttcatcattgtatgttatacattcaacaatatgctttaaagaacagaatttttttgaaatctagaagaatttcactttatagagtcagagcatttttgtgtaagagagatgtgctggaggaatcctctactgttatatcttttgttccaccaataactttatctcagaaattgatttcctctgtgatggagaaaaatagcttacatttttagtggaagaggtgtatattttgttggcattctatctctatttcttttttcattcccagtaagttttaaagagggtaaactgcagcagtgtccatgagaatcatcactgggattctacgtaggctccaccatggtgagaacagtgtgtcaatcaagatgttcttagcatttggagcaaggcagttattaattgtttaggattaaattgcacacttcagaatgtttggcaccctggtcaccatattccaggagtaacttgtggtcattgtgacaccaaataacacccccacccattttcttacactacagagaagagtaccaccctggttgaaatatcacagtgcagtctcttcccaaagacagaaatgtacttccggacatgctggtcagaggccatctacagagctgagctagctttcttgtggtgattacaaaatggccaccatataattcctgtcccaaaagccttgggactttattcaaggactacttttaattactctatttgtgtgcctgctggatactggggtgttatgtttgttctgtgatgagaattcaccaatgccaaggcagaagcatgagaatgctgcttaattttacacagatggggttaatctttgtagcgctttgtgtacagaactggcttttccctgctgttgggggcataagagatgaagccctaagaaatgaatcacttttcttttcctttattcaaacttcccaatcttttcagctatacttgggctttcaaagtgctactgataagctggcaattttgttttagaggcttgatagggagtgggagattaaatactgcaaactgtgagcagtaacactgtcccttaggcaaataaatgagaacacttccaaagagatgtaaaattggttttccagacttaagttccacaacccgtttaatagagcttgtgaaaatatactctaattgctctgtggcacattttacatcgcaaagattctacttcaaaccctttatgactcccttgttctacaggtatatgtttatgttatgacagatacctctaattagctaaacaagaaaaaccaaccaaataattccccacatggaaattaaggcttttggaccaagatcttaatgccagccctctgttttgttcctaagtctccctacaggcccatgtatgttcataaatacacataagcagtgattgtctgaaacctggttcatggagacgtcagagttccagagtctgtgaattcacagtgggaatgggagattggagcttctattgcacaggcccagcacagtctgtcagcagattgtaaagggggcatccgggcctttgagccttctctgagacacccacagaaggttgtagcttggagcagcacaatgaatcagtaacagagaactcaggtgttaggaggcattattgccagctgcctagagttttctgttactgagatctatgggagcagtgagaagcagtggacacttctattcttgttcagccacagaggattagagcaaaataacctccctttgtcagtgaacattgcttggttattcctatctgtgagtcctttcagagctcacatctctaactctccttgttcatctctttctaggggataataattccatgtcaaatgcttgagtcctacaagtcaactcctcaattcctagaccagtctatgaccagcagtagtaggaatgactccagcaaggattctgaaggaagagattttttgtctgaattcaggcactgtggattctgccatttaggccacctatgaatgcttcacatagggctggataagctgggttcagaaaggccaaatgtgcaccttatataggaaaagaaaacagaaatggataattagggtttctatttgtgttgctaatatcttcagggactgaaaaatctccaaggccccctccaggactaaagttgtgctattctaaattacatccagtcactgttcctgtaagcagtcatttcatattttcccattttttcctcacttctaggcactaattccctgatctcacataatgtcaaataacaggtttgtggatatggaagtgcaaccacattaactgaatttggtcctggaattgccaatctgctcacattgcattgttttagttcagtaggcagagcttcacatcagctaactttgaaatgactttgattttcagggctcaaaaataaacaaaaagaggcaacagggcagctgtctgaggtgcaacagttcacagtagagggagaggaagttagaaaagttccctgagaaggaagtgtcggcaagtgttatgactgaggtattgagggagaaagtctccaccaatgtatccaggtttatttctttctccaattcaacttcagatttgagtacagtctttcctctctctccctgtctctctgtctctgggatatctatgtatctatggagatacagatttgatttatatacatatcaatctataaaatatacatattgtcctgagtgttttgataataatctctgtagataatttatatagtttatgaatatatatataaacttttgttagtagaaaattcccacatcaataggtatatttatctacacatataggccttttttttttccttcttaagaatgccaagggttatgttttcttccttttctttttgagcatgaaagggtcaccctggatacctgccctttctcttcaaacaccatagaagttgaacactgaatcagctgtctctgcagtgctaatgttgacttcacttccttttgacctactggcatttcctaaatgtgtcatcattttctaatttcctgtgttcttgttcgcaggtttaatttttaatgtggggctctctatgatctatctgactcctgcatttcttttgaatcccagaccccacttcttttctcctgcctctgagccttaagttctaacctacagtttttccgttctctttttgcattttctttctcttttgtttctcctgtctagagtaaccactcctctgaatttaacaggcccccttccattaagctgcaagatacagcccaaggatctcctctggcagataagtctgtcttacctcccagagaggcaatgtcatccttttttgtgctaatgtggtctgttgtatatttgctgattataacacttctctggctacatcataatatgttttcaagcttgcctccctttccagacttaccatcctgaggacaatatactttattcagtagtgtccccatatgtatcccccacttgggttatgtgtggcacagagtagctgtgttttgaagcaaagtgactagagaagagaccagcacctcacactgattcctatgtcagcattgaaggatacattattttacctttatgggagacctcattaatggctgttactctcagtcgatatgacaagaatacctaaagtttacatcaggcattttgagctattctgtgggtttataaggaagattttatatacatgctacaaaatcaatatagcttcttgttttcctattgccataactcaccttacatcggatttcagatttagtaagtatggccttgatctttagtttcagtggtaggatctaagaagaaaatcctgatttgatgtgaacctaatattttcctaaatatcttattttcagaatttcctcctattaaactaagtgcttaaaaactatagtaatatcttaatttccaataatcagtgagacaagttcaaactaacccacccaaacaaactgtaaattccattgtggcagaaaggtaggctgttcttggggacacaggtctggaactccatgttttctgattccttgatcatggttccagtaatatatgttgactctatgatctagaatgtaccgtcaggtgtagaaggaaaatatgagaagtgctgcagtgtggtagataccctgtttaagtaatgctgtcccccttcagcttgacagaaagagaaaaggaaaaaaatgctgagaaaacaaaaaaaaaaatcgtgaataacaggggcattagttgaattattttatgtgccacacaatgtaataagtgtcatacaggtattaatgaaattgattttttacagaaagctaagaaataggtggtactgtgtatgattcccatttcattcatagaaaggctgaggcttagaaatattaagtaactaatagtccagtgcaagacagccagcaatggcaccaagccactgaatgcaaggccctttctcttgaccaccatgttaagccgcttctcaggattggagaatacccaaaaggcatcttagggattttaagagttaattacaccctgagcacacctagagacagcaagaggtcaatggacgttcctctcacacctggagtaagagaggatttgattttgccgggagctagaagagaaactatgtgaactcaccttctgggagcctggcttggtcctcaggcaacttcaagcttcagagctcggagggcatccagagcatggcctgcacaggatcagggtggactaatgggcaggaaatggccaagccttctcccttagacctgactatctaaaaatgccatgtcaattgtattctcaacaagggtccaggctgccaccccaaagactcaccactcaataaaatatgctgtatatatacatgccgaagtaaatcaatataccaacctttgatatgctttctcctgcattcacctaaaaattctagcaaatgattacatgttcatttccttactggatttgaaacttgcctttttgttcctctagttatgtatgcttttgaattgcaactgctcagcatcttttaaagtttgtaaagcaccatgaaaaatcattgaaatgaaaagcactaaaatatgtaaattgttgctattgttcttaagtgcttcttaacataggatatgatcatttctaagacaaagtatgatttctttcatgtccacagtgattatgtttacagcatgggatcagtcttcaatatatgagcagtattacttttgtaaagttaaagaaaagttgctttaaacttttgaaatttatattgcattttcattaacctttttttctcatgcctttatttttattctctatttttgaagaaaatgatcagtttgcagaaattgcaaaggcatgctgtagtaaaattgtcagtaaataactatgaattaggcactgcattataaactctgattttaaaaagcagtttaattttcttttagtgtgaaatataacaaatattgatttgggagggattgcactctgctatgtagtatatgagcaaagagtttcaaagttagttttttaatagagacagattagaaactagcacatggaggcacatcttcagtttgcaggaaatttatttttcagaagtctgtgtcatgcttaagacaattaagtcttctccctcctaccccacccctatctcctgctatacctgtgaaaaataatttgttaagctttgctttttagttttaaaatttttaaatagagacagggtcatcttgctctggtgcccaggctgcagtgcagtggtgcaatcatagctccctgcaacctagagctcctagactcaagtgatcctcctacctcagctaggactacaggcatgcaccaccacaccgggctaattttttaaaattattgtttgtagagacagggtattgctatgttgcacaggctgctattttttatttttaatgaaaaattattaattagatatatttatggggtacagtgtaattttcaatatatgtatgtactgtagaataatcaaataagcataattaacacattagtcatctgaaatactatcatttttttgtgatgagaacatttaaaatccactcttttagctttttggaaatatacattattattaaccatagttgccatctgtccaatagaacaccagaagtcattcctcccatctaactaaaacttcgtacattttcaccagtgtctttcctttctccattgactctccttttccccttcctcccgtcagcctctggtaatcactgttctactctcaatctctgaaagtttgattttttacaccccacacataagtgagattctgtgatatttgtctttctgtccctggcttatttcacttaatgtaaggttcatccatgttgtcacaaatgacagaatttcctttaaaaacagaatgctattatcatggtggccaaacaataagaaaattaatattcttcctctttgtctttagaaattagaaacagtctaatgcagttctgaaatcctacagcctccaaaaccaggaaatttcgttgatagtgtatttcctgatgtctgctattggaagcataatgatcattctctcaggaatccctcggtcagagttgcaactgattatatgaatcaataaatgcttcttgacctgtggtcagtgtaaaagcaaggttctagggatataaggttgtctgcccagaatggagctgtaagcatggatacagaagatcctggaacaacaggcaggtgaaggagaaagaagctactgagagttacaaagcatgcagtagagtgggatttatggactggcagggaactttaaaataaaaggttatgcttgacttggctgtcacctttaaggaaagaaaattaggtttttcaaaaaatattatgcaaattaaaaaatgacctaaccagcctttatggataaatctatactattgttctaagtcaggttctgatgtgctggtatacagataaaatacagatcaatttactcgttgaatgattggcgaccatactaattgggattcataactgtcacccaccatttatgctatttgagagcaattctgcacgtaggtaattatagtagattgcccctgtgccaagaagacattgcataaatccttcagctgagatacgactgacaagctgtgagtaatagagtgcaccttggaaaagatttatatttgaggcccagttagctggagtgctttatacttttcatttctcaataacttgactggaactaagacagtcagttatttcccaaattctccgttttcatgataggataatcaataaagagcaactattaattcagtgtcgctctgatatactagactagacagttttactatgttattgattacttctgtaatttaccactgggggtagacactctgaaggtcattagacataggttgcttcttagtgatgcaagttcacttgtggtaagcagaggttttgttgccatgatcagctggactctttgattccctatgatgcatggagcaaagaatagcacaatttcatcaatcatacatcacattgcatagcctacaatcaaagggcaaggtggtgaggtggctctttctgtgcagatggagttctcagaatgaagccccagaagggctacttgcccctatcctctcatatcataggactttgggtagcccccagctgtttccctgcacctactctctcggagaggttttccattaccatcaggcatcattcaaggagttctcaagaaataaagtaatctatgtgatacaagtttcaaatatagtcctcaaagacatcctggacaactgttctttccaaactcccatgatttatcataggatatttcagccaagacatcttctgatttctaaaaagaaatatctgtcagcagaatttgtgcactttgtaaattatctgctttcccccaataacatgttgctgtgttagcattaacttgctgaccctacgctttctccccaagatttgagatgttggaataattagcaaacccttcatctttattttttttttttatctaggccatgcttcaccctgcaagactctctcctttatcccattccataaatatctaccacacatattctatgtggctttccttgcatagaatgtcaggaaacactgtctatacccttgttttaataagttgttgtcctttcaaacctttgcacttatatcacagatcggatctactgattccttttgaattcctcaataggtacctccctgccaatcacctaagcacctaaagcccaactatcccactttcttagagatactcctcttaatttagatacctagtcctaagcttctaagcctctaatatatagtagaccttttgctatatgttagaccctttgctatgtattttgtaagattggaggggtctgatttgttgaggagaggggaataaacaaatcagactcctccaatcctacaaaatgctacctttcattatatgcaacaatagcatttttaggaagtgatgtgtttgtaatattttgttatatttgaccttgccatttttaacatgcctttataaaaataatttcttatgtggattggtttttcaaatggaccttgataactccaaacattttattttaaactttagtatagtgtttggttcatatctactaggaataaattaattagtgccacagatggaccaccaaaatttgagactttttgggatattttttgtaccttttttttaaagaatatgaaagttatttatgagaaaaaaataaagatgtaaacacacacacacacacacacacacacaccacacacactcacaaaggccacctataaccatattaatgacatatctatgttaacaaaaccattgtgtgaggttagaggcagaaggggtgcatggtcaaagccacagttaaaagagcaacagaaggagaaaatatagtcctggaagactagaattaagtcattcagaaaaaactaatacaatgtttttatttatttatttattttttagacagagtcttgctctcttgcccaggctggagtgtagtggcgtgatctcagctcactacaagctccgcctcctgggttcaagtgattctgctgcctcagcctcccgagtagctgggactacaggcgcgtgccaccacgtccagctaattttttgtatttttagtagagacagggtttcaccacgttaaccaggatggtctcaatctcctgacctcgcgatccaccctcctcagcctcccaaagtgctgggattacaggcgtgagccaccgggcatgcccacaagattttttaaacaattcataagcatatgtttttataggtccatttagatatacctagattctctatgtaattgaaataaacacatttttatagaccatagaccattatctttttatgaaaaaagataaattgtctggaaagacaactttccagataagctgtctggaaagacaactttccagataagctgtctggaaagacaacttatttggtttaagtattagaaatctttgtacttataaatatatgcaaccagatgttacagttgataaagatgcatgaaaaatggccaaacataatatttaaggattttactaaggaaggtttaagggatataaatttcatttctcttccattaatatatactatttatattataaacttttttaaaaaaaatgagatgagtttaacttacattttcacttctgtgccttctagaaaatagaatcatatggagaagtcaaaactttgtcacagaattaatgtatgccccaggttacctgcattattcatagtaaggttaatctttgggataattattgtcccacttaacaaacattcacagtggtaaattacatagcaccctaaagctacagaaatacaggacaattaatgaaatgcaaaggtatctgatctgattctagtgctgacctcttaaaagtaaaatcattgctattattcctgttaagagaattttcacttcatggaatgggcctgtgcctccaagaataacatggagctgttctcaagttgtttcactttttttgaaagttaaccttttgatatcatggataaaagttaacatttgtaaaactcaagctgttagcccaaatgcaaccttgcctcctatgttagtacattacgtcaatgacaaatgagccataagtttcaactttacagtagtagtagataccttgacctttgagacctcactcaagtcataccatgggtgttctgatattttggtggtgtttgcagtcatgtgcaaagaaaaggctatgttttaagttgtataggtcttaatcagtacagatttctgttcctattcaaatataaactttataaaaattttcagaagttattcagcaaaagaattaagaattcaaatgatgccgtttttaatgaaattataaaattgaaggagatctgcagatgtctcctgaatccttggaaatacgaccaagtcatagtgcagtcattaatggattttgcatgggtaagtttcaagtctgaaacttttcctttgttaagaagtccagttaatcaattgcattaaattaaaagatgaatgagctctagagatctgctgaatagcattgtgcccatcgttaacaatactatattgtgcatttaaaattttgttaggagggtagataatatgttaagtgttcttactataattttataaaaggtaaataaataaatgaaaataatatactgccaatggaatttgaaataaaaatttaaaaagagtattgatagattttatattatgtccaaggaaaactattttaagtggacttaaatttgggaaaggaaaggaagaatgatacaaagacatactgtaagtatttttatcattatttatcattaaatatattaagatattctccataagcattattaccaaaaaaattctctttttgggcatcttgttgaaacagtcccgtaaaatagtatttcatgtgactggcttcattctcatgaaactaaaccacatatatttaactatctccttaagcttagcttaaaaccaaatatatataattgttactggtggccaaagaaatcagttcattttgggtcactcattttagctgagtggacattcctaatggattaaaaaacaaaacacagtgctttaaaatgcacttaatttttttttttcccccgcggtggtggtgactctgggcttcttctgcagtgctttaagctaagctccccagaactagtgttgatattgtttctttaacattaatcttcagtgacataattatttctttttaaataatcagtatgctaagcattataggactgggaagctactgactgaaaagagatgtgccgtaatgaaggtactcctttttttagataatttcggctgcttatcagaacagaagcagctgtattttggacttacttagagttgctatttaatgcaccatgaaaaagcaacaagtgctccaccagaaaaatcatgttttgttgaaagaagtaaagcaaaatgagtttcagctctataccacggaaactcacaaaagtaggggaaagatcaacttgagagtatatttttcggtgttcgaagtcagttaaaaaagcaaatttgtactttgaacttagtgtctattgcctcagagtaaaaatatttttagaatccttatcagtcagaaaattctcttcttcaaacaaaatgaactggaatgtagagctaaaataaccccattttagtttgtggaatggctgttgagcctttatttttacaagcaaatggcaaacgcttgctccaatgtatagctgatgcaaattaagcacatactctgtttcataaatgaagggggaattattggaaacactcttgcactgatcagtaaaaaccgattaccatcaaagaagggcctgattactaaccaccatcttagtgtttagctgtaccgtctggccggctcagaggggaaaatttgctgagcttaaaaaatgtttattctgactttcaactcatgcatgtatagaacacagatgaggaaacatctgatgtcctttggattcttgttgttaaacaaacgttaactcatcttcaagcaaaaatttagtcgtttttcttttttccccctcactgatttggtttcttaagctattgagttacaagcactatggaaataagcactaaaaaaaaacctaagggtgattagagcccttaaaaatatctgaaggataatgctgacctcatgttttttcacatacactttgatctaggtggaattttattattgtaatttaactcatgtggcgtggaggccacattcaaggcacagacctgagtgcttactggagacagatgaactcaggacttgcctgtgcctggctgcagcacttttgctctaactcatgccttgtctatggatggcactgcttttcccaccgtttagtgttggttaattattgccaacctgtagagcaaatgactctgcttaacagtcattttccctgaaaacccttccttgattattcaagattaagtccttagtgtcacaagtttacccattccatagcacgtacagttgtcatcatgatttcttattcgattaccaatcttacctccccaagcctgtaaacataattcagtgactgcatttttattcaccactgtattccaggtcctaaaactaaccctgacacataccggccactcggtaaatatgggttgaatgaatgaatgaacaaatggacagagaaatgaatgagacaccttctctgtcctcatttcagtttaaatttaggaacaaggcatgagtaaaagtgtgaggagacaaagcagaggaaggcaagtgctgaaagttatgatcgcgtgcagtgatggccattaagatgatcttcgtacaggaattcatacaggaatttttttaaagataaatgctggcttatgcaggctctgaagacttattttttatatccattcttaattaaactaatgttgaaaatagtacacatttatggtaaaaagccttcagtcctctttgggggtcatttatttgcttgctctctgggaagcttctttcataaaaggatgcccttttactagatcccaactgggagctttatgggattatttttttcctacttaacaaaagtgggatttaaactctaatttccaaaaacatagtggctagctaaaattggtattgatttaatgttctgggtcaattttaagtgataaattaacattagcaaaaaaagaagtttctaaattctgtaaatcacatgggatttttcatcggctcattcccttacaatctttttctcagggataaggttttctaagtcaatattttcccaaatgcatgcccttttgtcttccattaaatatggtagtctttgtttcttcaatggccatgtgagaacagaaggaaaatttcttctcagagaagacagagcaaagtaatattcttgccaaaagttatcacagtttaatagcaagaaggaatgtacacgtctctaaacaaaatgtgcaatgctttctgatgctgacaccatttatttagtcttattaaatagctggtaaaatgatccaagtttcagagaaacacaagctgtgagtggctgctgcacgtgacaaaaaaaaaaaaaaagacagccccaaaaagcagcagggagaagatgtgcgcagagtctgggaggatcacctttctccacagctttcccttccaaacctccaaacccaggcactgctttcctcttgcactcctcttctcctgatatccattcattcaccttatttctacactcttaccccttccatatttttaattaacttttctctttgtgcttgcacacttgctttgctttgctttcaatctatagttattttatgggtggcttggcacctcaaccagatgggaattaagtggaaggcagaagttggcttgcacacacaacctctaaataaatgcaggcctgggaaggatgattcatgctttacctgtattctttcagctgcagtcagtgtttttccaatcttggtaggcaccagcatcacctggaaaattgttaaagcaaaacatgctttgacttgactccagacatactggggcttaaatctctgtatttatttgccaagtagttcaaaatttagtagttgggggaatgggatcaccaaccattatggtttgccaaggaacgaaggatttcctgagctgtgtgctaaagcctgaatacttctgagtaaattgagacatttagttaccctatttagggttgaagatgagggccaaaatagtgcatgcatctgtctgctttccatctttccatcctaattattctaaaaaaccatacaacccccacttttatgggtataaaatagttatgttacttatctatttttatttttgcatattttttagttattgcgtggtttattacatataatgagagcaacaatctcataacattggttttagaattaaatgagataaaatatgtaaagcacttaatgtaatgcctgatactaagtgttcaatgaatgttacatattatttctctttaggtccaaaggtatttattttcttcttggcttcctggaatactaatctttggtaaaggaagtttctcactggtctcctaagccggcagtggtctgaggcatgccaccatttctttgagctgtgatgtgttatatcatcttcttccaagacaggccctcttagctagtgtgctaactggactttctctctctgactcaaaggggctgtgcctcagaagctttgtggaggtagaaaggcttatccacacttcccatgataggagagggattctacccaccttctttctggattcttctatggactgtaatgatttcttcctcagtagtgtctattcccagacccagcaactgctttttgaaatttgcttgcagacatcaaccctgcaactctctatctagttctcagcacttcaacttaaggctaatattagaccaagacccacttcctctagaaataaatccttttctcccccatactttcttggtcaaataaggttacagacttatttggcacttacttaagtagttttttttttcatccttaggatggttctcaatttgttgactgatgaaatcataaaacgtaacgtaaccctctaggtagcagaggatgtgctttgtaacatcatccagcactccttgttgcattatcctacagtctcagtaatctgcattgtctcacagatcaagccatttgctcattcagtctgttctgtgccaaacatattgataacacatacactgaaggactgctggcattgcccctccccagaataagcaaacaagtcatctttaaaagcaagttgtttcagccactttgatagaaattaagttgcatacaaggtcacaaagtacatcagtgaactaactggaaacacaacccaacaaggcccactcccaagcctgagcactttactggatcacgcttccttcctcggtgaaaggcttcccacggcaggaagaaccggagagcaagcctctaaattatacatgactgtttgtctcattttcactccgtggctaattgaagacacaggggagtgctgcttttttggcttcatctctcatcgcatctcatttgtctcacacgtgtcggggagtgcactctgcaggttagctttatgaagggttgaatggaatttggtgagctttgaggagtcccaggattacaagttctttgtcttggttcacaacaagctgtgcagtccccttttgtttgtttcctcatttgccattttaaaataaagtaaatacctaatgctagatgacgagttagtgggtgcagtgcaccagcatggcacatgtatacatatgtaactaacctgcacaatgtgcacatgtaccctaaaacttaaagtataataataataaaaaaagtcaagcataggagatccacagttgataggaaaggaatgtgaatcactaaagagaaaccatcataatatttaaatgaccaaataaggaacatgaaaatgtttcttctcctataaattttaagcctgtggggaatcaaacttagattagttttaataacaaaagttcagagttcattgtaccttgttctgcctgctgaagattagcactgtggtgggagtgtatatccaggttgccaaaaccacagttctgcttggttcagtgactcacaaattataatttttgaagcgtttggaagaagaatttccatatcatatctgacaatatgcttttggcccatagcccttaatgcattaccttttatgtagtataggctcagtgcacttttgagaattaagcaacaaaaatagtaataaaatgtcactgatgataaagaaaagtaatggcatcaactaatattagataactgtaggatgatttattgcttctgtatgcattttttgttcatatctatgaagatatcggcattggttaggtttacagatgtctgtgagaaaacacatcaccctctgtcaggaagggtcattgactattaaattgaacaatagacctaagtgtgctcacttgggtttgcaacagctaaagccctgttgtctcctgcttggtcactcctaccttgtattaaatatggatttcatgcattacatggagttttcaaggatagaaagaaggatttcagtgggacaatctaactttggacatcttgtgatgagcagagaggcatcattgagaggaagagttttaaaaacaggtgtacttcagaaatattaaaaggcgatatatacacaaggaagagaaacaagaaaaaaagaagtttggttaggaaagtcctataattttttacgtggaaagaaatcaaaggcaaagcaaatggaaggatgctgtcctgatagaagctggggtgtggaggaagagtaatgaaattcagaatgttggtcctgcacagggtcttgccagacacatccttatcctcggtcctcagatgaagagccctgtctcctggagcctgagggccaagtgcccagatgcactatcattctaaggaattgttctggtcagaatctggagttttcaactcccttctgtggtccatttttattatggatgctgctttgaaggatggataaagtgctaggaaaagttgttatcatctaaaaaaccagaattctttctactcaaaggtcttgttctctaccatgttcccggtgggacattttctctgtagttttttccaatatatagtaggttatgacaggacactgcttatcctcacaaggaaggcacttctgttaagaattcagcaaaaagaaaaaagaaaaactaggagagaataagaaatggagattgtttaaagaaaaagcaaaatgccactctagttagtaatactgccacttaatgacagaattagtaaaagtcatgaataaagcctgcatgatggattcactttttcaggaactctctttaataatacaatgttatattctgagtaacaactttacgtataaattaaataagttaacatgaaggcatatatgtcataatcttagagatggttcatcaataagcatctcagagaccccattgagacatatcctattctgggctctggaaattgatgatgaaaaagacagggaatgtctattcagcttcagtatgcagctgattttttttttgatgtagcttacgtaccccaaaatctttccaagtagatttaaaatggtccattcctcatccttctgcctcactcagtcttatggtatgtgactgtaggggttcctgtgtagttttaagttgcttctctgcaaaattccttagctaatcagtacttgagcccatggttttctcacctacgtttcacgggttcagtctatgccctttgatttggcaactccttttcaaaatattatctgtgattttcatagccatcaaaccgttaccactcctgcctcacccactagggtctctgctgtttagactttaataacaagcattgagtcttacaagagattgccattggctatactggcatcagattcatcaaaaaggaatgggatgaaagtacaacttgccagcagagcaacttaaaatcttcttttaagggagagattttatagcagtacgtagtgcccaatagacatcattttgccatgcagcagacagttcaggtgtaagaagacatgttgagatcagacagtcagaagaactgctttggcttagatgcctcatgcctccaatggaaccaatacttctgacagatccgtgggcatagctgccattgtatatgacatggggcatgccagttagaaaagtcaccacattcagggacactcaaaactatgaagactgttccagatatgtatagaccaatttgccagccaggtgtcgtttttcctgtaggcactattcctaagtaacgcaggtggccaggagagtagaactggaacattcaatggaggttaggtcttcaagaagagggaatcattcactggagctcaagtcttcaagaagagtgtagtctttgcctacaatcctggattaatgaacacttccattctgtttcacttctccttagagctatttttaagaacactggaatattagggaccatatcacaaagtatcttatatttttaacttgatcaggagataagttatgctaatattatgcactttacttccagctctccttcgtgtattatttttaccaaaatcctagacactaatgacacacttaatgacagaattagtaaaagtcgtgtataaaggctgcatgatggattaactttctcaggaactctctttaataataccatgttatattctgagtaacatcttgatgtatgaattaaataagttaacacaaaggcatatgtgtcataatcttatttggagctggttcatcggtaagcatttcagagaccccagtgagacatatcctgttctgggctctggaaattgatgatgaaaaagacagggaaagtatcttctgtaaggggcctgtacttgattgggggagaccatcaattggtttaaaaagctagtaatctaatttcagatacagtcaagtattgaagcagacagggcatgaggagtggggcttcaggaaagtcttcttttaccagagagctcagccaaggcccctgggaggagatgccatctcagtggagaaacaaagggtgagaaaaggacatccatgcaaagccagagcattccaagagaaaaaggagcaaacacagatgcccagagatcttaaagtgctgcatatataatagaacagtgataacaacacgttctgtacttattgctaatgtttattctgcttactgcatgctaggcactgtgtgctaagtagttaatcctcattatctcattttgtttttctttttattgcttcaagagacagagtcttgctatgttgcccaggctgaacttgaactcctaggctcaagtgatcctcctgcctcagcctcccgagtagctgggaccataggcgcacactgcctcctggcattctcattcattttccaaactatgtaaaagactttacagatgaggaaactgaggccaaaagaagttcaattacaggcttagagtcatctaggttttaggtttcgtatctgagatttgagcccaggctcaaagcctagagtctaaagcattcccctcaagctaaacctggagttttctagaagaaaattgtcattgccaccttcaggcctggtgagcttctgaaaactaagtgaagctacaaaagagatgaggctgagagtgatcgtggagaaataataagcacgtatatttggtcaagcaaatattactttgcagtctgttagctacagttaaatatttaacacctttgaaagctcagggttgatgacattttcaaattgtcaatttctgtttacattcgggcagtctgcagcattactgtgttcaaaaacagttggactagtcttactttgccttaattgaaaggttcattcttaacacccaaagcagaagttggcgaatgtcgtctaaacaaaccaatttcaacagagttttaaagttacttagagatatagtgctgtcagaaaataattctctgaaaagtcacaaaattctgcagcatgactcattatttgcagaccgtttttgtaagaaaatgattggctttttaaaaatgtagtgctgtagccagcaacaataaaccccctttggaaaacacatgattcggtttcatttacttttaaagccttttttttccgtctttttttctttgtttctttctttttttggggggtgggggggtggtgtacatttttactaagcactagcctggagagaaacacccaagtatcctgttcactgaaaactacataaaaatagtacaatctaggtaatctctcaatgttgtactttacaaatatagggagtagaatttcattatgttaatagtgttattataatatagcagtagtaatgatagcttacatgtattcaacccttactatgtgctggcgcagttctaaacactttaacaacagctctgaaatagacactaagaacatcctcatcttacagatgaaactgctgagactgaaagtacttaaataacttccgccaaacagatggggacaaattgccaagtggcagagctgggatttgaacccacactctctttttccacctcactaaattatctccagaagagtgtccatagcatcttcttttgaaacccagtatcatactgggataatgaactgatatgatccggatccatcaatacgtttctcttaactatcttttcaaggtatgttcagaaaaaaaaagaaagaaagaaggaaagaaagaaagaatatattttcttttaaagccagcacaaatgtatgcttctgcccttggcttcactagaagaagtttggaaacctccatatactaggcaattactaaatcaattattatgcttgggtctgtatcaactttgtaaatgacataaaacatttcatcaggacataccttgtccctgttaaaccatcagatccatcccattccctgctgactggtttgcaggcttacagaaacatcagatggctgtggcaatgagtaggatttggaccatccttccaccaaataatgacaaactatacggaacagttgtgctaatgttatgattaagcacccttgcccatcgaccaacccctgtcagatttccttatccatagagatatctctaataataaaggatggaacttaaatccacatctggttgagttcaaatccagcaaattccaaaaaggacatacttcccattcctcaatcttctgacctcagtcctgttatgtaattgagtgtggcttcctggttgctaaccatgctgtcataattgcctagccataggtaaaaggatctcacacagcggttgaaacaggcgatcaagcaagttttaatttaatttcccaagccccgtctcctgttttcttacgttctccacttttctgtgttcttatctcttctattccttcacttccttgtttttcctaactcttgtgcttactagcaacattaactaaacccagctaagcctttccatttgcccagataactctcctaaacagagcaaatcacatctacccttttgctcaggcattccagtgtgctctgacactactacttttttgttgccaatgaggtttttattgtttgcttaacaaaattatttcattaagtgaatggctttagagattcatttggttttattttattactggcttggggaaaagatagcttttgttaggagaatatgccaaaaagtagaatcggtacctatgtagacattattgttatgatttatttccctgtatagtaataacattattttataggtttacgtgaatacatttaattgctgtcctgagaattccaaagctaatgtgtacaagggttattgctaatgcctggtgcatgctgaatcagtaaattccagtcatttgtgtatttgtacctacatatatctatacattatgtctacatctgtatctgtgtctatttgtatatgtatttctgagaccagctaagagttccctttcattaaatttctgttgccatattaaaagctactttctactaaaatatattaagggaaaagcaagttatcaagtccaccggaccttcatttataacaccagaagaacactcagtgtaagagagatcttgaaagaggagtcaaaggtgagctttttcaatgctggtaattaatccttgctttgcataggctaattgagggcaattattgaatacttgatgtcatttcatttcctagctgtcaatgggattacagcctgctttccctgctaaatctgttaacctctgtgctttcttttgctggtagagggatgttcaagatagaggggcaccaagagctttgttcttttttgtgaatgtcaatatttttcttcaaaagaatgttgttctcctttgacagattttttttctcttcctaatatctctgttaaggcacaaaaaaagaagcagcaactttctgttactgttggtaccaaaacgaagagagtgaattataagagagatttcctgggtggtctgccttactttatagactaactggtgctcaaatacatgcaaatacactcactaacttgttcagcaaatagttactgagtagctattaagtcatagcattgtgctaagtactggggagaggtgagaaaggagacattaattctgcctttaagcagctcagagactacttttgaggttgaggtgacatcaatgcacttgcttagatacggcctttggcaaaactggtaatattttaggtacccactttcaccattcttgcacctgttgttacaccaagcttctataccaggacaaattatttatttcaccatccttaatccatttagctaactctccaccctatctcacctctcagccctacccagataaatcccattccaagcaaatggcttatttggcagtagttgagcccatacagccaagtctttcccatgggaaaatatgtgggaatgtgtgccttaagtttctgggttggctggatacatttgccttgatggccaatgaggttatggccatgttttgcttccatccaataactcagagaactgtagccaatccaagtagaacaaatcatttttcttctaaaagatcattgagataaacatttctggattatttatttgtttgtttagttttgcttaaatacttgccaatctagattttgctgtatgtttataactatccttttatattttaaaaacattttatattaatctgccaaatataattttctgtcacacactgcttttctttccagtttattatttatatcactttctatgcctattcgtgtgtgtttctcgagagaaaggactgagactaatatctttacaagcctctcagaacttagtattgcggctaccagtggaggagctgaatacactggactgaattcactgggctttaatcaatgttaattactattttttgtataagaaaaataatttacatccaaaatagccttctaacatacttgatgacaatctaaatgaagtttgttccttcaactcattctggtgtctttgttaaaaattatggattacttatttataattccatattgagactacagacaacttggaaaaatgataaaagcctcaaagtatctatggaccattagagtatacagtgaagttatagtaatcctgcaactagttgctgggtggcgtgcccctccatttcactgttatccatcacaaaatcatgtgatccgggttctgtgattcaatttcaaagagatagtttgattatctcctgaaaacctaaatggcttatgttagcgtcgtatgtgctatatgctatatctgccccagttatcactgtctctttttcatatgggccagttctttgttcttttgttctttgttagaggccacctttgtccccaatttttttcagaggcaccacgcatgtaccttagagcttaatgtagggaaatgacaccccaggtcatctggtgaatggggagactcttccactctataaagaaagaccattctggatattccctcatttgtgtgcatataaaccccctgggactggaagatgctactcttttccactggtggagtttgtggtgaagagttgaggacattctttttttccttatggatccaaggaatgtgagttatcttacaaatagagaaccagacccaatacacatagagatgaatacctagatcaggagaagtgaggcaagaataaggccaaagtagtccaataatttttaattatacatgaaagtcattaagaagtaatgaggatgaaaacaaatatggattcaagacccgacaatttaaaaaaagcatttttttccgcaaactgtgaagaaaacacaccagtcaacctataattaaatatgtgtattagattcatttattgaaaaccaaaaaaaatttaaaagcaaaaaaaaacacattgttttccttaagagaatattgccataggctacacatatagtcaattatgtcccaccatattagatgctatttgctattgtaaacaattagcttagccatcattgtggatttattttttccaatctttacatcttcaaatgactcctggcttagtcagtttgttaaaaatggcatataaaacaacccctaaagctttctctaaactggtacacagcattcttcattattaaacagctggcactctaactatatgaaatttcattaaattaaccttaatgactttatggttcacgatcacaaaaatacacacacacacacacacacacacacacacacacacaaaataaaattttaagatgtaacttctatgcttatctaaggttactcctattaaaggtttgacaatgttaatgtttaaaacaagtcatagaatgattcaacaataatctgcattttatttttaactttgaacatctattttggtcattgcctttatgtttcttcatatttatgcttcctgtgatagtaaaaacttattcctataaaatgactgattttatttttaatttctttgagcttgtctttattgactgaaaatttatttttttgattacctacattgtgtaaagtactgttataggcatagaataaaatgtttaagcccctatttccaagggtcttacagactaaaagaaatatataattggccgggtgcggtggctcatgcctgtaatcccagcactttgggaggctgaggcgggtggatcacaaggtccagagatcgagaccatcctgaccaacatggtgaaaccccgcctctactaaaaatacaaaaattagctgggcattgtagcaagtgcctgtagtcccaactactcgagaggctgaggcaagagaatcacttgaacctgggaggcggaggttgcagtaagccgagatcgcgccactgcactccagcctggcaacagagtgagactccatctccgaaaaaaaaaaaaaagaaaaaagaaatacataattatactttgtctactctttactaacaaaagtctttttcgcaagcgccattttgatcctgtgaagactccaggaattatttctattttgtaaatgaaaagccaaggttcagaaacaagcaagatgcccaagttaagggatcgttacaggcagaaccaaaatatggattttgtacacatccaggatccttttcccagtatttctgtccctagagttggggtcctaaaaattccctgtcagaagcatttcaaattgttactatatgaaatatagagaagaggagcctttcaaaggccattagtgaaatcagaaatgattttatgggagagttccacagattaagataatgtgatcctctgaaaatgtctgagactgtctgagccatgatattagatgtagcacacaaaagtcagggctaatagataaagaaaatattttatatgtacttttctaactatgtatataggtaaaatacctattagggtcagcatcttttgaaaaattatatatgtataattttaattgacaaaaattatatgtttatgttgtacaatatgatgtttgatatatgtatacattggaggtggctaaatgaattttattagcatatgtattatcatatatttatttttgttggtaagaacatttaaaatctactttttttagctattttcaagtatacagtatattgttcttaattacagtcatcatgagatacaacagatctcttgaacttactctaactgaaattttctaccctttgatcaacatattcccaatccccacaccctctagcctctgataaccaccactgcactctctgcttgtgggttcagcatttttagattccatgtatgtgtgagatcacgtgatttttatcattctgtgcttggcctattttacttaacgtaatgtcttctaggttcatccatgttgacccataaatgacagcattttcttgtttttcaaggctgaataccatttcattttctatatatatcacattttccttatccattcatcgttactagacacttaagttgattccatatcttgcctgttgcaaatagtgctgaagtgaacatgggttgtgcgtacatctcttgtacttgcttatttcattttctttggatatttatccaatagtgggattgctgcatcatatagtagttcgatttttgagtttttgaaaaacctctattctgttttccataatggctgtattagtttacattcccacccaacatgtataagaattcctttttctccacatttttaccaacatttgttttcttttgatttgataacagtcatcgtaacaagtatgaagcgatatctcatggatttgatttgcatttacctgatgattagtgatgttgagcacttttacatatacctgttgaccatttgtatgtcttcttttaagaaatatttgtttaggtccttagttccattttaaaaatcaaattatatatatacatatatatatttgcagttgaattattatggcactaggattctgggtaatatttatttattattttctttaagttctgggtacatgaacagaatgtgcaggtttgttacataagtaaaggtatgccatggtggtttgctgcacctatcaatccatcacctaggtattaagccctgcatgcattagctatgctgcccttccccaacaggccccagtgtgtgtcgttcccactgtgtgtccatgtgttctcattgttaagctccctcttataagtgagaacatacagtgtttagttttctcttcctctgttagtttgctgaggttaatggcttccggcttcatccatgtctgcaaaggacatgatcttgttcctttttatggctgcatagtattccatggtgtatacacacatttttatttttatccaatctatcattgatgggcatttgggctgattccatgtctttgctattgtgcatagtgctgtaaggaagatatgtgtgcatctatcgttataatagaatgatttatattcctttgggtatatacccagtaatgagattgctgggtcagatggtatttctggttctagatcattgaggaatcaccacactgtccacactgtcttctacagtgattgaactaaatttaccctcccaccaacagtgtaaaagcgttcctgtttctctgcaacctcaccagcatctgttgtttcttgactttttaataatcgccattctgactggggtgagattattgtatctcactgtggttttgagatctatctatctgtctatctatctatctatctatctatctaaataagagagaaagtatacagagtaatataataaatttccatggagccaccacccatcactgttattctctgaagagtcacatgaaatattccaacctatactggaacccccatcttctcctaccatcatatcctatcatgcagcctacactgcagtctacgtacttctctcccaacctactgaacatatttatgcttctgtgctttactgattctgttccctctcctagaataatcttgctgtttatgtgaaagtcattcattcttcaaaattttttcaaatgcccatgtagaattgccttcacctctttgttcctatagaatttagttaataccaaaaaataaaaggtagagattataacgtcatgtaatatgtagttataaaatgttataaatgtttcagggtccttcattttactacacagtcctacagaagaaggagcatatctattcttcactgcagtgtccctatgcctaaggtactgctatgtacataaagcagtacctatacagtgaatatttaatgaaatcaagaagagataatcagaggcagggtgggggtatggattgaacttgattgacagataaaataataagctttattcatgaccaagacagacaggttgtctggggtttgagaactattagaaatagtatcttcctggagtccagctcacagagcaaggagacatgaatatttccctgtagttactggatcagaacaacctgcacagatttactggcaattgttttcttccttctatccaaacaattctacagtactagggcccctgagcaaacagagatgtagggaaatttctgtttatgtaatgtactccagctgagtaggtattttccaaaccccttcctcaaaaacatggattttacacccatggctctgctcacactaactccccactaaagcacctagccttcagcttatttctcagatgcagaagtacatttctaaggccgaggtttattggagtttcctgttatctattttagaatcccatcgctgaaacctcttgtctacttccaactgttgggtgtctttaaaagaagtggcctgtaattttatgtatgcttgaagagaaattctcaaagttgcttaaaatccatgtttgaacttccttgtaaattgaaattatagtccaatcaatgattatttttcccatgaaatgaatggctgattgtgatatggtgcctcaacacatgtacaaataaccacagctgagacacagattgtgtctaaatgctatggggtttcagaagaggcagtgcttcttggaggatgttaagtttaatttgaactttgtataatagataaattgaatttaaatggaagtagcaacacacctggaaaaacttcaaaagaagttgacaggaataaaaaggaatatatatttaagaaaaggaagtaatctcattccccaaggaaaagattttagaggcattaactaagtcccttaactaacaaggtggcattcatttcaagaagaaaaagggcacatttcactgggaagccagtgattaaactgctaaaattacgattctaggtgacaaatctggcagcatcagaaaactagaaaaaagggaattatttcaaaggtttttgattatccagacatgagagataagggcctatattaaagcagaaggaaagaaatatactatagagaatatgataaatgaggtagaaaagaagagtatagtctttcaaaaacttctgtaagttttgaaaatggatcacattggctctcaaaattggttatgtgtaattatcatctgggaaatttttgaaaagacctatagccatggtaatgtttctgaaggcctagggtggggcttatggttgatattttaagtaaatggctcaattgtttctgacacagatggtacgtagatcacgatttgagaagcatcaatttcgtagatagctggagaaggaaagaaaagcaaggtactggggaactatcaaacagctgttctgtgcagtttgctatggccattgttttctggttttaaactttattcactagacatttgttaatttaatattttagaaaacataagtcaggcaccatgattcatgcttgtaatcccagcactttggaaggctgaggtgggaggatcatctgagcccaggagttcaagaacagcctgggcaacatagcaagaccccatctctacaaaaaaattaaaaaattagccaggcagagtggggtttgcctgtgatcccagctacttgggaggctgaagtgaaaggattgcttgagcccaggaggtcaaggctgcagtaagtcatgattgtgcctctgcactccagggtgggcaacaggccctgtctcaaaaaagaaagagaagggactcatcaatatattttgaaaaggaatggtaatgagagtaaaacttgtctgttaacatacattaaaatgatagaagaattttaggaaagtctagagttctcaggtgacttaaggcctccttggtcagtgtggacgccaaacactcagatgttattttcaaaaccataagattagataaaagaagacagagaggaagactagaaaagagctaaagacaaaacagcaacaaccttcccaaccatggagacagcaggagaagtgtaatgaagcgaaaacactgtccactggaacttccagacagtttgcatcaggatattcccaggaagcaaagttagaggagtttcactactccctgtagcttgttttatttgtttcttgtacaaaacctctaggcttttggtagtcatgatatttcttactattatgactatcgttttattaaaatgctacattaagtataaaaataacatattgttcatataagtgtcttctctgagtggtcatgattacaatattctcttccactttgtgctaatgaaatgacctaagctattaggacatacacagctactatacatggccagccagtcagctgtaaaatttccagttgaaaaaaaaaaaaccatttttgtgaaccattaaaatgcaataaattgtttgacgactgaaaacttgtttcagtccaacataaaagttaataaaattatttaaatacacacagttgaaaaacagttttaaaatattttgcatcctgtgactaagcacctagagtatatttgaacaaaaaattatatatatatgcagaagaagaagaggttaataaagactatcagtgaaaccagaactcagcttagtaagtggcacaaaactagtctttgcatttagaaaaatgtgatattattttcaacccgctgagcctattatgtctgcatctcctcagatttttacatggccttgagcaatttgggctggagccagctataacagtattatttcagcaaatcacttcctattgttgtacattttaaggatgtactgaaaggtactttcaagtctgaaaacatcaactgatcacacagcaatgatatctcatttacaaggcctttatgtagccacaaactgttttctttaacagttccactatctcggaaatagttataaacatgaactactctattgccacatttttaaaaaagctgtgccatttacctaaaccatgaacaatgtcatgtgctttaaattctccctaaaataaacaaatactactttccgtatgacaggggttggcaaatttctctgtacagagcagagggtaaatattttctgctttgtgggaccatagggtctctgttatgactattcagctctgccattaaagcatgaaagcagccacagacaatgtgcacaggaatgtgtgaacctctgttccaataaaaccttatttataaaaacgggcaatgggccagatttggccttcagtccatagtttgctatcccctgttctataggattctttttctaccatgtcagtaatgtgaatatgcttgtgatctaacacactgaattatttttatgtttatttttattgatacgtattagatgtatatatgttcaggtacatgtgataatttgacatcttcattaataaaattagggtcattgggatatccatcaccttaaatatttatcttttcctttttgctaggaacagttgatttattctcttctagctacttttaaatatacactacattaatgttagctattatcacccttctgatctatcaaacaccagatcttatttcttctaaatgtatatttgtacctgttaaacaacctcttttatcccctcactatcttttagcatgttgaattatgtcccatactcttaattttgaaaccaggacagtcacttgtcccaactcaagttatgaacagtgcctaattttgagacattcattgcagaagtgaaatggatatgtagagctgccagagattaggaaatcactgagaaattttttaagatgtaggttatagattgatagattactcattctagtaagtaacaatggagtgtagtatatcacaactatctaagtttgtttatactgctataatagaacaccataaactaggtaatttacaaatatcacaaatatttaatcacagttctagagggtgggaagtccaagatcaaggagccggtaggtacgattgtctggtgaaggctgctctctgcttccaatatggtgcgttgatactgcatcttctggagggtaagaatgctatgtccttacacagcagaaggctcaagggcaggagagtccagtgctgtatgaagcctcttttataggggcctttatcttattcacaagaaaggagacctcatggcctaatcacctcttaaatgtcctgcctcttaatatttcacattggcaatacctgaattctggaggggacacattcaaaccacagcataccacaagtggcatttggaaagaaaaggttttctgaaatgccctattctgttcattgttcactctttacacacacacacacacacacacacaccttgtctgcttgacaaaatctcttttatccttcagattgctttttgtgtaaacctcccactcagacgaagtgaaatacctcccaagtgcattgatttctgtttgcagttacaacgccacattgtacttatttgattacatgtcagtgactaagacagagaggctgagggcatggtaagcaggtaggcagggccagagatccagaagggttttgtgtactgtgttagacaggctatattaagccaagagcagtggaaaccattgcagagaatcaagcataaaaaatatgcatcagatcaatgttttagaaaaacagcaagacaactgcatggagaatgaattatagggggattaagtaaaaaagggaaaattggtaggatattatttagtgatccagagaaagatgatggtggtttgaaccaggagagtagcaggcaagatagagagaagtattgagattcaggttttattttggaggttgcacccatagcatttctagtggattggatgtgagagaaggaaaagaaaaaaatcaaggatagcatcaaggtgtttgctttaaactgggatgataatgttaccatatgcaggggatgacactcatgtctgaaagagaaaataagagctctgcttcgtctcttttatttgaaatgactaattgctgaggatatcaagtagccagttggctctaagaatacaggttagaaaatgagtcagagcagaagatattagtgttctacactgtctggggttgtcaataatccgtgaggatttcctatgtatatacctgatcctacaccatcactgttaaggtagtaaaagaataatgatgtggctcctactctccaggaaggtcaagtgtacctatcattacagtagaggacttaaatatgtgagtgtacctatcattacagtaaaggacttaaatatgtgagtgaactctctctctctctctctctctctctctatatatatatatatatatatatatagtcagttaatatagggacttagttaataatatatatataaatactatatatatataatactacatatatatatatatatatatatatatatatatatatatatatatatagtattcggttaaatgttgatgtaggcagaaatgattagaggtgttcagagaaggctacatggaagccatgggcttcaaatgaagtggatggcacagaggacaatgagtttgattggcctcagtagaagcaagggcatcacaactctgctagttcaggggcagtcaggagagaagtaaaatcaagaacaagtgagagtttgggttgtgattttaggcataaggagaaacatatactcctttctttttatattcttatttgtttgcccacagcatcaaataaaaacaggtaaaactctttgaatatgcattttaaggaatttaaaaaataaaacattaaaagtacttgaatatgtaaatctgctttataaaatcggtcaattgaaaatgtggcaacatgtatgatgccatcttcaaatgtcagtagtaagaaccataacagaatgtcagttaatgaaggtggcgttaccatattgagtctatcactgggcatttgaacaaactcttagagatgacagttaatagtacacaaattatgcccagttagaagtcaaagcttggggctcttctaaggcctttcaaataaaacaataggtgagtgccattcaattcataatcttgaattgaggagttgtttcccaatgggaaatctacatttcattattatacaatagggcataaaattcttggttaatttttgtaaatgtggacactacagattcctgtatatttattttacagttacatgtatatttaaatagaaagacataactagtccaatttccaattccagtgaacagaaagcctagaaggaaactcttaggtttgaggatatcagatttattattggtaacatgaggaaaagctcttgcattcagaaccaattctctcttttgagttaggaataaaacacatacacactcctttactttaatagatgataccatacctccagttatctccctttaattcaattttgttaaataaaatttaccataggcctaatgtatcctcaagatactattctgggaaaaaaagaaaatatgaagacaagtaagacacagtcctaaaattcaaggagtggccaacctagtggaagagacagcatattcacatgttataattcatattcacatgagttatactgcagcttcttaggtacagaggatggagaagtggagaatgagaatgtctgcttagaggaaagcattagagctcggccttaaaagaggaaaggttttcacatggacagcgaagggcagaaaattaattccaggcacagggaacagcaaattggagaaaagaataaaatactttaactgaatcatgctatttcagaggactttatggaaatgcttagtttttgaaaagaggaaccatggaggagcctcaaccgttccccctaccccacctacccgcactccctgcatttctattccaaatgaaatgtaaaatgttggttctgtacatagtgattcattcatcgatgaatgtgtagcgatacctattgtgtgtgctctacagtgtcattggtacttctgatgtatgttccaggtacattaattcatccattcattcactcaaaaataccattgggttgctactgtatgccaggaagtttgcaagaccagggctgtagaaatagtccctgtcttgtaaaaaactgcagtgcaagaaataaccatttttttctttactttttaaaacttttgttcaaatcaggactatttaaagatgtaattttttcctactcaagtatattaattgaaatagtatgtaggccattttagctattaatgtttaaagtgaaaggcagttattatacatttatttccaaagaaattcaaaaggaaacaaggtttatcaccaatctttatatctaaaaatatgactagatagtattatatgtgagcttcacaaagagtagtcccaactatgcacaggcctcgttgtttttctttttctttttctttttttttcatggcacattaattaaaatgttaaaacatcttgagttatcttactttcctgtttgttttgttaaaaaataatataaaagccactgctgacacactgacagtctgttgacagctttagcttccagagtgtttggaagactattcctggggcattacgtttgaaaagagttcaaagtgattgtaaacttgtttagattgtgatattgaaaacaacactgggtgaaattgtgcttctaactgtctcaaatgaatctgttagcatcgctgtctcttcccaggggtacttagaaattaattttcgatctatagtcttattccctaaggatttacacagggaacgaagcaaaattgtgaatttttgaagattttttttctaaagaatgacctattaagtttaaagtagtaccaatgtgatgtatcaaatacagtctttttaaaaaataattcctttcattcttagccattagaaaaattaacaggaaatggaaatgctattgaacctgcttcctctttctagcagtgaggagcagagggcagaaagccccaccttgccttcatgcaggtgatattctcacctctcagcgtgtgtttgtgcctctatccttagttttctctaatttctaactctaaggtagtagagctcttaaatggttttcctgctttctctgcagctgaatggtcaggtctatagggtttttttcttttttgagatggagttttgctctgtcgcccaggcgggagtgcagtggcgtgatctcaggtcactgcagcctccgcctcccaggctcaagccattctcctgcctcagcctctggggtagctgggaatacaggtgtgtgccaacatgtccagctcatttttgtatttttcgtagagatggtttttcaccactttggccaggctggtcttgaactcctggcctcaagtgatccacacacctcagcctcccaaagtgctgggattacaggcatgagccacagcacccagcccaggtctataggattttaattgcttcccacatgctaagggagaatcaggtcgcataatgaggctttgtaggggaaaacgtggttttcacacttactttcaagggaagggagtactcaagctatgctgatgtgggaacctgcatcctaaggacctgataaccaagactaaactaaaatcagtaaaatccatgggtgtatggatcagtagaggtgagcttctcaggacaggctgaactattggggaatgaaaggacatatgccccacataagaaaaacaaccccatcatacagtcagagtttgagttgcttcttgctagccatgcgaccctgacaattcagtttctgaactttctgacccccatacctctcatccataaaacgaggagtagtactactgatttggcaagactgttgcaagaataatgccggcgaaatttgatttgaaatgaggacctattaaaatgcaaggcattctagtctatgatagacattttctaggtcacgttctgaacatcttgagatatctgttgtacatcatgtcttgtcccattgtggggagtatgggattgaatccttcagcctttctcaactgtgaaactaagtcattcatttaatgttatgaatgaattctagaatggtactagttaagtacattttggggagaattgagaaaatagtcactgaaatccggttttccactctctgcttcagttgagaaatcctgctgagaaagactgtgagatactaaactattcatgctctctgagtgaaaaagcttaagaaaacctaaaaaacaaacaaacaaacaaacagatttaaataaattttaaagccccttgccttgaaatatatttcagaatatcacttttgacttttttttggtgaattccatgctaagattatgaattaacttttgcattctctttccttgtgcactacattgtgctgagggctagtgcacaaagagaaacacaaatattaatatcttatgttaatgtaaatgtgaatatcttataataattatgagcatagaacccaaaactttttgtaattcctaataactacttttatgatggtgatgaagatgacggagaagtctgaaatactagtagttatcaaataaaaagatattaatatctaagctatagaattatttcatattgcaagatgattttcttagtaaactgagcaaataaactcactcctgtctttgtgatatgaatccacagttttatttttactctgctaggaaattttcaacatttgtcgtttattctcagtttaagtcagtatggtgtgaaatactgggtaatataaaaacaaatgtctttatctgtctattaatgtttttgtctctattaaacattttccatggatcatgcccgtgtttgtgctttgctttgacatagggattataatttcagtactgcaaatgaaaatcttgaaaagtcaggaggcaagagggatttagcccaagactatcaaaagctcttggcatttgttctctctcacctcctttccacattcatttccaacttcagatttatgatggattttatgatagtacatggttcaaagagaaatagcattttttttaaatgcccagggataaaccaaataaaacatttatgacaaattttcagaaaaaccacagactggaagatgttactatatagtggttctctaagcatcacctgggaacttggtagaaatgcaaattctcaggtcccaccacagatacactgaatctgaaactctgggagtggggcccagcaatctggtttcacacaccctgtgggtgattctgaccaagtttgagaatcacacttcctgaacagtgcctcactctctcacttaaatgactcagtttttctagtttaatacacaagcatcagcgctataaacaccacatttaaaagaaaatctggaaaagacaggaagagtttccacttcattctgggggggaaaaagaaagagttgttttagggccatcactttgagagaggagggaatgtacgtgagaccttgtatgcatttccaactgggattatgactggttgtgtgacccgtcaggggggatactaatatgttcacagctgcctattagagtcacttatagtagaaagctcacaatactcaaggatcaaaacagggcagataaaatctgttgtttaaagcaccaaatatggctgtagattcactcagtaaatgtgaataataggaagtttattttcaattttaagttctttaaaaattttacttaaaaatagattcaagttttcatgctcttcaagcgtgctttataaactatatcactcttttccatcagccccctgagattgggtagcatagcaaatggtagccactctatggcaaatgctctcagcatatagactgtgaaaaattctgttgtggaaatgattctagttgaaccaaactgttacaggaaaggaatcccaatccagaccccaagagaggatttttggatctcatgcatgaaagaattcagggtgagtccacagtgcaaagtgaaagcaagtttattacatctaccctaggtataatagttgtatatatgtagggtaaaaaaagatcgtggggagatgtgctgtgctacaagagtttgtgataaagaattaattttcttactatattttgcaagaatcaatattattatctttaaagcaaaattaggaatgcctttgttttcaagacatctggatatcaagacaatcccaagtctaggtctgttcaacaaacattatcaatttgttccctcaactgctaggaatagcttttggagaatgcagcccagttccagagtccctcgttttcctagccctcactcaacacctctgacaaaactgcaccaaaatgtgtcatatatgtagaaactcatcttctacaagctatacaaagcaatcccttatctgttagaaagtaaggactaaacaaattaacaaaaggactaggatgattgaaaagatattggtgccttattatgaatgtttgccaagacacttataaataagatagagatgttaaaagaaaaaacaatgtaaattctattgcctaatgtgtacttccatttcaaatatctagttcacatattagtaggtatcattcatcttaattgggttcaagaaggctcttcactgctaatggcaaatcaatcaccatctctgaacactgcagtatgtactcatgacctgtagattgtgttggaattttaatacatggggaagtattttgaaaagttaggaatttgagttggaaaggcatccagaaaattgattttgatttttcttaagggttaaggctgggtgtggtggcacacgcctgtagtccaggtcacttgagaccaggagttcaagaccagcctgggcaacgtagggagaccccgtctccgagaaaagaaaaaaaaaaaaagccaaaagcagctgagtatggtggcgtgtgcctgtagtcccagctaattgggaggctgaggtgggaggatcactttcctctgggaggtcaaggttgcagtatgccatgattgcaccactgcactccagcctgggtgacacagtgagaccctgttgaaaaaaaaaggtaaaaaatcaagggactttgttaaaaagattgtaatctcatattagcagtctagtaattggattttttcatttaacagaggaaaaagaactgtattttaatgagagtatatttttaaaaagcaatttcttctttttgccatgctattttcattcgtagtattttagagagtggacttttttttagcatggaattatgtgtatgatattcctttgacctagcaatcacagtactaataggcttcacatctgtttacttttaaagaaatgtgagcattttgatagaaaacactattaatgaagttttttgaaaaaaatgacattctgaacatattaaatgacgttaaattaaaaaaatcaaaagatagtaagactgagaaggcttttccaatcctagagggattcagaagtaatttcaaaacaaagatggggaggaaagcttctccttcctccagcaaccttttctctccttacatgaagctatgactttaacctcttcttggctgcaaagtgaaatctatttttttaagggtgaaagaggtatgagtacttaggagaggaataaaacaacacgtattggattctatggtgccaagcttgatttgcctctggcttggccattccaagaagagcttaagctttttcatcttaactctgatgcacaatcttaatttaaactgtatgagatttgccctgatgcacaccagtttcatccgtttctggtatcaacaaaatcaaagcgtctaactttttcaaacacaaagggatgaattgtgaatacctgctgaatttccacaagtcaacaacctaacaaaaccacaaaaaaagacgaggtaacttttttcttaagtgaaaagtagcctaacactagaaaagagaacatttatttctgttaatctgggcattaataaaaggtgctgggccataattatagttccctttgtcatttaatagagaggtagaaaaatgcagatttttattccctttgcctagggcggaacctgagattctgcatttctaacaggctccgggtgattagatgtcactgaacgttgtcacattgtgtaccaagggtaaatatgtataatttcttatgaatgataggctcctttccaccatcttcacagaggttagacaaagctaaggcaagaaaccaactgagaacagatattttatctagtacagctttcatatacgcacaacgttcagaaaatgaaaatgaacatttctcagcctcaatctcctcttctataatttgagaggcttggaagcttcttccagacctaagattttatgattctactgggcactaaataaatcctctatgaatatatgaatgagcaagggaattagtgaattttgagttgccagtttaactataaggaagtggctcttttgttctcccattattacttacagaggagcttggggtatatgtgagtcatttcataaacttcagacagaggagaacgtgtgaaataatggcctaagagagaaagtaaatggggaagaaagaaatataataggccagacagaccacattttaagtgttaacttcaggtgagagaccatgaatttaaactgagatcagtccacaaggctgtgttttttatctgtagtcacagcagagtgactgtttcgaacatgtgaaatgttctgggtctctatttccagtgggttttaacaaaggttacaattttgttagtttgcacaagagttggttttaacaagggtaataggccctggaattgggtcaggtaaggaggagagtgaggttctgagggacggaagcacaggaaaggcagtagaataatgaattgtactttatgttggtttgtacttccctgaaggattgttgagatgggagttacaaggggcaagctagagtgtggaaggcttgaaaatggggttatggaaggtaacttagtaatggcaaggtctagggtgtgactacctaagtcacataatgtcacatctctgctccaggtattatggcgatgatgaaggtgtgaaaaagagaaactgaactgacaactttaaagttgtattttctaattgggactagatttaatactggcataggtcttctgtgaaccaagttacttgacttgttgaacatgtataaatgacatgaagtatttgatgggaagtttcagccaaacaggtgataagaagttgaattttaaaccctgtaaaattaggtcagtctaccatataaaaacaagatttaataagcggcagatgatattttgtccaattcagttagattttgcagtgccaaataattataggcagtgcaaatcatgcatttgctgtgctatgaagggttatgtgaattctccgctacagacatgctataccttccctgaaaaaagcacatatggctatcagtaagaaggtcattttgaatgtgcacctacaatagtgacaacaggctgggcgcgttagctcacacctgtaatcccagcactttgggaggctgaggcaggcagatcacctgaggtcagaagttcgagatcagcctggctaacatggtgaaaacccatctctactaaaaatacaaaaattagcagggcatggtggtgtgtgcctgtaatcccaggtactcaggaggctgagacaggagaatcgcttgaacccaggaggcggaggttgcaatgagccaagatcgcaccactgcactccagcctgggtgacagagcaagactctgtctcaaaaaaaaaaaaaaaaaaatggtgacaacaatttagttagcacatagatgtcttagcaaaattatattttatatacaaaagttaaaaagctacatagtaatatgtcttaagataatattttatcacttcatgaccaagtgttgaacacctaatctgctactaaaatctgttttttctcagtgacgagttcacattcaccgtgtaatcaagcaaaagtaactgcaaatgttactgtctctggtaatctagacattttatgaagtctccagttcttgaagtttagtaggtttatagtcaggtacactaggtaaaggcataaatgtcatagttgtgttaggtatttgaaaacattggcttcatgaactcccccctaatttaataccctttcaaatctgagtgatttatgatatgtatcagtggttaaatttaatacatgcactgttttttaatatctaactttttctagttataaaaggttacataactacataaaacaatccacatactaatttttatctctcattttaggctagatacttctgttctgaggtatatgaaattatcagtttgtcagacacttaatcctttatcatttattggcaaggaatgtaattgaattggtctaaactaaaagtgaagatattgacagattgtagaggggtggattatctggcatagtagaaggcacatcggatctggggttagacaactggagttcttaacttgctctatgactcctttgtctctggttccttttcagtaaaagatggtataaatgcctatgattaagtgtttatgagtattactgatactgtatggaaagcatgttacatgggactggctctgtaaaccaaagtctgaccttatcaaaagctcttcacagccataactgcactgggcactggggcaggtagtggggcagggatccctagattcagtaggctgtcttaaagaagttactatctagtggaaaaaattccactttcatgtactctagtacatatttacagaacatttgcatgtggtggacagtagcctgggttgtgggtactcagtgaacaagacagacatcatccttcaactcatggagcttacatttctgataccttcatttctcatccattaacacgatttacattgaccgtgattgctgctacatcacgtaatattggctttatctttcaagtgtgcatttattgtattttaagaatgaagatactagaaaggcctctcttactcaagagtacataacaactatgacaaaataacttgaagtgagatttttctgagattatatatttacatgagttatatattagtttttaaactgcatcttatgtgtcattgctaccatttgatacatttactgtggagcttaaaccataaagaccagagcttattcataatgggcaaagctgaatatagagtgaatgtgctcgtcagcttgaattaaaatttagagggtcctaactgaggctttttcaagggtggaattgaagatttttgaggaaacagcatctctgggacacaggaattactcagacttcactatgatctctatgtcgtctcaaacagcatcccaaagagaaagggaaactgtctttagagcagagattagtgtcaggacaaacctctatgttgtatgaagtcagtgacctagcgcaaacataaacaggtttccatgtcatgttatgcttgccagaaaagcatttaatgtgaactggaattgtgtgattttctatgagaatgtggcctataaaactgattatgtttttgcaagttattccatctgtaagcaatgtgcataaaatgttttgttaaaataaagaaaattgaattcaaaatgtgcactaaaaattatcctatcagtgtgaacatcaacctagaaaattagatgcactcatctcccatatttcatattctaacatttcccaatattatggaacatttctcctattcatgaatctgcctgccagtgctataagtttgtattatttttaaacttcttgagttatttgttgtatagggtaggataaaaatagtttggatggatggtatgcattggcattaaatctgcttcaagtcagagcctagaaactctgaatggcacagttatttttaaaatggccaacagatcgatagagactgtggccaaaattctgaaaaagtctaataaaaagcattgatacctgtttggtaaaaatatggtttgcctgaatagacacttgcaatgtttgcttttctggattgagtatcacagcaggcagatattgttgttctatattgtctccaggctatctctgtcagagggttgtgtcactgggaacaagttatcttttccagggtcttttcaggctgtatgtatttaaacataaagactagaactaaagataacaaagaagacaaaagaatatacaaacagctctttgcttctcaaaaggtgtagaatggtcatatctgctttctgacagtggtgatagggagtgggtttgattcttcctcagtgcttttcaatgttgagcatcttttcattttctctttggtgagacactgtcgaaatgtctgacccctgaagcaggataggatatgctttgtcctgctcactcgcccaaatcctccagggacatttcagtgcctggctctagtagttgacactgctccccattcctggtaaatgtgctggtaccatttcctcagaagagagagttttctacctatccaagccaaaaagagagaaaaattgaaatgttgactgaaaaaagaaggtggagatttctagtccattttattgtttcatgttggtttattgaagggtccaattgggaattcttacacattttgtaaatgtaggaataggagaaacctgaaaaagtggtaaaacataaatgaacttccagcttcatttccctgacttccttgtaagtaccttccatgcttaaccaattcatcttagaattcccaaaccttgaaattccatacattgctaccttcaataatcttcattcttcctgttaatgttctgaatcttcttcatgctgcaaatgaatgaatgaactaataaataagatgtttctcttttaattgtttcaataggtagtatactaaatttccccctttgagtaggtatttaagagattaagtttaaaagttcccagtagttttatttttactttaatttttactattaattatgacagttgttttttcactgtaagtagataatataaaagagaaatcaaagggacatacttttatcattatacagtttatgccttgtcttttatcttctgtcatcttgttccaaaatatggcaatttttttcctgtattccctttctctgtattttgttttgctttgttctgtaataactggagatacttggatatggatactcaactgttatttttgctatcactcagacacttccccttcccgaataaaatcctacatctaattgtcaaaataaagcacacacaaaaaaagtactttttttttttttaagagacagagtttcagtgtgtcacccagaagtacagtggcacaatcataacacactgcaacctcaaattcctgagctgaagccattcttccacctcagcctcccaagtagctaggattaaaggtgtataaccaccaatcctggctaaggtgtttgtttgtttttttgtagagacaggggtctcactacattgcccaagttggtcttgaactcctgggctcaagtgatcttcctgcctcagcctctccagaattacagttgtgagccaccatgctggggctgaaaataaccttttacagaagaaagaaaagtgatggcatgaaaaatggtatgtctcttggacagagttcagtaatatgacctatgaaaaataaatatatttgaagcagactagagaaacacctgagagagaaataattcctaggataatagaagaaagcttattgttctgattttttaatataagtttgtcaattaagagttttctctactccagactaaacttttatcatcactttttagtattcatgtatccacagtctgaaaacatgttatttttcattaactgtgaaacaaaggctccagagcttgactattgtgtgagggaaggaaattatattttgagtttagtattcttgcattcatgctgacattgtttaacccgtcctagagcagcttcttactttttcatttcctaatctgttttataatctttaagccacagcaaaattatgagtcctaagggggaaatggaatggaagaaaatatttttaaattatgtctttgataagggaattatatacaaataataaagaactcttctaatgccacaacaatgaaaagacaactctattgaaaaatgggcaaatgacttgaatagacatttcttgaaagaagatatagaaatagggaatatgaaatatgttatcttatccagtaaaaaatgtatatcaaaaccagtataagataccttttcctacccattatgattgtgataataaaaaaagacatgacaacaagtattggtgggaaagtggaaaaattaaagcccttatacattgctggtgggaatgcaaaatgatacagctcctacaaaaaatagtttggcagttcctcacaagctaaacctagaattaccatattccccagcaatttcacaactaagtatatacctaaaagaaataaaggcatacatctatccaaaaacttctatatgaatgcacatagcaacattattcttaatagccaaattgtagaaataaccagaatatcaattaactggtgagtggctaaatatatgtggagtaaccgtacagtggaatattatttagtcataaaaaagtgaaatactgatacatgctgcaatatggatgaacttcaaaatcattatgctaagggcaaagagctatgcatcaatgaccacacactatattcttccatttagtaagtagcttaatgattgtctgtggctggggtggggaatggtagagggttgggagaaaatcagaacggctgctaatgtgtatggaattactttctggagtgatgaaaatgctctaaaattgattgttgtgatggttgcacatcctagagcagttatgaataggtgaatatattaaaaacattgaattttataatttaaatggatgaattgtatggaagtatatgaattatatcttaataaaactgtttttaaaaaggcatagcataaattgattgatagatagatataggttaatttctgggtttctgatggaattgaataaaaaaaatggatgaggctttcatataatgttataccaattaagcctaaaattttaaatgctaagtttaataattctctttaaaagtgtgttttcactctttctagaaaaggcatacattttcaattttctgatagcttgatgatttgtaattgtttacatataagtaaggagtagggtccaccattacatatgtacatgacctaaaatttattttattgatttgcttcaagaatgtgttcattacagcttcatttcaagatccagacaagtttgcgtacttctcacctgtcggttccaaatctcaagccacctccagaacattttaattttactattttaattctataatcctaaactaaataaatctacatgccataacttagtgttcccacttagattatatttcatagtaagttcttttgtactccaaggtagttacctcctgagtccctacccatcaataacagagcctgcctcccaaactccagtagaggggttagatatacaaattctgtctactcttcgcctatcccaaatcaaccaccaggaaccatagattctctcttgacaactatcctagtttcctactatgctgcaggcaatatctgaactccagtccagtttgggcttctccatgtaatagctgcatgacgttggcacatcacttaaaactccctgagtctccgtgaactagagaacagaaagggtcatttcttctctccatcctagcagagctgttatgaagaccaaagaacatagcagcagtttatgggccaccattttgaaaaattaaatgagtttttaacaaaagttattacatgtgacattcaatcattttacctagtaagtactttaaaaatttattctttctttaacaaaaaattatagccacatagattaatagagaaattgaaccaggataacaaatataagaaagcggtaatgaggtttaagaataatttacaataaaacccatatgaatagcaagggcacagttctcaaatgtgtcactattatgtcattgagaaaggtagaaagattttctaactaatctctattaaatctatacttatagttatcaatataataacatattacacttatatagtacatatcctatgccaccctgtattctaagtgctttgcatacattacatacctgtcaccctctatcaccaagtcatctttcagttaagtaaattaatcatgatgggtggagaataatgagctaagagtttgaaagaatatataaaaataatgtttgggggaatcatatacattttaaaagattattatatttttaaaatgtagcccaacttttcagagaatgtttcatttttagactatcatatactacattttaataagaggttactacttgaactatgtaatgcatgggtagttatatggcgtgcattatatgtataacatagttcatacatagtttttagccactgctaattctaagctatgcctttctccattaaatatatttgtttgcgtattctaaaaagaaggagcagaattgttgatcatcccctccaatcttgtttagtacttccactgaaatgtggcttatctatcaattaggtttggcccagtatttcagctgctggtttcaacttaattccctcatttgttccccttttattcaagcaaagtgccatttaatttatggctccttttctttccctgtagcctaagcttcttagaaaataaatgaggctataagtcctcatttagcccttcttagtcctgtggattctggctgaggatttgagtctcgtcagtcattcaccacgctatgccttaggtcactgtgctctccttctttggctctttcaattttctctttgtagaaacctgtaaagatgtttttatagaaatttcagtattaaatcagctacacatattttgaataagaatgcttttctttgaacaccatggaatgcatgcttactggcaaccttgagatcacttggaaaataaccgggaatggaggagaggttcttaagccacaccttggttgtcattagtctactcaatttggagagtatgttcatgggcctctgttccattgtgcattggctggatgcatatgttgagcaatggggacaacgtataatttttttttcacttgccacaattttattcatttttattttttatttgagatggagttttactcttgtcacccaggctggagggcaatggcgcagtcgcggctcactgcaacctctgcctcctgagttcaaacaattctcccgcctcagtctcccaagtagctgggattaaaggtgtacataccaccatggccagctaatttttgtatttttagtagagatggggtttcaccatgttggccaggctggtctcgaactcctgacctcaggtgatctgccctccttggcttcccaaaattctgggattacaggtgtgagtcaccacatccggcccacttggcacagttctagattgaggtaaatattaatctaggttttgcttaaattcctgtggacagacagataaaatatacaatgttaggattcttagctaacaagggatactgccaaatgataaaatattaattctattactttgtatgcagatatgtgagaactagaagcaattaccctgactctaattgcttcatagatgaatacaattatgatgttatactcatcctgtctgtattctcagtataaaataacatcaacataagacagtcagaaatttcatttaaaagtaaaccttaccaatgtgaaatatattaaggcaataaaccaagagattaaactttcataaacagtaagagcttattgttttgtaaatgagtgtataataatatctttgcagctcaaatgaaaccataaaactgactgggggcctcacttttttcagcaaacttttgatttatctttttaatctgttcttagcattgtatagcaattaaacactggaaatgggctttacacttcttgccacattgctcttctcccgtttcacttctgtcatttcttttataatgacaagcaatttagaggaacaagaaacaattaaaatgtaagtagctcctgctgttacaggtgttctccactaatgaataaaaatgactgggattatagaaaggtgagatttaaggaaagatctcttttgggtgttagaaaatttaaagatttgtggacaaattcagaaggtaagcacagattcccaagacgtaattcctcaggggaatttgataaagtcaattagttgttgaaagtaccacatacagaggctggccaaatgaaattgtcagtagttttagtgggcatgggaagtgtgtgatgtgcctgaactggagttactgattcagacaaaatggcatgaaggcaagaacttacattccaacaagtttccggttggttctgacaccactgatccagggaacacactttgagagccactggtctaacagaggccaatgacttttgcattctttctgtccacttcctcttgaaaaacactcaatgcttgatagaaatacttcaaggctgtgacggcttgacactggtgtatggtagactcccgtagggtagtagtagactcacttgcgataaataaattcacagataatcaaatgtcttacaaaaggttatatacttgaacatactggaaactcaagaccctttcccttctaattcagtgctatgctgtcttcagtaatctgtatccatgacaaagaggtttctgggacatcggtcactcccctaaaggcaacagtttaaggaattataattttgttttaaattatgagtctgacttaatgaagagtagatgggtgacttagacaacattgtacttatgaaattaagtaggccacttacacttcactttcctgagtcaccctagtgtctgtataatacaaaggaggccaaataatttcttggttataaaacctcagttctaaatgttaacattttattcagcaaagactagattaatttagattaatgggatagttattactatacactatatagctctatgtgtaagttgtaaaaacaattttaaaaattagaacattttcatcctattctgaatattacacaaaatatatttcttgtaaagatgacacatgtaaagatcacacatgctcttgtaaagagccttatctaaagactccaagtgctaatttaacaggtatacacaaaggaaaagggaaaaaatatcatgtaaattgtaagaattagcctgatctttaagtacataataactcctctctctatatgagatgctttcagccaaggtcttctatcctcaacatttgtcttccaaataatctgttggataactaagtttcctttaatgtgagctgaaatatttcattcaatttttaaagttttagttcctgtcaaaaaatacaaatgccagccactgtgacagactttgaacttacatattgttaatatgaactgtatgtaattaaacacagaactcctatggaaagcaagtttattccagaaagtatgagtgaggatgagttcactctacagatagttactgagtacctactgtgtttcagacactctttatggtgagcttgagctaaatcagaacagaaccaaccatccaaagatcatgacccttattttaagcttcctgtttggggagcatgtgtagagataaccagtaaacagcaaggtagttgtagggagctgagaatagaagcaaggagatagctaggaaacctagacgtaaggcaggtgagagatgatggcggctccatcagagaagtgcctgtggacttagtgaagggtggttgaattctacacacattttgaaagtataggagaaagaataggagagagaatgaagacaaaagaaagtagaaatatattcattttaagagaacaacagattgtattgatttactttagatcctgcgactctgaaaaactatcagtcttgtaactacctggcaaatacgcctctcccttctttccactcctcagatctaaacacattgcattctctgccaagtcagatggctaccttccttgccctgcaaataaaggatagagttcccaggatcagtgaccatacgcatttccatttctaatactgtgaatcaggaagaagagaagtttacaaaatgtgattagtgggttaattttcttcatttcagttaagactttctttaaattcaatttgcataatgaaaggctcttgtttcagatcttaggattttaagggccatggtatgaattgtggatgtctggctctgactctagggtataatttaaaatacagtgacattgatatctgtaattcataagcaagacacccttcctccctaaatgaggtacctttggcagccacttcttgtcccccatcagtttctctagttgtttctcgctgaacctggaacatttgcacatatgtgcccactaccacttctccatttctgccctgctcgttggcctctattgccagttacaagccccgtgcaggaggcaactgacagctgccaccactgtccactcactcttgagaatgctgcttggctgcctggattctgtttgctggtgttcccagtactctatactttctaggtagtaactggagttgcattcccttggtcattactgcactggggtctactgcgtgtgtttagttggaacgtatagcttagaagcccacttttgtacctggccccagagaagtttcaagtaaataagaactgctcaactttaatttacattccttgctcttccttgacctcagatctcttccatggggaaggactcggcatagacactaaactggtctctgagttccttgcttttctcagacacccatccaaaaaactttgttcttaaagaaagctcccccaacccctccttccctacgcatattgtctcaggctggtggcccaccagtgttttaatcaggcacaatttaattctgaatctctgtttaggctcagctgacactcacaggacatgtctaattttgtcttaagaaagaaaaagaactttgttgtagaaacagcttcagacgatttggaaagcattcaagattcaatagctacattgagtccgtttcactatattctcatctggccacctttctatcacttttctaaatgaaatggagctgtccccattgttgtgttgtaggtcgtcttagatttctgcacaaacccaaatgagataatagaggttcaagcatgtgatgactggaaatagacttgaaatggtttcagtcctggctttaaagttgcttttgttcgaaggtgactattgtttgttttttaggaggcccattgaccatatggctgctttgaaattcagatgaaagggatgacattttcttgtgggagagctaaactagttgataaattgtcattgtgctacctttcaggctatggcccgtaattaaatgaatgacaaaaaaagggcattaaagaattctgatagatctgattcacctcttaaaagtaaagaaattcaaaattaatgcccaaagtctaaagccaagtgtgcaatattaagtattgtggaatattttgctcttggggaaaacattagctgatgcctggatctgcaaaatatcacagcaggatatgtaacaaaagccaggatttgctttaagtttttattcatcttatgtagatacatatgtatattttctttcttacttacatagttttgataagaaactgataaccagtttgcttaatgttgttttatcttcacatatctgaacctgactgcatggtcgtattcaaaccatttcagaagaaatgtttcctctttccatgagcagtgatttatgtatttgactttgaagtcaacaattgtgtagcacttaatgccacatcaaatgcaacatcaaattaccttgtattcatttaagtgaatttgcagatttatggtggatgggcacagattcaggaaactggggaaaggacagtcaccccagatgatggtacagaaggaaaatgaagtaaatatctggcaattaattacttaaaaggttaaggcctgttcttgaaaagagtcaggagcaatttattccacaatcaatttgcaagcacccagagtgtgacaaagtgacagggaacatggactgctcaaaaacaagccatgcccaacaaaactaatttccctctttgacagagtgattgatcttatagactgaaagatccactggttacagcccagtttgatatctgcatcattgtcaatgctatttcacatggactggtcattgacaagcttgcagaaaatggcttgggtagtatcataatcaggtagctattgaactggttaagaaaatgttcttagatttggtcagtaaatagtgtgaggacaaggcttggcttacgtagacattccccacaagcttgactgtggatcggatttttttttttccccctaacaaatggtttcatgagagaatgcaaagcgtattcatggggattgaggcagagtcagctttgttagagcctctttgccagaatttctgaaaagaagattgagaatgcaaagtgaatttgactaattaaaattatgatctaaattaattgggaaggaattgctgtgtgattaatgctaaaaaatatgtgtaaggaaacaaaaagaaacttattaaatcccatacatgcaaaatgtgaaaataaagctgctctgtgcacatcagtatcaactactttccctgcctcatattgcatccctaccctgcagccacacttactgttataagagaaagacatgaggcatatctcagctgaccttggcaccaacgtatatcaacaatgtcatttgattactgagaagggaaagccattttatatattcagtgaagtggtgttatatttaggtctcagtcactgaaagaccataaagagggagatctgggctgggtacgttggctcacgcctgtaatcccagcactttgggagtgcaaggcggtgggggggggggcggggggtgggtggatcacgaggtcgggagttcaagaccagactggccaacatggtgaaaccctgtctctactaaaaatacaaaaattagctcggtgtggtggcaggtgcccatagtcccagctacttgggaggctgaggcagatttgcttgaaactgggaggcggaggttgcagtgagccgaggtcgtgccactgcactccagcctgggtgacagagcaagactctgtctcggaaaaaaaaaaaagaaggagatctgataattacacactagcccacatataggggaaggtggttgatcaactcaaaattgagtgaaggatatacaggttttacaagaatatgtttaatttcccttaaattatttttctaatcaaggatatcacataactaacacattccacctgcttttgttgccaaatgcaattttttcacttctcttaataaagataccttcagaagaccccatttgactgatatcctgagaaaagtagtgttcattttttatatgccaagataaattttaaatggataataatgaccaagggtgtttgttattagcaagtgtttcgttcttgagaaactaataataattggtaattatatagtgcttactatgtgctgtgccacacactctcctaattgcttcatgtatatcatgtcattctcataacactctatcaggaagggactattattatttgcattttagagatgagaaaacttaggtcaagagtactggtatatgcctgtctctcaacttttgataaagccaagagaataaggattgtcactaattgtcaataatgcatcattccacttatgttgtgatatgtaaataatcgtattcagaggctgtgtttgggcatccatctctcctcttctacaggactgctttagatatttagaactactgtgagctgacatttcccctgcacagggaaagtagtatatagtttggtagtttctgtatctcagtaaaatataataattttaacctcataaaatgtatattaccagataaatgaaaaaaatggaatgattcataaggtcaggagttcgagaccagcctgatcaacttggtgaaacccccgtctctactaaaaatacaaaaattagcagagcatggtggcaggtggatgtaatcccacagctactcaggagcctgaggcaggagaatcgcttgaacttggaggtggaggttgcagtgagccgagatcatgccactgtactccagcctgggtgagagaactttgcataacttctggggataatgtaatctcatatttatttataataagaatttgctttagatgtttttccagctgcgatattgaaatgaaatagcaaaagaaccctgctaaacattttatcttaaagatacaattgattataattgttttattttaaaagccttatttaattagtaaaaaatagtaaggataattaattgttattgatttaagaatatcttgaggaaaatgggatgaccatgatatttaaaataaataaagtattggtaaccacaaagttatcttttaatgaaggatttttcagatgttaaataactttttacaatttatatatgtatcatatataaatttaattttctcactttataagataatatagtttatcaagtgtatttttttttaaaaaatgagcaaaacttttatactaccttgcaaaaagagccttaatcatttaagaaacaaaattaaatataaagatcatatatgtatcatcaatattgtgtgcagtggtatataattattaatgttctttagattttaatgttttatctcttactcttacaatagttttgccagtggtatcttattggtgactaacacattctaggtgtcttcttaacatgtaactgcttttggtttttcttttccattttcttattaggaggtatctgcaggctcatatgtggcagaaggtaattttaaataatgagaagatagtggacaggagaaatacatggaaacttttgttgaggattactcattgctatttgaggaattgcttttattcctggtccttcacttcttatttatacagcgcttattctagatttatgccattaacaaatattacttgacatatttctagaaaaatgttaagcagatatccacaaagtgtttttaaaagcatgttttaattattgatttttattttcattagatatttatttgtaataaaatctctaatcttttgaaatttatatttaaggatcacaataccagcagttatgctaaatcattggtattttcaacatggtcagccttgatttgtctcttgagtacattaggtatgacttaagcaaaattaaaattattggccaatagagttttttcacatgaaataaaatagtgttattcccaacttttcctgtttgtactttggaactgtaggctttggggctttggggacccacttaatttgacatctttggcacactgaaccagaacctggcttggaaagatacaaaaactactttggcaaatgatctgtcaagtgacccatgaacaaaagcgagattgggttgccctttgaaataaacctatttgaattttattatctccacagcaccttgtgtctctaatcttgtgaaaggttagtattctatccatcagagcaagattagagtgctggttgatgtctgctcttgatgataactgaatgcagcagttggcgctggaagagggagattcattaccatcagcagttcaaaaacagaggggagagatgggcacagagggagtcacgtttacaacagaagctacctattcccaggtcaaggtatttaaaagagaacaaaacaaaaccaaaaaacaaaagactgctgtttgggcaaagctttgctgagatttttaaataagttccctccctgaaagcagagctgtattaaggctatattttgcagaaattaccaatttttaatattcagataccttcttgtaaacaatgctgattgctgatgggtggcttttatgacacacatcagaggaaaaaaataagaatgatattatatcactatataacatacaactaataacaacaaaaaatataaaacatccactaaagtgtgaaataataagcctgtggcatgaataattatttttgaaaattactgaattctgaactgaatgtccttttggggagacttttgtgaatgatccatataattcaaaaattgaaatataaacaatttgaaatttgtaaaatatgtaactgtatcaaagtaagcatattcttatctagaatttaatataattttaacatgatgaaaaatgacctgcatacattcaaccctgtacaatttcaaataggtactggcagtcactaattgatactttatcaaatgattaaagatgattgttttttgtttcttgcattccaaatgacaatgttatgaaagtaaaatagccttccaagaacatgagattaatgaatttgacatttttctttgagaagtatcctgtgaataactgacaaaataaatttaatcaatgttaagcaaattaggttgacattaaatttattcattttcatttagttcttacacaataatactttgtctcattatgtaactacatcaggatatctattgtttgtttattcatcaaaagtatattcattacctttgaatgaagacatctgtgatgccacatgagcctgatattttttcctgttgatagatttaaagactaaaatgatttctaagacatggcttggggagctgagccatctctaactcctgacatcaataagaaccaagtgtatggtaaggagcaaaggtggtaaaaggtgtcttaacttcctttactttggttattgttttcaaattgtttgtagaaacatttatagaattacacagtttatcatcttattcatcaaatccccaccaaaggctctgtagagaaaatgagcaatgactttcaattcatacagtcatttaaatctaagattgattttttttctttagtttggtctgatatctataataatgaacaatgaaattttattgtctcctgattacatcaatttgggaaatcctttctctgccaagaaatagatggaaattatctatattttaaaaagcattcattacaataccaaaactgcagatgatcatattatcaattaataattacctaaccatcctggggactattattttatagacagcacgctgtgctttagagactactactttcttcttttgtttattaaaccctttttactaatcagcattaattcactatatttagagtgaagagacccaaattctattccatgctacgttgttgttacattctgtgattttgagtaaattacttgtttaccttctgccctctttatgcttttttttttttcagcttgattcttggattctccatggtagaattattagacaaaatacttcctatacttttaggtcttttaagttaaaataatatttgtttttttttcaactatgaaaataatttatagccatctacttaaattttccatgcctcggtttcctcaaatgttaattttggaaaattagacaatgtacagaggaaaaaaaaacacaaactatattcttcaaccaattgtaaatcgttattatatattttgatttttcttaataggcatattcacaaattatttacaaaactgagattgtactggatatatactttcatgtcttttgtttctatcttagcatactattacggtattatattttgtattaaaagtggatttcatttgaatctggtgaagcttatgtttcaggtaccttcccattaatagaccctttcgaagcctctgtacctaattgtgcctactcacaattgtgtagaatatttgttaaagggagtcctgtaaattgcatcagcatcaatcctcatagaatctgggtctatcactgtaggcactaaacctggaggaaggctgcctggatttggaatcccagctccatcaccttggaagttacttaaatttgctgtgcctctgtttccctaaatgtaagacgttgatgataataataactacctcataggactgttgacaacatgaaatcagttaatataagaatcccttggaatagtagctgactgatagtatttggtgttagcttttaaatattctttaaaaataattataaacgtaacagtattttgcagtgtagatttatccttcttgtgagattttcaaatcctttttcattttagctcatataaataataatgggatggatatctttgtacacaaatctttgaccttacctttgtaattgaactatttccttttattagtgttattttctactgaagcatctttcatgtcactatttatttaaaaaagactttgctaataaatatcaaagaagttaaaacttatattttaaaaaatataagtagtttagactgggtgcagtggctcacgcctgtaatcctagcactctgagagaccgaggtaggtagatggcttgagctcaggagttccagatcagcctgggcaacatggcaaaacaccatctctgcaaaaaatacaaaaattagcccagtgtggtggcgtgcacctgtagtcccagctacccaggaggctgaagtgggaggatcctgggagcccctggaggggaaggttgcagagccgagatggtgccgctgcacttcagcctgggtgacagagtgagaccctgtttcaaaaaataatgtatagatagatagatagatagatagatataaatttataaaaattatacctataatatctattatagatataatttattagttatacctatatatataatacataaatatataagtatatataaaataaaaacataaattatatacttatatattatagatgtatttaattatacagtatatataattttatatgttaatataaatcatatatatttattatatgtatatattatatataataatttatatatacacacacacatagtttaaaacaactcagaaatgaaggtaggatatagtagaatatacaaaaatattacttttcaatttctttttttaaactctcataatgttctacttacatttgctcttatttagacatctgtggaacaaggtaaatttttttattctgtgaattttcacatttttcagtattgccagtttttgatggaccagaaagatataacctaaaaacttagctttcaattaagatgtaatattttcacaaaatttttatatataattatgcttttacaactcagcatttctcaataccttcagtttttgttgtctatgttatgtgcttaaatgcaccctaggtgggccgtgactggcattccttttcccctggtcattaattagctggaggagtatcaagccctgttctttcctcttcccatggtatacccatccttcccgcatcgtgggacaagcccattgtcctgtaattgatgtaagcagagggagagttgagagagagtgctgggtgctgataaatgggaaagaaatggaggagaaaggaaaagataccagcacagtcttgtcctcagaagcactgctagtgttcctcacatactgttgatactctttcatcaatgaaactctctcttctcaagatgcgaatactggctgtctacagggagtaaagagaagggaaaggaaatgaaggaaagaatagaattgggagttttcatgatgtataatatggctccatccccatttctccttccactgcccatggaaccacaatcatacatcaactaaaatgaaagtgttggagaacgaagagctgcagtgattctcaatcttggctgcacactgggatcacctggggagatcagtatacaagatatacaagtatacaagatatactggtacctggatcccactcccagagaaaatgaatgcagcctgggcataaagatttttaaaagtgattttaatgggcaccctgggttgaaaaccactgaactgtgtgaagaagaaggaaaaagtacactccatttgactgttcctctttagtctccttagagcctacacaatcttttgttccaatagccccaggtccttatcactggcttttagcaaaaaactagctttgggtccacatcccagatttgatccttggtggtttgttcttggagtttttccatctgctagtccaacaaatgtttaggtgaagaaggaacgggagctggggaaagaactgggtttgtgaacaggttaatatatattgttaatactaccatcatgatttggaaacctaattgcctcttacagttgagaaaaaaaaagctgggaatgattttaagttactgttaatacagttatatactttaggtgcataaagggttaaacaggcatcccacactctggttaatgtcatttctgaaagaaaaatggaagcagatttgcgggccaggcccagaggccattttctttaggccagtgctaggaaactgcaatgatgaaagtcaactgcgaaagcatctcagcttttaattttatattcagagcttagggtgagatagaaatgcagtccataggctcaaagcagttgtttgcttttagcagcaaccatcagcacatttcagacttaattcatgattctgggaattaatagtttatctataccaccatgagaacataaatggcctaatcagtctttcttactttaaaagatatctttgggagaaataacctaccaagaaataaaacatttatcaatctaatgtgtaaaggatcactaagaatagaaaaagtttaaccttgtgaaatgtggattcaagtcagcatttctacaaactgctttattgcttcaaatctccctatatcaaccaattacatagtgctgcttttcaggaaactttcatttttgcaactgaattacacacttgattctgaaaaatccagcatttagtctcttcagctgactgtagtggaattaaattgaagtactttggtgcaaggtattgattatttttaatgaacattcatggttgtatactgatgacttttcattaaaaatttcttcatggaaaagtttattaaattagacacattggaaaaacataaactggtgatgtacaattgtcctgaataatgcattaaaatacattattatattcttgatttacttgacttactgaataggagtattgccctagaactcttgtttctacttatatataatttaagtaaatttaatttataatgtttaagagtttccaatacacattgagagtaatataatacaaagtgatccttggattaaatattgtgaacatttttgaattatgtgttacagtatttttaacagccaatatacttatgattttctgaaaataattctccttgttttgtgatgaacattatattttgttgcagggcctttgatagtttttgtaagatgttaaaagatagtttaaatttctatttttattaattgtcatgaatggaaagttaaaaaaaaaaggaaattgtaataacaatagtttttcttaacccagtatcaaagtagggttttttttttttattcttctttttcatctctatactcttttaaatgtcagagttactgtgagatttttttaagtctcctgggactcattagactacagccttagaaaaatttaggagtgtctcactttaaaatcactaaattcacctgaatcctccaaatcatttacatgattgagggagttacttttagattttagctaccgtgcaaaggaatataaagagatgagtgcattgtggagttttcagagcacattttaacatatgaaaatactgaaagaaaaggaacttttattctactgtttatgagagagttggcagactaataattaaactgtcttcctgactacaagaatttaaaggcatgatatgttttgttgaattaatttatctttgaatgtctcacttaagattttgacctgccatgctaaggattggcaaaattttttggtaaaggactagatattaaatacttttgtcattttataccacataaagtctctgtgatatatcatcttttgttgttggtttttttctttgtattcaaacagaaaaatgtgaaaaccattcttagctcacaggacttaaaataggttgctgactagaagcaaccccttcttgaaactgttacggtatttcgtaaagtatgttctctgaaacacttgttttcaagctatttaataatgttatagggatgagggtcctgaagaggaaataggcctggaaaatactcatataggaaaggtaagcagattgtctgctggggacgttcagtactagaagcattgtcctgggtgctgaacctctccaggggcctgggatgcacagttcaggcgcacagtctcttcctgggctggtcaaatgtacctcgagaagtacaaatttaggacattgggatttttaagtgttgcaattataatcatttgcaaccacagtactcaactgtaaataacatcctttattagaactccattttggaagtggaaacatatcttttctgtattatatttggacagtcacatctcacagtagatgtactatgtgatcagctttttttgttcttcctcagtttctctaacttgtctttccattgagattgctgaacaaagtcagggcccccctgtctgtgagtctccttggttgaaacaaataacattaatagctcttattttaaggacactcatttccttaaaggataactattatagagaattttaacaaaatgttaagacttacaactgaattatatatttaagcatattatctaacatgaaaatatgatttctatgtaatttgtcagggatatgtgaatgtagtcacgtatatgtataattgttatatgtatatacatatatacataatatgtatacacatgatatacataaagtacataatattttgcataaaatacataatatgatatacataaaatgatttacacaatattgtctgtatatataaatatacacatttcatatatacatgtatgtatatacatattgtgaattaattatgatttacacaatattttctatgtgtacaaatatcataaaatgaggcaccattttggccaaacattttaactatccttttgtaagccagtcactgttctatacactgtagtgataatcccaggttctgtgtttgattttcttctagcagaagcccccgcttttaggaaaatataccaatcccagaggtttgagcatgctctccaggctcggttatctgcattaactacttaatattaaggggacaataatcacacatgaaaattattattattattttattacactttacattctgaggtacatgtgcagaatatgcacgtttgttacataggtatacatgtaccatggtggtttcctgcacccatcaacccatcacctacattaggtatttctcctaatgctatccctcccctagacccccaccccccaacaagccccagtgtgtgatgttcctctccctgtgtccatgtgttctcattgtacaactcccacttatgagtgtgaacatgcagtgtttggttttctgctcttgtgttagtttgctgagaatgatggtttccagcttcattcatgtcctgcaaagaacatgaactcatccttttttatggatccatagtattccatggtgtataagtgccacattttctttattattattattattattattattttattattattattattattttctttgagatggagtctcgctctgtcacccaggctggagtgcagtggcacgaccttggctgcctgcaacctctgcctcctgggttcaagcaattctcttgcttcagcctcctgaggagccaggactatgggtgcctgccactatgcctggctaattttttgtatttttagtagagacagggtttcaccgtgttagccaggacggtctcgatctcctggcctcatgatccgcctgccatggcctttcaaagtgctgggattacaggcatgagccaccatgcctggccgaaaattacttttataaataatttaggtatgactttagaatgcattttgcaatttatattatataaatatgaatttatccactgtcctaagagtttataatgcttcccattaattattcatatcatggtctgaaaatttgacttaggatagactacaaagccatcctgctgtcttgttctttcctagaactgtttcttgtctatcatcgttttggatctctgggttgcattctggttctattgatctagggcaactcacttaacattttgagcctcagctttcctatctgcaaactagataaactaataactgattgccttgcaagtaagtaaagcctgtaataaaatatctgatgcccgttagaagtcaggcaacatcttaggtactatctttacttttacttgaaattagcatcattcactgtttcaaatccacttttgtctccagttaaagtttggtatctttacttttctcctaaaatatgacgaagacaaatggaaatgatgaagatgttctattgccatattactggcatttttaattagtttgtgtatatggaggggagggacatttacttgagggttaaaaatttggttctaataacctctcaaacaggaaagatgtggattcctactatgagatcactttgaaattacataagcttttgttaagtcctaggaataattagttgagtaaataataatacttataataaacttaatttataaaaacatacacctacacacattcagagcaaaggaaagtgtgaattatgagatgcagaagtggcaaatcccaaaggaattattgcttaaagcaatattgtcttttaataatcatagatttttatttctcccttttaaaataaactgtaatttaaaaaaatctttatataatttcaacctcaaaatctaaaaaatacattcaaagaatctgctttttacaccaaaaaatgcaagtgatgtttaagaaaaaaatactgagacaatgtaatatctattggaaatagttcttttcctttttcccttatataattgctttttaaaaaaactgtatgagtgaggaaataaaggatgccatagtcttgcatattaaaaacaatacttgagcaaagcctcaatgtgagtttattcaatacagcagatgacttattgagtggaagaaggctttatgtgtgagactgcaatgtgtgagactcaaaagtggtttgggaattaactctaatgtagcatgctgggcattgcttaaatgtagtatgtgagtgaatgtgagtgcaatcagcttggtgagataatgcactatgaagtcatgtcccagcagggacagaacagcagaagcaatcattaagccacgcaaagaatggctcaggacaggcagagtttggagagaaagtcaagctctggcagagcgatattgatagccaacttttttttttttaaacaaaggcacaatattatatgcgtaggtacacatgaacttggagcatggggggttatacatgaatatttatatgtgtataaatgtataagaatttgcaagatgacaagagggcaaatcagttatgtcctgttctaagatgtggtttgtgggatctttctttctctgaggcgggcccacaaaatcatcactatcaaagagaagtccagaaccaaaggagtcaggatgtatttcactggatggtcatgttcatccatcgatctattcattcattcactattcaccactttttaaggcactatcatgtaacaggcaccatacatggaaatgggagtattgactaccgagaatcttactgtgaatacaatctgtatttcaattccttccatttaagacacagcacctcaaatttgtattacaaacaaatcatggggttgatgagatgtggtttagaaataggctggcgttttctctgaatatttttaatgttctattagtagaccttggaatctatcagtagaagggtggctctcagcaggtgggggtaaggaagggagtgagagtggtcttgtccccaagaggacatttgataatgtttgatgacattttggttgtgactactcagagaaggatgtgccactggcatctaaaaggtagaggccaggcatactacttaataatttacaatatacagcacagtgctccccaaacccctgcccaaagaaagaattatccagctcaaaatgagcacagtgctgaagttgacacctgagatagactagggtcatctactgctcaatagcacacaagctgcagcttgcaaaggacaccgcctcatgtggcaaggacagacgtcctgagcaatgtccatctttactctacttactttcaaggtcccagcctctgggaagtgggaagagataggccatttgggaccatgttttccctccctcacagtctaatgcagaagaggataaatggcactgtgggtctcccttcattaacgctcctcattaactcagcattttcctgcagattatatcaggctgttacataagcaagatgccttttgaaaggagaaatgatctcaaagatatatctgaaagctgacacatgtgtgtggaatgagaaagactactcctcatttcaccttgagaaaggcaggagggaagacaggctggtaagtttattgagtgtctatggatcataacccttataggatgtcagctttcatcttttattttttattttattattttctttttttttttttttttttgagatggatcttgctctgtcccccaggctgaagtgcagcagtaggatctcagctcattgcaacctccgcttcctgggttcaagtgattctcctgcctcagcctcctgagtagctgggactacaggtgcccaccaccatgcctggctaattttgtatttttagtagagacggggtttcaccagtttgtccaggctggtctcgaactcctgacctcaggtgatctgcccacctcggcctcccaaagtgctgagattacaggcatgagccactgcacccggccggatgtcagctttcagaaccagtttatcctccatgtcagcccctcctatggagcattccttacccacagcttggctgggctgaccaaactgatttatcatactgttgttgagggagagtagaaacaaagagattagcagataactacacaaacatacacaattgcatacacatgtgtgtatttctgggtttaaggaaggaaacagcatacctgcttcccacagtaggacaagtgctataatctcgactgactaatgaccaaagcttttcactccttgggttccgaaaggatatagattcacaccaccatgctgtaacattcattttaagcaagtttttaataggaaatgtctctgagagcatgaaaaaaaataggaaaaggatgttatatagtacttaatccaatcctgtacctaatccagcacagaacatgtttatctatgtagtgttaacaagacatttctgagttgaatgggaaaagcttttgctgtgtgatgtagactgtagagagcctcttgtctgcctttttcctttttctgtgcttccccttgtcccggtgtgccatcttacctttcagtccacttatttggaggcttcatttggagcctttctcagttatccttagggcacctcttggctccttggggttggtttctgccccttaagaggtctctccaagtgatcaggccacatcacacagaccttctttttgcttttgcaacagtggtggtttttatctacaagactgttctcccacttgagacaatctgccctgaagcaaacagatgtttgcattgagatctcccctctagatgaataaaatcttcccagaggctaatgctggctaggaaaggttttttgtgcacctatgaagcgtaactgagccctgagcaaccaactttgatgtatattttgtgattgaggaagaagaaaaaatcaaatagcatttctttctgccaaactgttttttgcagataaaaatttttgttgactgaagactttatccaatgtgtgctttgtcctcttccattaaaaagagttcagttgagattgctttttcttatattgtccttgaattttgttctctctgatgttgcttgcacatgatacttcatcagtaaaatggatcacataactgtcttctaaatctccatcttgtttggtttgctgagaaacaattttcatccaagcataaagtaattagttcaaagagtcagatttcaaaaggtggatgtctacagtcatggtgaaaatgaaatgagtacccttattttgggaggacattagctttgcctcagtaccttggatctccattattcataagatcttagatcaatgtgccttgaggtagcaacatttgtcataattggctgatacattagcgtctttcaataccaaatattaactttgactatgagatcagtaaaccatgtaatgatttttaacaagaaataataataacttgactttgaggatcagtgaagttaatagaaaacttttgagacaatggcatactcttagacaacaatgtaagcttggaatctaagaaaatgttatttgagccgtatttattgaaatgtgataacttggtttctatactcaatcacaaatactaatttaaacttgggaaaaacaaaccacaagacatagtgagtgggcagtcttgtttgaaccattcactttcaaagtgggcatagctcaatattcagagtcctcatatcagcagaagaaaaaataaaaaaaaactgaaggaggtgttaccctcagtaaaagagaaaatgatatttttattcctaagacaaacatttatttctcaagactttggaaagcaatgagtatcagagaatttttttttttctctttctcttttttttaaagctctttgcaaatccagaccacactattgattactattcattgctgaaggcagtattctgtattcaataaattaagctttaattcctaagtccaacaaaataattgacctcaaaaagaagataaatgaataggctgcagagctcatgattagaatccactttccagtctcattgtattagtatttttcaattcagtgattttcccattcttttttatcttctttcacaatctgttacgccttccaccctgttcctgtatcagcaaggccaagctactttcattcttggtttccagatcggaaggtttaacttatgatattctcatacttttatattaataatttaatatagtttccattttaggacaaactagataactagcatttttgaaaaaagtatgaaattctcttgatttcctaaaatgataagcaatatcagcatacagcatatataaatattttgataaatttatgcttctcaattttgcaaatttcgccctatctgcttcaatagtcattttctttaccgaatccctaaagattcagagagatttaataatattcaactttattttacatttagtaaaaataaaaaccatttggtgacctggacaaaattacacagtatttgtaatcccacagtttttgctgccactgtagcaacagaatgtctatttaaaaatatatatatatttcatagaaaggaggtaaacaaatgaaaagtactttcattgctgctttggtctgatttgaaaacaaatataaaacatttatcattattatagacaccatttaattatcaagacaatggtttgattgtatattaatcagaactgaagtggctaaaccaagcacttcttcagccaacttctaagaatgcacaagtagcttccatggaattaatggagaggtgttcgtcactatttcctttctgtatcttagcagagaatacccagaaccccagaaaggagaagagtccttttaaaaaattcctggagcttttgaaatatgcaggacttgatttgtccctgcatttctgagaaggggcatagtttcaggcaataaacggggactatgaagaggtaaagcagaatcattttactcttgggaacttagattgataacctcagaagcattatctttccttagctctttccctaccccaatttataatctctaaatgagataaaacttgaacttgctctacccaagcttatttgtgcaaaaggataggtgccctacacacacaaagtgtgtcttgagggagactagcatgagggccagtgaggctaatgatacccaatggctttaatttttgtcttatttttttgcatcctataagggatcccagtaacactcaagcgctgttgcaaagtggaagatttgaattattggtgtgcactttttcatttagaacctcataaccagaaagtccaattgtcaatattttattcaagttctataacatgatggtttatatttgtaatgataatccaagatactttaaggctttctgactcattatggccacctaaattatgctcattatagctttattatgaagtgaatttaattgcattatgaatatctgaacattgctaattgattgctatatatagaaactagaaagagtctaaaatatgacattaatttgaacatctcatttatggactatttcaaataaaagcaatttaatggaatttagtgttaggacaaatttataaataaactgaagcaaatgtgtttatcattatgtaaacaacaatactctgcacgttatatttgcaatatattttgatttgagtttgtatcaaaccataggattatttaaaatttaacaagaaatgattaaagaattgagctattttggaggaggattacatggtagactcctaatgttaatggaaatcatggggtattctgttttgagttgtacaaggtcatagatgtaggtcaaatcccatttaaaatatgttttttatctgtccattaacaccttaatcacaggatatgtttttccatgaaaatgtcaattaaaagcagttgtacttaaggtaagtgggtgccttgggctttctagatttcattaatttatgacttctttctgttttatctgcagaatttttccgagagctcctggagaatgcagaaaagtcactaaatgatatgtttgtacggacctatggcatgctgtacatgcagaattcagaagtcttccaggacctcttcacagagctgaaaaggtactacactgggggtaatgtgaatctggaggaaatgctcaatgacttttgggctcggctcctggaacggatgtttcagctgataaaccctcagtatcacttcagtgaagactacctggaatgtgtgagcaaatacactgaccagctcaagccatttggagacgtgccccggaaactgaagattcaggttacccgcgccttcattgctgccaggacctttgtccaggggctgactgtgggcagagaagttgcaaaccgagtttccaaggtaattgaaaacgtgctttctttctcattggtgttccttgtttattctgtttttaaaaccaatgtttaaaaaaaaaaaaaaaaaaaaaaaaaaccaaggtaaaaattcttaattggtggtccttgctcttaatcagttaaatatcaaagcataattctggctttcttttccttgcattgtgtgagagagaacaggattttaagccattctatgtggtttgaaaattaatgttaatacttatcagcagtatagcagagaagcttttagtaccaatggtgcaaaagcaggcacgttgcaactatgatcatttgatatttctgatcagggttttaaggatgataaatactcatgaaagaatccattcagaggttataatcctctagggagtcaagatgacagtcttcatggacctgcgaatggagacaagttattgttcaggacatcagcacctggcatttcttctttttcaacacatgtcaatgtggccaaattccttcatggtaaaagaagagccctttgctgacacctgtattactggattaggaaggactaatgagtaccaagtatagattctcctagagaatttcttttgttaccccttatctttgtaatttcataccatgcattgccttgggcttatgaataagatcaatcattaatctacttttgggcctttcttgaagataacatctctataccttggatataagggataattctacattccactacttaaacattgaatatttcctgtgtagaggatatctgcttttgtttaagttctttcttgacatttaaggcacttgtgaggtcagtcctccaaataaaatgaaagacaattacttaaagaagtaaagttaaaaataatacgtaacaggaatctggtattatgtcactccaagaaggtgtatttgtataaggattattcccaaacactacttttctattggagggctgtgccaaagagccacagtatttttcataactattggtactgtcctacaatgcttctttttttttttttgacactttggtctcctcaatatttacatcctagcataaagatggtgtgtacccttacaaatgtttctctattgcactgtcagtaaaatccgtaatagcccattttaaattgttaatttcctaaacgtttatttgagcatacagaaagattatttctaggaaggcgctgaaggaaataattacaagggcttatttatcaatataaagggcatatgattctaatgtttaaaataatatctttgccgggcgcggtggctcacatctgtaatcccagcactttgggaggttgaggcgggcagatctcgagggcaggagatcgagaccatcctggctaacatggtgaaaccccatctctactaaaaatacaaaaaaatagccaggcgtggtggtgggcgcctgtagtcccagctactctggaggctgaggcaggagaatggcatgaacctgggaggcggggcttgcagtgagctgagatcgagcctctgcactccagcctgggtgacagagcaagactccaactcaaaaaaaaaaaaaaaaaaaaaaaaaaaaaaaaaatatatatatatatatatatataatgtccttacattgaatctcaacaatgttttagataccaaagaaactagagccccagaaatgcatttataaggaattagctaggtagaatagcaagaggaaatatcatcacctgaggactgtcagtaaaatatgaataagtgtagaaaataaatatgcattccatattttcttgagtagatgcattttgttgtaaaataagtgtaaattaatttaataagttaaactcaataataggattagtcacagaggctgcaagctgaagcttttgattttgttgaaggataaacatgtagccagcctttgagaaatatgaattaagaaattcaaagtatggatggatatatgcctgattatgtgtatttattctaattgagtgttaataatgtttagatgtgtgtattatgatctggcaagtttccggtgagataacagaatattttctagcaaagtgtctacaaagccatgagggaggctgctgctggctatccctcctgtttttcagtgagtgtcattcacaactgcctagagatggtgtctccccttggtcactctctgactgcctcaactgaggtctttgttgaccaaagtctaacacgctattccttctggcgaaggatgacctcatgagccaaccatcagtagagtatgacctttttctctagaagtggtgagaaatgtattttccaacactgtattctctctcccactgatcccttcaagaccaccattcttttgcagaacaattgctgtgggcatggaatatagtccgtaggtcatttaaccttggaaagttaactgttccttgcagatattggcttgtttgacctgagtttcatcatcatccctaatcagttaaaattataagccccatcctgacatttgggcactgccttttggagatgggtagagagatagatggatggatggatggatggatggatgggtagataggtagatgatagagagagagagagagagagagagagagagagagagagagagagagagagatggtatatatatatatagccttggtttgaaagaagctgagcaatgcttttgtgaataatttgtctcaggaatttaagtattttaccaatgaacttcctcacctaatgattacaagatggtctagagccgactaaactagcaatttgtgatctactggtactatgatgattttcaacacccaaggtatttttgtaataagaataaaatatcacaaagactaaatacattaagaagagaagcaagaattgtgtttgaggtttaagcccttcataaacctgaagcctctttatggtctattaattgagtgatttagagttggagaaatgatgacagaagagttagaaaactcaaagcaaaattcccaaatggagatgaacaaactagcttatctcctgcatcctgatttgagtgatttttttttttctcttcagtttctctctacatttatggtgactttttaatcttgaaagacatcatgaatatcttctaattaattgctttgactggaaaatttacctctttggcagaacacagcagtttgacacaaatgttttgacataatgttcagaacattattgggaaatttcttaccagaaaaatggaggtctaaattgtaagcatcaacagaattatttttaaaacttctgcttgccatcttatggatacaaacagtctttttctagccttcagatggggccagtttattttaagtaactataactctaggtctgactcttagaagcaccatgtgactcttagaagcactatgtgattcttagtgaatatctatggtcagccagccaggattcattttctgtgtgaatgaccattttgagcatgtcaagtgttgatgagaggtggaatatcaggaacctccatgcattgctggtggaattatcaatttatatgctcactttagataataatctgaaaatacctgtattgttgaagatgtacctattctaaaacttcaatttcatccggataaactgttacatgtgcatacaattagacgtgtagaagagtgtttgtagcaggatcttttacaatgacatagaaagtagaaacgtcacaaatggcccatctgcctaaatggttatctcttcacatcatgaaattttccagagcatagaaagtgctcatgaatgagttacagaaacctcattgtgagagataaacatcaagtcatctaaaatacatacatttttatgaagttcaaaaatgtaaaactaagcaatacattgtttaggaataaaatatatgtagtaaaactccaaagaaatttcaaagaatgataaaaagaatcagatggtggttacctctggagatgcagtttggaggtaagatgaaggagggatacatagagatatctaaagttatcaataacatactatttcttaagccaggtgcttgaggagtgtgtgtgtgtgtgtgcatgcatgtatgtgcaagcatgtatacatgaatgtattgtgtaaagcttttttaatgaaataaattaagatgtagaaagattttaccattttccatctctgtttctacctgtgtaactacaattgagtccctgagctaccctcagttgtttgtagtactaactactgttcatggacctgctagcaagtcagtttccatgttccatattgtgctaagtgatgtcagaaaggcatggaaggaagagctctaaaatgaagaaaaaaataaattttgataatgtgggcaccttgacagaatggattcagactattttttagcactgtccctttattaaaataccaccgtcattcccttatcttccaccactagtgagtggaaacatggataccagccgtcactctgaaggcttgtcagacattgtgaggaagagagagggcttcataaagagatattaacagattgtctgcttaaaccagtctttattaattataaaggcaaatgtggaaatgactatagtgtcttcactagtccatcttgatgccatttacactaagaagacatgactttaaagtgacttctggcatggcatggtgtctcatacttgtaattctagcacttgaggaggccgaggcaggtagacagcttgagctcaagagttcaagacccagcctaggcaacatggtaaaatcctatctctacaaaaaatacaaaaattagccagtcatggtggcatgcacctgtagttccagctatttgagaggctgcagtgggagagtggcttgagcccaggaggtggaggtcgtagtgagccgagatcgtgccactgcacttcagcctgggcaacagagccagaccctgtctcaaaaaaacgtgacttctggccaggcgcagggctcacacctgtaatttgagcactttgggaggccgagacaggcagattacctgaggtcaggagtttgagaccagcctgaccaacatggagaaaccctgtctctactaaaaatacaaaattagccgggtgtggtggcacatgcctgtaatcccagctacttgggaggctgaagcaggagaatcgcttgaacccgggaggcagaggttgcagtgagccaagatcacgccattgcactccaacctggccaacaagagcaaaactccttctaaataaataaataaataaataaatttaaaaatttttaagaagtgacctctatgagtaaacgctgtaaattgtgtcaagagcaatcatttcaactttgcaagtcatctcattgatttattacagacaaatgggggaggtagtagagctgggatccatataacttgaactattgacaaatactgtcaactatctctctatccatctctctatcaaaaatctttcttcctgtggctcatgactttgaaaagaaagtctgacttttagtctttagtaaaaccggaatattttcatcaacagacacccacctacgtctgctacatagactgatgtttttgctcgaagagcctcttaagtggttcattcccaactaaacagctttgcattaatgtgtgcctagaaagcaacagacaaagtcaactttcaataaatgtggttgatgcactataaggaaaaatgttattaccaaatttaatgaaatagaggttatcaaatgcctctgtttaaagtattctctgatcacaatggaaaaccattctgaagaatttaccatggattcaatttacaagagaaattgtattctatttagcgtttgcttttgagaaagaattgagaatacaaagatcacctgttgtcattatcacctgagttacttgttttgtccttctgtggtggtttttggattggagttaatttttgggagggcattccagaaatgaacacaatcacaaaaaggccttaggtgaatgaaagtttttttatagttcatttgtgattagtgtattcatttctgtaactgataatttttctatgtagattacttcaataatatacagtgttatgaataattggcaagccttttgaaattatcaatgatgtttctatgcttacaacttttaaatcagcataatctgtgactgctgtcttatgatggtatttcgagtattatattatatttagaaagtactttgcacttgataaataatttcataataaaaatagtaagaaattgatattgggactaggaaccataataacaaaaatagattattaagataaatcattaaaaatgcaagaatcttaccatggttcagatactgtgctaagcactagaaattacaagagtataagaaagtccaggtgtcagtagaagaaaagaacattttcccctctagaacagcatatggaatgtatcacagttgagtctccagcagtaagaaagtttcactttgattaaaacaatttgattatattgattgaaacaatttaagtttttctcattaattttaagtaatcttgcaaaatgtatagcctaggtatgtaaatatggaagattgttaagaagagagtataaaccaaggaaaatgaagctatctatttccaatgaattaaaggctatttgtgtaatcttgttcttttgtagcttgtgtatgtttccagtaacctatgtctgagttatattacttcatggtaaaattatactatgtataggaagtcagttaaaacaaccacctgtctctccactgaatctgattttgaagttttattcatattgaaagaagttagggattccataaccctatctaaatgtaccatggctagaaaaacttgtttggaaccacagtcctaataactgtattgtacctatcgaatataaacttctgtcttctacaatctgagataggtggttatgataatccaaccttcatctgacccaaatgttaactcttgtaaaaacagagccactatagagatttagctcagtcctgatcagtaaacatttgttctttgtattttgtatgtcaagtactgtcggttaacttcctgagacatgaagactaagcaggttacagcatttacaagtaataattaggaagagtgaaacagaagcaaataatgtcaatatataatgaatacatattcatttatgtatatgaacattatttatgtaatgaacatttattatgcaataaatgctttgggaactgagaggagaggcacctagcttaatttggtaggaggagtcacaagtaaactttccttgaaccatgtgttaaaggttgcataggtgttgggcaggtgatgagggcacctagcacagtgaaggacattttaggcagaggcagtaacagagcagaagtgcagaggtgtgaaactgaatgatgtgtgcagggagctacaagcatgttatccttgagccataaagtacaaagcaatgatttgcaggagacaaggatagagaccttaactgaacccttgaatgaaaaccatctatttcactaatggttttgtttgtctattctgcctgcataatttaaaacagtttctgtggatagaagcattccagtactttcaagagacagacatgggctgagcacctactatgtgccaggcacttctctataagaaacagagggaaaaacaatgaatggcattgtccttgagggattcacagtctatcacgaagagagacattatgaaaagtccaagtgtagtgtaattaatcagggtgacagacgtatggataaaatactatatgaaccaatggaaatacatgtttccctttaccttgggaaacgggagcagacatcttagagtagggaatcatcagatgtggacttaaagaatgaatagcatctcacagagggaaaaaagaggtatggctttcttgccaagggcccagcatgtgcaaaggcataaatcatgaaatgttatggttgtttggaaatgaggccgggaagtagatttgaaccatatcatttgggcatattatttttaagttaaggaatttgaagagcatcacgtgagctgtggaccaccagctaagattttttaaaagacaaatatataattggttattttttcacttaagaaagatgggcagggagctgataaactggctgaaaggagacacactgatggcaggtgctgggatgggaagctgttgcaattaaccagacaaggggtgatgagacctgagtcaaagcagcatggagcagattggggagcacatctggaaagaccgcagagaccctccagctcaacagccacgatgcatagtttagggccctgtccccagagtcagggatggaactgtttgggaacagttgtctgcctgctgactgatttgaatatcaccaacatataaatgtttgttggcaaaggatagcaacatttatctagagaaagaagaatcaggatcagatgaaatgtcagagactgtgcacatttaaagagagttctgaaaacaaagacaaatgatgagaaccagcaaagcacgccctcctgaaagtaaagagagagagaattcaagaaatagactaatcaatagcatcaactgtggcagatagttaagtggaaagggcagagaaaacagaccttaggatgtggccattaggatgttaatgactttagcaagcgcaggttgacttgagtggtttaattggttgggaagttaacttatcttcccctacacattctagaacaaggtgtgcaaagcttggttcgtggactgctgcatgttcataaataggctgttactgttttgccacaagatacacaccaaaattgaaagttaaaaaaaaatctttacatcaatttcacattgctctgacaccatcaatgggacttttcctgggatgttgaatttgcatggtgaggctcctatgtgtgagcggcatattagttgtactcaataggatcaggtatcaggtcatgatatattggtttttaattctgtttatgtggcgtatcacatttattctgtttatgtggtgtatcacatttattctgaatgtaaactgtggcttatcaccgtttacactgctgtgtaaactttgcacagcagtcacatcgtcatcacttacacatgtacaagtgaggagggtaggcaaggtatgtgataccatgggcccaacttgaaagtttggaggatttctcttttattgtcccgtcttcagagattcaatgttatgaggatgttccctggtgcaatatcagcgcactatagaggtttctgagccaagatcttgcatatgttaaaccatccctgcatccttgatatgaaacccacttgagcatggtgggttatttttttgatatgttgttggattcggttagctagtatttagttaaggattttagcatctatattcatcgaggatatcagtccgtagttttctttttgggttgtgtcctttcctggttttggtattagggtgatgctggcttcatagaatgaattagggagggttccttctttctctatcttgtggaatagtgtcaaaaggattggtgccaattcttctttgatatctggtagaattctgctatgaatctgtctggtcctgtactttttttgtgggtaattttaaaattaccatttcaatctcactgcttgttattgaagctggttctttgaaaagataaataaaattgatagagtattagcaagattgaccaagcaaagaagaaagaaaatccaaataaccacactaagaaatgaaacaggagatgttacaactgacaccactgaaacacaaaagatcattcgaggctactgtgaacacatttacgcacataaactagaaaacctagaagagatggataaattcctggaaaatacaaccctgttagcttaaatcaggaagaattagataccctgaacaggttgtgatatattgggaaaaatcaatcaaccaaagattgttcagataatttgaaccccaaacagataatttgaaatgtactattctagaataatgctaaaaacaggaaaataatgaacatattttgattgattttgttgatatgttgggtttacctttcctgtgttcagctcctctttacctatttttgtaccttcctaccctagcagtttttcccaggggtatattctgggtatgtacaaccatgatgagctttcagaaaactcattatgattggcatgtctactgtttgcctatccccctcaaatacaagaacttccctgggaccgtggaaaatgtgtgcaacaaacagatgagacgtctttgttactaatagggaacatccacgggtgaaatatgccaattaaagtacagcacaaataaaaaagacccaaggataaaacactagtgctataactcagagaatgctgcttgtaaaacagctttatgaagaaaaatgaacctgacgtttatcccagtctcaatgctgcccatttttggacatttatttctgaatgcaattatgctcttcctatgagagggttctgtgaaacaaggtttgcacagcaggcacactgtaatcacttacacatgtacgagtgaggagggtaggcaaggtgtgtgataccatgggcccaacttgaaagtttggaggatttctattttattgtcccatcttcagagattcaatgttacaaggacattccctggtgcaatatcagcgcactatagaggtttatgagccaagatacacatcaaaaataattttaataaagcttgacagatatattgccttaatagtgctgacatagtgaagcgggacttatatagggaatacgacatcctaacatttttaaaaatgagatattaggtcacacagatatttgtaagaaagaggggggtatgttattacattttgtagatttcctccattgttatctttgtcattgcaagcaagggttattcctttgcatctatttgcattatacctcttcatcctgatgagtgatattcagcacaaacacaatgggtcaatctcagatacttagaatatagtaatcataccaaacaatgttgaaactctacattttttgtgtctaaatcaaataaccaagagtgaaaatggacagttcagagtgtcagtaataggataacggtgactctaacattcagacgtaagtaaaactatagccgaaatcagtagatactgccaagttaacatcaaatgacccttaagtggcttgcatacacagaattttttaattcatttttgcccttgcaggaacatgctgcatgtcagaaatgccactgtcatatttaatactgaacagagagcagtggattttatatggaaattttaaccttttcagattgtagtgtctgaagaagtgaggaagatcaacttttctatgttaattttgtatagaattttggcaatcaaaaagtacattcactgaatattttaaactttcataaatacattaattacggaaacattatgcatactatttttatagtaggtacaaatacaagtcttttcatagagaaatatattcatttataaataatgggttttaaaattttcatttgctctcagctttctaaaaacacgttctgttactaaaaatgtatcaagacataaggaaatacttatttcattgtttttaatgaaaatggacaacatttagtaagaagtacacaattttataacgctttaaaaattagcagagaaccaagcactttgcagaagtctttgttcttttcatcttagaattttgttgcacaaatcagaggctcagccaaggagaattcaactgtgcttgcaataaagcattttattggaaagacaaaccttacgatattctgctgcatcggtagagagaagataactatataaaatatttatgccccattttccataaaatatcaaaaatatctattttggaatggagaaaaaagtaccctgacatttttggctaggatggaagatagaatccagattgaaagtcttttttatttgtgcagattttttttcagtgttagtgtgatagtactttcccaacaatggtctgttatcctaaatgtttaacaaattgtaaaacctttcactcccaactgtccaagacttccctcttgattgcttgtgtttgtcacttgggttgtgattttgcagtagagaactggagaaatgaaataatattatgaatcaccctagccaaatagacatttatatccttcaaattactgaggaaatttaagttgttgctccagcttaaatcaccaggatatttattttttgttggtggtaagaaaaataagtcaccaggatatttattttttgttggtggtaagaaaaataattttaagtatcttcatatatttttttctgatcctaaaatcaatatgtgtgttcatctgaatttttttgaagaagcagaaaagtacaaagaagaaaataaaatattctaaattctccatacccagagataattaaatgtcaaaagttttatttctagtatatctctaatatgattttatattgcaaaattatgtgtgctgtttgatattaaattctacttttattattttaacatcacatgcatttccccacctcggtggcacttctttttttttttttttaagtactcctatatcttaaaaattttcttttacaacctaagagatttgtttgctgccgatatatctgggtatctcttacaaaaaaataattccctaaacagccttacctagaaaataaaacagttggctcacatcgtttgtttgcatgtgtgggtgtacatgtgtgtgcatgtttagcctgactcacttttcactctgaattccaaggtacatgggagctccgtagctctcttatcatgtatttaactgctggaatttactgatcactttatacctactccacatagttccataacttagaaacagttttcattcaaaagggaaaagaaaggatgggtatataaaggggagataaggaatgaggctgacaaaaaaatgtgtggtagaaatccatgaacaataccttccattgggccccaaatctgaatctatgtcagattaaaaactggtggaccttggtccaaactggcccagttgtataaaaaaacataatttatttggcatgagctctttaggatttcaagcaatgtttttaaattgggcggattgacataaaatatggatttctacagtttcttggaagataaaacaaccctgagccggcaattgcatagcaaagatcagctggagttaattagtctttagactgagcttttttttgccttagcatccatgttcagtttaacgcaggtctgaacactcctggagttggcctgatcctgaattcagtgctagttgccatttagctcagtgcttagctcctttgttcataataaataaatatttttctgtacctattttttaaccaaaagtgaaaaagtgtaatccaaataagccatgtgtcaagaaaaataatgcttcaaaaataatgcttttttttgttttgttttggaagtacacaatatgttaaatatttaatatacaaatagcatctgtggttaaagaacacattcagtgaacttcactcacagttattgttcatctccctagcctgtgaacttgcaaagtctcctttaagctttatattggccatcatttggtgtaaacactgtttcttttttttaagacagagtctcgctctgtcaccaggctggagtgcaatgccacgatctcagctcactgcaaacttcacttcctgcgttcaagtgattctcctgccttagcctcctgagtagctgggactacaggcatgcaccaccatgcccagctaatttttgtatttttagtagagacggggtttcaccatgttggccaggatggtctcgatctcttgacctcatggtccgcccacctcagcctcccaaagtgttggaattacaggcatgagccatcacgcctggccggtaaacactatttcttaattaaatgaaagtaaaccccactttttgatggggttgtttgtttttttcttgtaaatttgtttgagttcattgtagattctggatattagccctttttcagatgagtaggttgcgaaaattttctcccatgttgtaggttgcctgttcactctgatggtagtttcttttgctgtgcagaagctctttagtttaattagatcccatttgtcaattttggcttttgttgccattgcttttggtgttttggacatgaagtccttgcccacgcctatgtcctgaatggtaatgcctaggttttcttctagggtttttatggttttaggtctaacgtttaaatctttaatccatcttgaattgatttttgtataaggtgtaaggaagggatccagtttcagctttctacatatggctagccaattttcccagcaccatttattaaatagggaatcctttccccattgcttgtttttctgaggtttgtcaaagatcagatagttgtaggtatgcggcgttatttctaagggctctgttctgttccattgatctatatctctgttttggtaccagtaccatgctgttttggttactgtagccttgtagtatagtttgaagtcaggtagcgtgatgcctccagctttgttcttttggcttaggattgacttggcgatgcgggctcttttttgcttccatatgaactttaaagtagttttttccaactctgtgaacagacacttctcaaaagaagacatttatgcagccaaaaaacacatgaaaaaatgctcatcatcactggccatcagagaaatgcaaatcaaaaccactatgagatatcatctcacaccagttagaatggcaatcattaaaatgtcaggaaacaacaggtgctggagaggatgtggagaaataggaacacttttacactgttggtgggactgtaaactagttcaaccattgtggaagtcagtgtggcgattcctcagggatctagaactagaaataccatttgacccagccatcccattactgggtatatacccaaaggactataaatcatgctgctataaagagacatgcacatgtatgtttattgcggcattattcacaatagcaaagacttggaaccaacccaaatgtccaataatgatagactggattaagaaaatgtggcacatatacaccatggaatactatgcagccataaaaaatgatgagttcatgtcctttgtagggacatggatgaaattggaaatcatcattctcagtaaactatcgcaagaacaaaaaaccaaacaccgtatattctcactcataggtgggaattgaacaatgagatcacgtggacacatgaaggggaataccacactctggggactgttgtggggtggggggaggggggagggatagcattgggagatatatctaatgctagatgacgagttagtgggtgcagcgcaccagcatggcacatgtatacatatgcaactaacctgcacaatgtgcacatgtaccctaaaacttaaagtataataaaaaataaataaataaataaataaatgaaagtaaaccaaaagctaagaagaaaactctactatttctgatgttaggaccagggaagaatcctcccttccattaatgccctcaaaaacatcctcgtaatatatacaactagacattgaagccaaaatgtaccaaaatgtatagcaagcacaggcttagaattgttcctattttatgtcattataatatcatcaccattatgaaaattctcttcctgttcaatgtaatgcaagctaacaaatgattacttgccagccactatgctaagtactttttacaccttgccatttagcccttacattaaacctatgagataggtatggttatcattccacttattatataagaaacctaaagcagaatgacacagagcctatgctgtaatattccacactgcttcacccacagttgaatttttggtctctaaatacagcaacctaatgcaaaactcaatggtctatggtagtgctattcgacaggaatatgatgtgagccacatatataatttgaaattttcaggctgggcacggtggctcacgcctgtaatcccagcaatttgggaggccgaggcaggtggatcacgtgatgtcaggagtttgagaccagtctggccaacatggtgaaacctgtctctacttaaagtacaaaaaaattagccaggcatgatggtgagcacctgtaatcccagctactcgggagactgaggcagaagaatcacttgaaccggggagacggaggttgcagtgagctgagattgcgccattgcactccagcctcaaattttggtgtgtattttgtgcttatagcacatttggggttggactagccacatttcacatactgaagaagagcttgtggctatagctaaggaattagtatggagataatgttttaatacattattctcatatttaagataagaaaatttaaaatatctccctaggaagcctaaactcttgtggatgattattcatacactttctgtttatttcacgattattcatacacaaggaaaatggagaaatattctgtcttttcataatgcatttttgtctgtaattggaactctaacataagtaacatagacactttattgagggatttgttcttgccattgcctcaaaggccctacaaggagtgctacttctgtcccttaagtgtaatggccatgaggaaggttgcaagtcatcatggatgaactactctgtgattttcattcggctctggggaagtggaggagacgcattaatacaggaggtggcacgtgtctgtggatgttagtatcagcagtaaacgaaataaataaatgcccaattatgatcatgagaaggggccgtctgagatgtttagctctttaaaaatagccataatactcataaagctggcccgtcactgggttaaatgactcaaaaccacatgactcatttgtgttcacgtagatttgagggtgtttcacaatctttgggtaaagaaggttcttttcaggtaacagccatgaagcattggttctatttgatttgtcattaaacattttagaatataactttttaaaaaatatgaaattacaattttagtgaattattacttgggtgcatacggtgttacactaagtaagttaaccaaattgacattcattgtcccaaaatgcttatctccatgaggaaggatcttctcattaggtgggtcatatttaataattcctattaatttttaagtatgcattatggaattgatactttcaccgccatgctgcaaattgtgatgtgtaattcattttccttttgtaatatagagagtcagatcaacctggcagaagtatatgcctctgtggctgcaaccatgttctgaatacacacaactttctcctgggctcaaagtatcatggtgctgaagagctgactttgggcttattttataattctcttcgttaaattaatttagaatatgtacatggatttattgtgagatttaaagtcctttccctcaagagagcccagaatattggtctagcagttttttgaacacaacattgactcaatttctggggccagtcaatttaatgtcagcatcccataatcttagctacacagtcattttctctctacttttcacttctgagtcaaaaatctttttgagagattacaagtatgtcagagtatttccaacagagagaaagtttgtacataacttctatctgcatcctcaaattcttactttttctttattccagcatctacggtttgtgctttctcttgggtactcagaaaccctcaaactattgaaaattgagtttagaaatttcaagcaacacaatcattttgtaactttcgttttgtgttgctttctttctgtgttgcttcctctctatatttctccctttcccgtgccttggtttctgctgaaatctacatctcaatcaccccaagaataggctgttgccaccttaaggcaaccctcccagtcattaggctctgtaccttcttttgggcatcctacgaatatcttcatcaaataccactttgatgaggttactgtcctgtttacaagtcctggcagtatattacttatcaattactttttaaaaatctggggtatttactaagtccttgattctctgctaggcatggactttaaatgtcatattcctaccctcaagaggttgacaagtctgaagtccgcagccttgcctttaagtcttccatctctcacttaccttgcggcctggtatctttagtcccaactcaacagccaatttctcaagcaaatttgtcttgcccactgccccccgcaaccaatgtaatttttatcagagtttctttgccactttccttactcattgtgccttcctctcccctttctttcaaacccagctcgcttgcctcactcaaaacttgctaaaatccactgaccaccatatctcatgtatccaggaagctccttagagctgaaccagttttttactcaccctcttttcagaacccctgtactaagatttcagcatgtttgttgattcaaagttttcacattgtaccatacagtgggccttcccaacctgaaattgtaaactagtactcagggaaggaacatgccttccatccttatcattcctcagagcaagaactattgcaatttggatatggtagacgttgaataaatattattacttctattatattactttttttctttctttcagtcttaccatggttgggatgaaggagagtaatattcatatgcgttataacatctcccactttattgtaaatagtgccctgcctgaatacctgatggttttggaaaaggatgtactatagttctttctaaaaccctactttctcacaaaagagataaaattaaatactcatggcatgttgttacccaacagagtggtagcttctttttaggttttttggaatatccagctcgaaagacattgtagatgaatgaaagatgaatgactgaatataagctgagaaggcccatctccctctagctctcacctagatgcagttgcagctcaagatctgctgaagagtggtgaatctttgtactcagacttccaaaacacctatatctatactgtccacctatacatagataaagatatctatactgtttccatagttaatggagcaactcttctttccctcagattttcccttcttgccttagaattcagctcatctttccagaggcttgttgacttacttattacaattgagtttggtaaatgattagtggaaggaagggtataccagtagtttcatagtcttcacacgtgaacattgtacatttccctaggtgtgggtaaacagaagagaaagatgtaccaaaatgctaaaatgatgggaacatttttaccgtgaattattagaattattaaggagaaaggaaagaaataaagggagaagcaactaataatctcttttgtaaagtgctcacattgcacatttacaattaagctgttctgacttctgtaattaaaataatttcctctgagaggtcttaatcattcatgcccatgagtaaaaaaaggctgttgtcatgaatgagcgattaaaaggaagatcttattcagatgcattagttcctatgagaaatctttgaaaacaaaccacgcatgaaaaagacaatcagtaggtttggccagggtaattttggcaatctgtagaaaacaccagtgcatatgtttattcaccccttcattcagcagcatttattgaacaccaactctttggcaggtgcagtgggtgcgatggtaaataacacctagcccagccttagaattcccattctaaagtggatcccagacaaatgaatagtagaggccaatgagggctaagataggtattcatgagtcataataactcgggagaccattggtacaagctcaacctatggggaccctttgaccttagaccattttattttgccagtcacagattttatatcaacagaagcataaattctaatgaagatatgaaaattcactgtttattgagaaaataaaactccataaacaactagttaatatttattgactagtcacaaggtatatgcaactgctgctgggaacagtgaattttaattatatatatatgtacattttctcttttacattatatgctatatcatgaccgtaatatgaaaataacataggagaaaatgtaaagagaggagaaacttgatgtaatccagagctcgttagaccagaaataggagatacctggaagggaattcttagtttgaccctaattagttgtctgaataacttaatttcttttctctttgatgaagtgaggagattagaccacatgaaatgcttattgggaatgaaattcccaatgtgatggttattgaggtcttagacatatgactgagaaactgaagtatagtttcaggactgcacctctgagcatttagatctgccttggaaggggttggccaattaatgcactagcagttattttgaaagttgtaggctgtacttcattgtatgtgtctttgaatatggcttgagaatctaactacttctgattgtcatccttgtaattgggcttaattctaattttggtgtaacacagcttacttttataataacaggactttttaaaaaatcacttcaaattccaaagacagtgttgagcagctggatacctgtatgcctaatggatttccatgggcctctagaattcaacctgttttgctggcagagccagacatctaaatctactatactatgtttttgtatatgattcataattttaattttggcactcatgatctatttggtgttaaatacacgttactgccagagataatggatgtcctcctaaggaaatggtgtttgcagtgttctctattgaatctcacatttgattggcatgtgtatcctaaaaaaattggcatagcactttgttagagggcacagtgccatctaacagtcagggaagaatataggctgaaaagtgatcacaaatgaagtcagctaggagtgttcaggaatcaagatttggctcactgcagtagagggaaataagtacttttatgaaagtcttcttttatgctaaagtttccactgactgtaacctttaaatatatctcgggaagatttgaaggcacttttgctagcttggaagaattatgtttaaaatttaattgtataatgatgttgaaaaacagcattatgtttgtatttactctacagtttgttaaatcaatatgcaggtgaatctagtatatcaaatcgcacagtcaacaggattttgtgtaccaagtaaaataagtagaggattatatccttctgccacttgttacctagtgaaattctaggtcactgagcttctgttatctcatcttcaaagtggggataataggaagtggggatgatgtacttacctgaagtttttatgatagttatatgagacaaaaatatgataaacgtgtttggtaagcaatagcagattcctaagactaagaatagtctataatatcacagttttacatagaggtgaaaaaagcaaaatgtattccaaagtagttgacaacaaaaacctatgacagcaatatcaaatttaaacactgtaatattctgtattataaacatgatgatactaattatggaatactataccggttctgaggaataggctctctttatatctactctagtctcattacactgctaggcattggcaaacaaaggaacacacatggaagtcatctcagtttttgttcttgtctaaagtttacaggtatatgcacaatgccttttggaaacgcatactttgtaaactgcatataagatacacatggggctgaatcaataaagttcagcagacaccacattcctattctgttctctgtattctctccaaagtatctttaaggctacagtcaacaataagatttttgttgtagacaactaattaaagccgaaataagcactccaaataatttcatgatttctactggaaattttcaggacttagcaatttgtggtacaatatgtctaaaataaatactaccagcttttcctaaagtagagcctacagtataaagttaaaagtaaaaactttctgattaatgatttctctctctctctccaattaatagcagaaaaccactgaaaagagactttttccccacaaactctcaattcttgtacacatggttttattattgattgtacatgggaactgactgtgattctgttacttgaaattttattgttccctgagtgttgacttcaaaattacatctcttctctgttggatcttctgaatggctatgatccagtttccaatctagagggatatttcaccctctctcttattggctagtatcattcccagaagggatctgtcttttgtgcttattaaagtttattttgtacaaaaatttatgttcctcatcttagtatttaatcagtattttaatcttatgcaggcaacatatgtaccaatttcaaggggataaaatggtaattaaaaatccagttaaaaaataattacaaatatttctggggaaatacagaagaaatgtgatgaacattgttctatgtttactatttcctcttctgacattgtcactaataatgaaaagttttatttaaaaaccaaaacacggtcaagcaatactctaattaaatggtggggataattttaaaaattcagccaggctccaggagtataattcaaggttaagtaacatctatttgtctttccctgcttcttgcctatatgtaatcttttcttcttggtacaatgcatcggtgtgaacaacgccttaccaccactatggcaaaggaaccattggatttataaataaggcagaaaaatcagtttattatcatattaccattctccacaacaatttctttgtctttcaaaaaccaagtagaggttaaagtgtagaactgagtaaagcttgtaaaatcatttgcaagtctttaatcaaatttttacattcaggataaattgttctaatagaccgttctatataatgccttaattactatattttcactcctaaaaccttcaatcgagacagaaataaaaaaaatatgaattttaaaattttactctatttaacacctgtagacaatttgtctcttatccttgtgttagtcaatccctttaaactcacatggtggcaataattgtatctttatgaagtagtatagttgatcaaattcaaactgccttccccagataatgatacacgttaatgtgttttctgaatttctttactgatgctccagaaaggaagacaagttcatttttataattttatttttaatatttgtgttattgttgtcctcacgggaattaaatactatatatgaacactattaaaattcacaaaactactcaagtcaatgaaacacagtaacatgttcacagggacaagataaaatgactgtaactattgtcaggtgtcggaattgctttagccttttccataaatcatggtggaagtatcattatcatacatgattaatgacacttcacgtcgtggatctgattacaaccacaaaacaaagaaaataaagaggaaatcattcatgaacaccctctatgcaaaggttggggtgtttctttcaaattaccataatctgcctactcagccagtcaaacacaattcactgaatccaacagagacctaacagagattttcctgatgatattcaggtctctttcataaacactgagtgagcagtttggggaacagcaataatcttttttccttcatcccatttctcgtttggaaatctctgaatccgtatttattgatccaagctaccttatattgaaaaactatttttttcacgatagtagtatttgatttatttaaagataaccttaaacctcatgattctgcaaaatgctagggtatttttccccaaaactgtgctctttagttatctgttctcaaatcacacttgtttcttaatagaatgagcttacatgttatattttcatttggattatattgttaaattttcactggtaatccactgaaatcacacgtgaagattttctttgaaatacatgttaaaattattttaatacaaaagacattttatatagttgagatattttctgatttttaagaagcatctacatacatggaataacgttttaattattgactacagagtattcttatccattaatcaactaactaatccattaatatagtctgcttgataacacattatttgtatcactttttgttatttttagaaatttacaacaatgaactttcttttattgaatagtctatccttaagatacctaatttactttcccacctaaaagaatctaagtacatttttttaaaagaatagacattctttttcagagcagttttaggtccacagcaaaattggaaggtacagagatttcccacataacctttcccctcctgcccctcacctcatgtacagcctcccctggtatcaatgtccccaccagagtggcacatgtgttatgactgatgaacctcattgacacatcattatcaaaaaggaccatagtttacattaggttcactcttgtgttgtacattttgtaggtttggacaaacatctaataacatgtgttcacttttacagtatcctacagaataatgctgccctgaaaactctctatgtcccacctgtttatctctccatccttactaatccctggcaataactgatatttgtattgtctctatagtttttgcttttccagaatggcatgtagttgggaattctacagtatgtagccttttcagattggcttctttgacttagtcatatgtttgtgaggtttctccgtgtctcttcatggcctggtagctcatttccttttaagattcaataatattccattatctgggtgtaacacaattttatttatccattcatctacggaaggatatcttggttgcttccaagttttggcaattatgaataaagctttcataaatatctgcatggaggtttttgtgtggatatgttttcagttcctttgggaaaataccaaggagcaagaatgcaggatagtatttatagttttgggagaaactgacaaactgtcttccaaagtggctataccatttttcattcccaccagcaatgagtgagagtttctgttgctctacattctcaccagcatttggtgttgtcagtgttctggattttggtcattctaataagtgtgtagtgtatctcattgttgttttcttttgcatttccctgatgacatatgatgtggagcatcttttcgtatgcttatttgccatttgtttgcttatttgccatttgtatgccatttgtatgtcagtgaggtgtcgaagtctttagatcattttttgattgacttgttttcttattgttgattttaatcattctttctatattttggataacagtattttatcagatatgcctactgcaaatattttctcccagcctgtggcttctcctttcattctcttgacagtgtctttcacagagcagtttttaattttaatgaagtccagtgtattgattctttcatggatcatgccttttgtgtttgttcctcagatgcatatgaattggtgagagagtatatatcagcattcttgcactgccatctcagttctctccttcaggctcaagaggctacaacacagcctcctataaactatgcttcccaaaataatcttatttgggtgaaaattgccttccctataggtctactcaacagcagctgaaagttgagagttaagcagaatatcgtgactcctaagtgatgtcaagtgggttgaggataaggcaggatgtccaaagaatgtttaagtcatccaaacattaacaatcagcaagtattaatggagcacttaccttgtttcaggtgctgtggtaggcagagtgtactgagaggtccagaaggcatggatcctcactacaaaaatatcagaataagagacaaaggaacataggcaaatgagaaatttgtagggagctgtgtgtagcaaaaatatttgcacagtttactccaaagagtaagtaagaaactatgtctcaatgatgcagtgggtagttagttggtgcacaggcttgggaagaacctagatatcctgatgcctgaactaattttgcaaagatacagatattttcaaggtggacatgtgtagaacatcattctatgcagatggaactgtggtggacatgtttgaggtggctatagcttcaattaaaagaaataagcactttggagaaacaaaccaggaatggattgtgagtcttgactttgataatggatcctcttgctacatcattagctgacctccagacctggttcattgtgcctccatttaagagaacgtggttaaataggcaaagccaaatttcttgtggatttaataaaataagaagtcaaagaaaaatagcagtaactaccttttctcattgccactgtctggtgcctatttcttgttgtagattcttattcaacatttcctatattaaaatggcaatacaatacaatatttacagccacatatcacttatttagtaccaaagggatgcaatgcattttgtcactaacatcacctgaagacatttttcccattggtcactattagaagggggtataaaattcatccttattggaaaaaggaaaatagatcacaataaattgcaaacacatcagggagtttactcctaagcagcaggagagaatcaaagaaagttttcatgtagaaggaaggcagcagaatgaaagaatcactctgtgggagatgacaaaccataaaaatatcagaggtgttgcataagatttggaaatggtcagctatgtcaacccattgtgaattctatagatagctcaagttttgtgcagatgttatccagaataatttgatcaggtcctgtcttgtttagagaataataaaatggtgcctttgtcagcatgtgcaagtgatataacaacagtttatttttattccttgagaattggaaattgtctttatctctgaataaaaagaagcccagagattcagcccactttcaggtctttggaatatatacaaagtaaggtagaaaaaaagaagctttaaattgaaatctatttaaaatattgggaatatcatatgttatttataggactgttggtaactgttactttgctttctgaacacattgttttcagcaaatgcgttaaagcaaagggctactactactaagggctagagaaagtggaatgggagaactggcctttaagttgctaataatttttccaaatagagaaaatgtatatatacaccccgaataaagaacaacacagaaatataagtgccaaactatgtaatacagactataaataatatatagggtcaaagagaggaatgatctttgtgggccatagataatggggaagaggaaagaactgaattgaaccattagtatttattttcttttttcactttgagagtggataaattgctgctaacatacattaattacatattacaattcaaattctaccctataacaaaaaatctacaactaccctttaaaacaatttattttaaataatattaattataatgtaaatgcattggttgtctaccacttaacagtttgactgattagttgctattgatatttttcagtgctgaaagtgcttcttattcacaaatctttattcgtacaattaaatcttttttgaggtggtcaaattaatcccaattactatctgttgttttgttaataacataatatttctacactgtcattatattattaattgagcttgtataaataaataatggccaatggattatggttatatgtggggtctattagttatgaaattttagtttgccattttaggtcccatacataatttggcatcaacactttattaatgcaaacaagtagaaaatttgaaacttatctccaatggaagatggaagactggatgagatcaccaaggaaatgagtgcatgtagggaagagtagagatccaagaactccagcttcagaaatctcaaagaaatggacaaatcagcaaagacgattgaggaaaagaaccaatgagacagaaagaacaccatgaaaacatgatgttctagaattcaagtttaaaaacctgtagcacggaggagggaaggaggagaagcaagtaacagtttgcaaaagagtatgagaatgagaatggcctgtcaaattagccatgcagagctcattggtggtatcgactagcagttttattggagtagtgggggtgaaagtctaagtggttttagggaagaataggaggagagtcactgtgggcagcaaatgtaaacaagacttttgaggaattttgttataaaaagggaagggagacattgaagctaacttcaaagtagaataaagggaaagaggattattatctaatactattaatagtaatgattattattatgttaagatgaaagaaatgagaatttgtattgtgctaatgggagtcaacgcagagaaaaatttctaatgaacacttcattaacttaggtcatctctttaacatctctgtggggtctatactattatatcttcaatttaatagaagcagtaacattacccagctagcatgtgggcaatctggtattttattcttggcattattgtccagtcttaggtcttaagcactttctcttaaacagtatctatcttttaaaaatgcacaaacatgtacttataccagctaaattataatgtatccacgtaccattttctttagggaatttcttagtgatgtgtctaattgttctttcattttcatgtattttactgaaaaataaactattcagtgttatattggttaatataagttctcatcaatttctgaaatgaatataactgctttattaccaagaaatgattttataatctgtaaatattcatttgacaggtttttaccttcaattggcttaaagtaaaagaaaggaatatttgggtttaaactgagaaaaaagttgggtgatttttgtcctaatttacagataaagatttctcttgtagtagttctatcttgtagtagttaccattgtctatcattttgaccaagagaaagatagcacgtataattacgcatcagtagttttccctttgtacatatcttttttggggagagcggggagcacaattcaagtcttaacaaccatgtaagcattttatgtgcattttgatttctgtgagctacattgggaactgtagaaggcatctatagagttcagtagcctcatgactgactgactcatgccctcccactcagtctcttgaccaccctggaaatatatgaacttgaagaaaatgctacaacagctaatgaatcagtgggttcccactcatcttagaataaacaaaagtccccttaacatggccacaaggatctcaacggtcccatctcagccacaatactgggaccttctgtgccagcacatctggctgtattttatttctttacattctcggccttcctacttcctctcaccttatggtgttagcttgtgtcatttgtcctccttcttccttcccatcaactcttagcagacatttactcattctttagacactagtaccagcattgtcttctcatggagtcatcttgggccaccctaaatcaaattctttcttcagaggttcttaagcaaaaattcacctctttgtcttaattatatcacattgcagttttgtgcttggtgtgtgtggctatttggttgacatatacttctcatagacccttaaaatagggaccatgtatgtccaaggccttattagcgccaggctcacagtagacattaaatactttcatgcatttttttaaacaaggaggtacattaaattgttggattctttatttccactctcttgaatgtgagaaataaaaggctcattttcatcttttctttgaaatagggtagttttttctggatataatttcagttaactcatagacctaaatttggtgtttagcaatcttttacacaaatatatgtgggtgataatgtgtcagaatgaagaactttgaaatttctgtgcagaatgtctcagcatcatccttggatgtgatgatggacttgggggcttgttctgtatgatattcttatgtttgccttacaatttttttctgggacttcaaggtggaagtgggataggcattccacattaacttgtgtatgtgttacatgaaaaaagataaattagaataatgaagactcttgatccttaactatctttatagctggccaaatctgtcacaattaattctattgcacaaaataactattatataacagcaattttgaatctcatcttttcttagttgctctcactatagcaaaatgaaaatataataactcactaagtcatttttatcattaaaagggtgggctcagggaacaggcattctgggtttgcatgcaggacttggaacttctaccttctagttggggactgtgttgcagttacataacagctctgtgtcttggagggtttttatgtataaaatgggaatactaatactaccttacaggatcgttttgaggattaacagagtagatccgtgtaaaccccttagaacattgtctggccacaatatacattaaaaatactagctgttattcataataatattattattacaacttggtgagaagatgagaacattttctatttcacagtagtaaaaaaaaaaagaactcttttgtataaatttcatgaagatttgttgagcacctattttatgccagacactgcatgttttgtgaatataaatgaataagacattcatttcaaaatgcagacaaaagtatgtataattttggacagtgtgaatttagtgaaatcttcaagtacctggagttgtatatgtaaaaaaaaaaaaaagaaaatattcatatctaattgttaactacagaaaatattataaaccctgattttatccaaatgagaagacagccactgaatgtagataggacgggcaaataacaggaagctcagaacctaattctctcccaacaaaatgtttaaagctcttattttaagcccatttctggcacctggtgtcatttacccttgaaaggttttgcttttattgcagctggtttactctgcgctgtcttttgatgaatttcattatctcatgttgtctctttaatttcacattggtatatgagcacaaagtagagaactattggaaaacagtgaaaagaactctggtctaaaaatcagccccttcctgactgtggcagcaccctctgacctctttactggtcgagttacttcatccttctggacgttattttacatcttctgtaaaacaaaaaggttgtattaggtgatctaaagtgtcggaaggttatgcttgcctctctgcgcatcactgtgccccttcagtaagataaggagacatgcctgccctgagctgctgctaggatttcatgagtcaccatgtctggaagtgcctgggacatcacaaaccctctctctatcagtgttattattcatggaatgacgctaaacccacttaggagttctcttgggtgattatagaagtttttgtgcaatttggttttcagaaatgacagcacagtaaaagcaatgtgctctagtgcctaggaagctcaccaagattgaatgaagagcaaatgtaattctatcagtgctgaatttttcttaagttctctcccacagtaacagctaaatgccatttctaaggtatttaggaaggcagtgtcatggagttttcagcattcacatgaaagtttagctgacttctggggaaaataagccagcctaagaatggactttgctccatgcaggggagatattgccacttctctactgctccgtgagttcatatttaggggggttacatcgggggctactggagtggaaaggcttttaagtattgcatctgattcagccagcaagttgagtcacaaagtggattacataaaaggaggaggaggagattgtggtgcatgtgtcccagaaaatatttaattcaattcaaaatctcaactctgaagataaatactgccctaatctgcatccctgggaaccatatatatacaacccccaccacatataagaaagtagctctaaagaaaatagtgcaagcctaaatatattggacaagtgggattagttgccactgtatataaaggagcaaatcccatcaggaaacttccagagtaatatccccgttgacagttattattccctatgttgccactgtagtatattctgtttgtttctctgctttctttccctgtgaagtgtatggccttccaaagtatgtgccatttgttttatcattttttttctctctctggttagacccactcttttcataacatcttttaagatacagaaaagagtgatggctttttcaactctgtattctcactcataacactgtatctggcccaaagaatgaatcctcgcatgttgtgtgacccatagtgaagaaaatataggaacaaggatatgtcccttccagttttggcctctccttgtttattttaatcaaggtgatatgatatgtgctatgaaaacaaatacccaatgctacaaggctgactagagacaaccaaacagtaagcttttcttttcaaattaatttattgtagactctgggtcatcaaactacagcctgaagaccaaagccatcttgcagtctgtttttgtaaatgacattttatttgaacacagtcacacttatttattttcatatgagccatggtttctctctccctacagaattgggtagattcaacagagaccatatggcctacaaagtaaaaaatatttactatcaagttctttacaattcatgttcaccaatttctgttgtagactatttagaagtagaaaatgaaataattatcatttctcttagtaatttgttaaatccaaagaaaacatgtttttatgttacagttagccaaaggccttatgttttttcagacttttaatattctctaagcatattcttcacacattatctgttaatgaaaacagtaaactgattaggctcgatttatggtaaatgaaaatcttcccttatagctaaatcgcatccatcactggaccttcataaatatacaactccagttcatggtgacatcataaacttctcctctgtagtttaccctgatgtaaattgtcctccccctggtatttatgacctacagtttcccaataccagagtacagtttatgagacaaatgagtctagtcctccactgtcattcttagattgacaaagtcctatattaaattgggatcaactatatatgatgtgcatttgtgttgcaaaaagatacagcagtctgctggatttatcaggaacgttttgggaaataaacatccatgccctggctaaataaaagatgaaatcagtactagtcaaaaaagtcttaaaatatgactgctctgtttctaaaatgttttcccatcttgcctttgtagggaacactcttaaaatgcattgctctgtgataatgggctcaatttaatgagtaaaatttccttaattttctcttgtattttggatataccataatcctacctaatttcaaattagctacaatggcagatagttaggcattgtgaataaaaatgcccaccttataataaccaaattaatatttgaatacttcattgtatgtagtcatgtactagttaagtataagatgataactgcctttctctttcttcccgatctgtgaaagctatgctcaaatcctctgtctactgagcaatcctcccagacaaacccagtgctgctgcaactgctgttgcattaaatgattgttctacactattaacaccacatcttatacttctcatgagtatgtgacacatcatttaaacctgacttccaccagtgcaaaatgctgatagtatacatcactgcctggtacccgccttgtgtcatttctctgtagacctcagcatgccacctctcagccatatgaaatgattctgatggaaggagatctaaccctctgcttatttcttttgcactccagaggatgtaacagggcagtaataaaagctaatatttattgaccacttgctctgtgccaggtatttgttatctcattttatcttcacaatgaccttataagatagctactgtctttatagtatcattctagttttacagatggtaaacctgaggcacaatcaggctaagctagttgcataaggtcacaaagctagcaagaggtaaagctagaatttggcctctatgggctgacccaaatgtagaactctaaccactgtaccacagtgtagttgtccaggcggtaaatcctttgttgactgggtcacaaatgatgcatatagatggtttttacagtgtaaaatctcatgacttaagttattcaaattttgtgtaaagataatcaaaatataaatttcaaaatacactcagaaataggttcatttgtttatgtaaaatatactaaaaagagcttaggacattaagtgcctccatgaatgggcatttcatcacaattggattgcagtgggtgacaccataaaaaaactaaaatcagtcagggagatgttttagaagatatggtttgtaaaagttcctttgaggcccttagactaggcagtaaatgtactgcccccaaatcctcctcctctccagttggaagataaaattgctattataatcatgggtcacttcaagttcaatggaacttactctctggggaaaaaaatggccaaataaaaagcaagttttctatctattttcaatgataaatgtctggcctacttcaagagccttttgccagggttcaactaatttccatgcagccaggcccaacatgccaataatgatggacagcgtgagacaccaaaggattctgcggattatgacttctgctctgcagacagacagcacttcgtttaagtggctttccagatatctcactgtggatctgatggaaggatttagcttaaagccagaggttgtaaccttttgtctgtgagatgaagcctttgaccagaggtgtagcacagaaactgctaccctgtgtcatccttattatgcagccagctttgcaagactgcactgtctttcatatatttaccttctctcatcaaggcacatgataataaagatattgattctcatgccctgcaactttctttttaactaattcaacatgttttcattgcctatgggaaagagagctaattcaaaggcaggagtccattaattttagaaatttaaggcaaaagaagaactgatggataattttggaaaattgtcctgtcctctgcttactgttaccataataccttcaactcctggtgactggattgagatattattttaggtcaatttagatgggtgggattctctgaggtcacatgatttgaatcaaaccaaaagtcatagaccaaaattggttaagtgccatgcagaaatagagggcatgagtcaaagcttaagggtaccgatgagcagaggcggagtccttgaagccagaatcaatggcctgatgtgtccaaaaccaaagagtggtggactctgcaagttttgaaaagcaggtaagtggtgggatgattcactgtagcattcttctgaaaagcaagtgcctatatgcctttttgaaagtaatgttatttacagccaacaactagagacaacccaactatccctcagtaggagactgtgtaaacaattgtagtgtagccatacaaaggaatactactgaacaggaaaaaggaacacaaaaccgattcatgaattgacatggatgaatctcagagatatacagagctgtagggtccagaaacatgtatctttataatagaatgttttatattccttttagtatatacccagtaatgggcgtatgttcaccacaacgccgttcgcaatagcaaagacatggaatcaacctaaattcccatcagtgatagactgaaaaaagaaaacatggtacatatataccatggaatactgtgcagccataaaaaagaacaagatcatttcatttgcagggacatggatggagctggaggccattgtctttagcaaactaacacaggaacagaaaaccaaatagtgcatgttctcacttataagtggaagctaaatgatgagaacacatggacacacagaagggaacaacacacaatggggacttttggagtgtgaagagtgggagtagggagaaaatcaggaaaaataattaatgggtaccaggctaaatacctgggtgatgcaataatctgtatcacaaacccccattacgtatgtttactatgtaacaaacctgcacatgtacccctgaacctaaaagtttttctaaaaattgttagtcaaaaaataaacatttctaaaaatatataatgtaaataatttttagcaaaaattaaagttcagaaacaaaggaacatcttctgtcttattcctttacttgaaatgcaaaaccaaagtttagcctagcagaaaacacctcagtgcttgtccagggttagtggttggggtaggagatgactgaaatgtatatctcagtatgttgatttttttttaagtgaggctatttccaaaaatttcatttacatggaatagttccaggatatccccaattcatgaaacaaggttgcttatattatggtgaaatgtctttggacaacagtgttatgtgttacagtttgttctagaaaactctttgtagaaaacttggaacattttacagttggtttaataaactctgtttgttcctttgacgtctctctaacattgaggtagggcatgacagcctgtgtgtgaactgagaagtctgcagactggagttggacgttggactttgccattctttagctatgggatgttggacaagctactgaacatcttcaaaccttactttccttatctctaaaatagggttattaataaagccttctgcataattcattgaaaagagtaaattagaatgattataaagccctcagaaccatgtgtgtcctgtaataagctctcaagaaaggctagtcattccatttgtataaactcttctcggaaacccttgtcaacatgccccaaatggatggaatcaacactccatctattacagccttgaccgctgacatcactggtaacctatttgcttctcctgctccactgtgagcttttcaagatgattaactctgagtccttttcatctctctattcctggtacctagcaccacaacttttagtgtacactcaccatcagtgcaggaacttcattcttgaagcttaaatcatcaacatttctttcagtctcacgcttttcttcagaatgagctgcaagagaatccatgtcttgttgtgggacccaggtccaaagcctgtatggacctgaagaattacacaagggcagcaggagttacacagagacgaggtaacatatttttacatctctcctcttcacattagaaacatgaaaaccagagtgaagtccctgaggttactcgggagaatgccttggtaaaccttccatggattttctgcagagtaggatcaagtgaagaatgtttccacacttgagggagacttcacacatgctaaaagtttgatgcataatatttttgggttagaccacaatgcttcttcccatggtgcccgcttgtcatattcataaacatggacttcatttactagcttttgttctctgccaaacctcatctcatgctttttcagtaatgttagctaggttgtctgcacacttgaatatttaggataagaccctcaatcctaatagcctatattataagtgttaacatttctgtctatatagttatatctccttatgcttcttttattaagttaataataattcaattaatgattgtaatgatagatacagaataaaattataaaataataagttaataattttgcttacagcattgcttaacttaagtgtacaatttcacacagaaatttttgatagcatgttcctctcctcacgagtgatattttaactttggatatttatggagaaaaggaaggagttaactgggatacaggatttatgtaaaggtctctctttccctctctttcactgccaaaaggacaaagaaatccctaggcaaatatctggtactacatagaagtatttgtctcaccaagttgttgctgaagggcacttttcatactattaatattatttgagagacgagcagacacaccaaaccaaacataatccaagacaaagaaaatggattgatgtcagattttaacctgactgaaccctctttcgagtatatctaagtgatatctcctctggccaacaacaacattaaatgcaaatatttctctctattccctttcccttttccacaacccacaaatactgttggctgcaagtaggaggagagaagttcggaactgcttctattctttatgtagtgctcaattgagtaaggcagtcttcctgcaccattttaaaacttaatttttggttggggtacaagacctttaacaattcagctccttttaatatacccgtgctactaagtaatgtagcaaaatacattgaaagtgattagccctttaatactgcacaccatctgcttcaagtccctttctttttacagcccacggttggaaaatgtttcacacatccctacacattgccagtcgatggtctgattctccagtttaacttcaaaagggaaaaacaggttcaaatcagtatagaacattgatgacctttgagaaaatgatttccctcagttggagcttagatagagcacagagatgtggcatgtgtttgcagttcaactaacctgtccagttttgtcagtagtggtagacttctatctggcatggtccatctgccaccccatgaggctgtcatagctaagaaggagagatttgaaacacaaaaatcctctgctaacatgatagtatcagcaatcagtcatttgatgtagaacaaagatccagtgatttctttccttggtgctattgtcaactgttacttctaaaatacaaatgcttcataaggagttcacctaaaatggcattgcagtcacttcagaatccatgcctggcctcacatccctatgatttcttagaaacttaacatattaatacattcatggatgtccatgcatctgaatatttcaaatacagggcaattttaaatggtgaaccaataattttcctagcatgtttcttaactgaggggtattttctacagacctagggctgcattctctctaaatatgttctttccagtgagtggcatggttttgtaatttttgaatacaacggaggaatgaaagagataaggaaatgaacacatttttcctggtatactccacagctggttttaaaagaatgtttttcaaaagaggaccactgcaatggaaggaacacagtaacctgaggtgggagatggcaattttgatctcagctcagcctcacctgagccttacttgactttaggcaagtcacttatatgatgtttctcaagataaaagtgtttggaagattcaggatttgaatccttaactgcctcccaagtgaagcaccctgactttcttaaggttttgggacaccactttcttcattatctcttcttccttctattttcacatagcctcaagttgtcttgactataacccaaagatgatactaccttattgttacattgttgtaagaattaaatgagatcttgtctgccaagtacttagcaagtggtgtggctcatagacatgtcttgctacatgaaggtgctcatcattcttcttgctgttattttttatgaggatgcatgccactattacgaagaaaaagtattactactatttttccaaccacaattgccttgtgcactgctgacatcagtatatttcctacataaatatgctggagaatataaatttggctagtttttattatagaatagtccaattgtttttctagttatatattgctgcataaccaggtaccccaaaaacttactgttatgggctgaattgtgtaacccctaaattcatatgttgaagccctaactctagtatctcaggatgtgactatatctggagagagggccttcaaagaggtaactaaaatggagatgttagggttagtccaaatccaatatgattggtatctttataagaagagataaggacacacacacacacggaaaactgcgtgaacctacatggagaagacgacaatctacaagtcaaactgagaggcctcaaaataaaacaaggttttgcctcaaaatgagacggggttttgccatgttgcccaggctggtcttgaactcctgggctcaattgatcctcctgcctctgcctcccaaattgctgggattacagatgtgagtcaccacacatggcctctatggtaacttatttgaatttactttgatattttaaaatctttatttcagctattcatttttttttcctaagtgaaagcaggacagttaaaaattttttcaccgctactttgagtttaggttttgtatgacatcactaatcctttgagcagtggtgcatgatgtctctaaaatgaggaagaggcagggaataacgggagacacaaagtatagccgacaacacatgctctagcatgagacagactctgtctgcacgtttctgaattctgactttgtcacttacaatttgtctgaactttggcaagttatttaaatactcagagctccaagtttttcaactacagagtggggtgactaacacctgtctcaagagggtgttgtgaggattaaataagaaattatttgtaaagttcctagctttgatcttagcctattaattatactccccttagctctttaaggtaatacaacacagatcaaaatatcacagttcgagtttattcaactgtaatgacttcatagaggataatcagttgtccttaaaataacctgtttgatctgtgctcatcgtcttttccaaaaatatttgcatgacaccagactaaacgtcgcactgggatttcacaataacacttcactatagagtaaattttgatgtcagacacattttgtcttttttccaacgtctctcatgtatcaaaacagattggaagtcaggtgttaaagcacatcttcagtgagttccactttttagtccaagaagaatttacaagtttatagtatttttcccttgtagagactactggttttacttattgtaagtcaccattaccagtacaaggaagtgaaatatcctcttaatttctgaatgagaatcagtttgagtgaaggaaagcaaaagcacaaaattatggtgatggagattcaaatgttagactttttttttacttatatacttgaaattttacccccagtgtattaatgaagattttgcatttcattttcactgcatttattttttgattaatgtagtttctatttttctagataagaggcacaaaagaaataaataaaacaagttttcagactgattgctaatttatatgaattcatgtattcaaatttatgatctttgaatcaaatagaagtgctcaatgctgtttttcaaatctctgacattatttacataaaagcctttttgaaatatcaaaagagattatttgtcactgaggaaatttcaatagtaccctgatgcttcctgaagatgttttgaggtatgtgataacagaatgccatttggaacttaaaatttgccagtaaaaaacacttatgaacagaaacacccaaatggatttttcatagctttttagtatttatcaaactgtgatacaatggttaatccaaagatctgtttttataattaagaatagcaacagttgtaacctgtattctcataaagcaatgcatccatttcttataactgctgtaagaaattactgcaaatatggcttaaaacaacacagatttatcctattacagttgtggaagtcaaaagtccaaaatgggccttactgggctaaaatcaaggtgttctcagtgctgcgattcttcttggaggctctagggaacaatccattccttggccctgtccagctgctggaggacatcagcagcccttggctcgtgcctttttctcccatctttgcctccagcttccatcatttaagcattcttctgattactctgggcccacccatgtgatcccagataatgtcctcatctcaggatccttaattttttcacctctgcaaaatccttttggccatgcaacataacctattaacagattcccatgactaagaaatatgggggtctgttattctgcctaccgcagcagccacttagaaatgatttgtgtttgtttccagaatgtcttcttaattactttttaaaatacagaaaaattatgccatcgaatttcagatttatttttcaaaatctgaaacctaactttgtgctaaaaattctccactgcttctcaaaacactaaaggctggcatggattcaacaaaagctacaaaattgtagcttcatgtaaaacaataatacaacaaaatgtagaaaaaaatccaaccatttgctaaacatacaccctttaactacttttttttttagagaaaaggacattttgtgatttttttttttaattaatgagggaggtcatatggtcacacacttatgtaaacagtcactgaactgtttactgttcacattgctatttgccacaggattttctgttagaaagcttaaacattggaaaattctgcctaattctaatttacaaaatactgacagttaatgcactacattttaattctgtttaacattgcctctttctttttaatttttggtgggaggagtgactagcagctcatctctgttatagtcagagaaacgattttccttagactagagaagaggtctgtcctgactttggtattctgctcttgttccatacatatagagcaatggttctcaactggggagattttatatttgacaatatctggaagcctttttatatgttacaacctgaagggtgctattggtatcatttgggtagaggccacagggatgctacaaagcattctgtgcacaagacagcccctatgacaaataatcatctggccccacctgtcaatagtgcacacttgggagaccttgatgcagaccgatctggagcttgagatgaaaaaaatctgtcagtatttcactagcataatgaatacaacgtattattataaaccagagtctatctgaagacttttcagatttcaacccttcatgaaaccagttcctacctcaatcatccctaattctagtaaggcctcactatccatgaagtgttaatacaaaagaacacagaggcatccttgaatcctctttctctcactgtgcacactctgacacgtctgccttcagaatctatccccaatgtgagcattaccatctccactgctccaccttactctcagccaccatcatgtcttgcctggattctgcagtagcctcctatctggtctccctgcagcctttcttacacttggcaatgcattgtctggcagccagattttaaaaagcttttattatagcttcaggggtacatgttcaggttagctatataaggtaaactcatgtcacaggggcttgttatacagattattttatcaccaggtactaagcctagtacccaatagttatttttcctgatcctctccctcctcccatctgctaccctcaagcaggttccatcattgttccttctttgtgttcatgtgttttatcatttagctcccacttataagtgagaacatgcactatttggttttatgttcctcattaatttgctaaagacaacggcctccagctccatccatgttcctgcaaaggacatgaccttgttcttttttatggctgcatagcattccgtggtgtatatgtaccatattttctttatgcaatctgccactgatggatgtttaggttgattccatgtctttgctactgtgaatagtgtagcagtcatgttttaaagttagcatcaggtcatgacactgtatcccagggcttctcattgcaaatagaaagggatccacacttcttaccagggcataccagatcctacctcatggagccctaccgtaactctatattcttaccagtcatgaccgtgtctgtccaactagatagactctgattctgtaggtctcatggacacactaaacttgctcctgacacaagctcttgtccttgttgttattcccacctggaacagttcacatctccttcttcatatctcctagtacctggtgttctcagatcatctcagtggcatcctctgacatgaccttatcctagttacatctcctctaccattttattttctccttaaaatttgccattatctaaaatcatcacatataattttgtgcttatcttaacgtacttcactccctctatcctgacacacacgtctaggagggaagagatttagttctatgttgccactgcatctcttgcataatattagagactataataagttctcaaaagagagagagagaataaatgagttagctgataaattgattcaattaatagtgttgggctttcttccatgctaaggattccagagcgcatcagaataaagcagagttttcaagtttggtgaaggcccctcaagtattcagagatacttgcatatggggcctcaatttccattttgtttcccaagactactctgcaaaactatcctgacctgccatttctcctttttctcttttcaacacctaattctacttctatttacccgcaaaatatggctttgtttaagatgactcttctcggaaggatctcaacagttttcacttcgctgttgcaattaggtttgatgataaccaccacaatctccttaataacttttttaaaagaaacttatcttgtctcagttacaaaagcaatatatcatgtgatcaattcaaatgatccagaggtgtgtaaaattgtaatcaatagtctctaccagcccacctgctttaattaccatccataccatgcacaaaggtaagatgcgtcaggtccctgaggaaagggaatgtgtctttcttgtttgatactgtgtttttgttctgagagaagtgcctggtcttttagtaaatatctgtagcatgaatgagataatatagaaagaaagcatttagcttagtatgtgacacctggcaggtgcccaataaatgattcatatggcatgggagagatattcaagctaatcatctgcctcctgccagtaatgaggccatttggggaacccactagaggaactatcatggagaaagaaacaagcttcagggaacagagggccagttccttccccagacagagattccatggcagtactgaatgggtcttgtgaggaaggctggtgtcaaaattaataacatctttctaacaaggctcaggcatttaattaaaatgaatttaacagcaaagctagtctgcagcattaaggttccagaggcaaaagctgaccagtagttggacccagccagtgataagagtcagcatgcaagtgctgcttacagggaccttagaaatcaaacaaatagcttgtgtcagctggaattagtaagaattatactagacataggtatgatatttgtaagtttctaaaaagcacctatttgcactctttttgtgcattgcttcatataataaatgcttcatataataaatgcttcatataataaatgaagcatttattatattgttaatttctagggaagccatgattttgcacacaaaaaatgactataaacttgatatctgaacttagggaaaaaaaaacctaacttttgtcttgagcaactctaaatcaaataatactcttgcttattttaaataataaagctacagataagagcctactaaataaactaacatttgaaggtaacttctttgtgataagcacacacgtcactgttctatgacctggtttctctgtatgaaagacgtatggtctagattatagagggcacggaatactttttgttgcctaaaaatgagagtttcagaatgagttaatacttatttctcttacctatctaaaaatttctttttaatattcttacattgctgttagaatctgatagttgcccaaaggtaattttaaaacacttctctcactttagtccaacccatttatttcctttcttgtcttaaaagaaaagagattctttcttctagaattatccaggaagaatttttttcttttttctttttaagagatttttaaaagtgaaatctagcaaccattttgctcttacattaaatgcaaaatgacgggctcatttaatattgcacatggttttcacaagttgatcctgggtatgttgcacaggcatgtaagcctccggtactcaggttatacatccccaaacactcaccatacgttcctcttgattggagatcatttccaacaaagtctaaactgttggtatatttggacattgccagaaactctgtagttaaggtgaaggtaacatcatcctatcttcaatatgacaaattgtaggaatgggtatatcttcctgagggaaatataacactttataaatttgattccctaagcagtagaaatatatcagctaagtaaaatggctatggatcgaatatgttattagcactaaaatttaagtataaatttctgactgacacatttaattagaggaagaagaatttattatactactacatatggatacggcctattttacagttaacccttataacatgatctgatgaattcctataactagtgaattgaatcccaaagtaaaagtcatgtacctagaacataggttgttatccatgggtatgttgggaggcattatttataaacccactgcaaatatttttaattacccctttaaaaatttttagacatttaaaaataaacattttaattaaaaaatataacacacaacacaaatgaggaataatgtcacataaatttcaaatgtgttcctctttcccattcctatttcaaaggtgttgtgaattttacacagatattatattgtcttgtagcttcataagttagtgtatgatagacttgtcaatccctaagtctatgttaaggaatccaacccgttagtctgtataaatcaacaaatgcttgctttatcaagtttgtctttaatggttcataacaatcagtatttcaaagataaagatgtattttatgtaatcactaggagttctagctttgttagaagagttgtaaatttagagtttgtgatagtggagataataaacgccctttcttttacttagtcttatgtgataaaatccttttcgttgattacattggtggagacagaatagcatggggtgttgatactcataaatgactatgggagacttgaggaactgtgatagcattaacaaatagaaaagtcagagggtggagctggtgtcagagggaacattgtaaatttggtttgaaaagcagtacattttaaagttatctggtaggcagaagaaaatgtgagagtttatcttcaggacactattgatgctgaaaaaataagttgttatttgtctttttaaaaaagtgttgattgtgagaattttaggttgaatgagtttacagggagagcgatggggagatagaagaaaagaggagcagtactatggtttgaatgtttatgttccctctaaaattaatattgaaacttaaccccaagtacaatagtactaaaaggtggggcatttaggaggtaattaggccatgagggttccaccctcatggatgagattataaaggttgagggaatgaattcagtccctgtaggtcttctgctcttccaccaagtgaggacacagtgttcattccctcttacctttcagactcttttagacggagtctcgcactgtcatccaggctggagtgcagtggcaccatcttggctcactacaacaaccaccatctcctgggtcaagtgattctcctgcctcagcctcccgagtaactgggattacagccatgcatcaccacacctggctaattttgtatttttagtagagatggggtttcaccatgttggccaggctggtctcaaactcctgacctccagtgatccatgcacctcagcctcccaaagtgctaggattaaaggcatgagccaccgctcctggcctacccttcagactcttgtgccatgtgaagacagagccttcaaggcatcatcttggaagcagagactggggccctcaccagacactgaacctgctggtattttgaacttggactacccagcccttagaactgtgagaaataaatttccattgtttataaattaccctgttggcagtattttgttatatcagcacaaatcgaccaagagaggcagggatacagttttgggtaaagatatatttagaagagcaagaattaggaaaagcaaaaacagtgttcaaaggagagaaggaagaaacaagaaagcaactgcagagcagacaagtgataagcgtttctcaaaagtgggagccagaagagtagtcaaaaaagcaagaaacttcccttctcacttcatttcattcatttcatcttccattgctgataccctttcttccagttgatcgcatcggctcctgaggcttctgcattcttcacgtagttctcgagccttggttttcagctccatcagctcctttaagcacttctctgtattggtgattttagttataaattcttctaaaattttttcaaagttttcaacttctttgcctttggtttgaaagctggaggcatcacactacctgacttcaaactatactacaaggctacagtaaccaaaacagcatggtactggtaccaaaacagagatatagatcaatggaacagaacagagccctcagaaataatgccccatatctacaactatctgatctttgacaaacctgagaaaaacaagcaatggggaaaggattccctatttaataaatggtgctgggaaaattggctagccatatgtagaaagctgaaactggatcccttccttacaccttatacaaaaatcaattcaagatggattaaagacttaaacgttagacctaaaaccataaaaaccctagaagaaaacctaggcattaccattcaggacataggcatgggcaaggacttcatgtctaaaacaccaaaagcaatggcaacaaaagccaaaattgacaaatgggatctaaataaactaaagagcttctgcacagcaaaagaaactaccatcagagtgaacaggtaacctacaaaatgggagaaaattttcgcatcctactcatctgaaaaagggctaatatccagaatctacaatgaactcaaacaaatttacaagaaaaaaacaaacaaccccatcaaaaagtgggcgaaggacatgaacagacatttctcaaaagaagacatttatgcagccaaaaaacacatgaaaaaatgctcatcatcactggccatcagagaaatgcaaatcaaaaccacaatgagataccatctcacagcagttagaatggcaatcgttaaaaagtcaggaaacaacaggtgctggagaggatgtggagaaataggaacacctttaccctgttggtgggactgtaaactagttcaaccattgtggaagtcagtgtggcgattcctcagggatctagaactagaaataccatttgacccagccatcccattactgggtatatacccaaaggactataaatcatgctgctataaagacacatgcacacgtatgtttattgcggcattattcacaatagcaaagacttggaaccaactcaaatgtccaataatgatagactggattaagaaaatgtggcacatatacaccatggaatactatgcagccataaaaaatgatgagttcatgtcctttgtggggacatggatgaaattggaaatcatcattctcagcaaactatcgcaagaacaaaaaaccaaacaccgcatattctcactcataggtgggaattgaacatgagatcacatggacacaggaaggggaacatcacgctctggggactgttgtggggttgggggaggaggtagggatagtattgggagatatacccaatgctagatgacgagttaatgggtgcagtgcaccagcatggcacatgtatacatatgtaactaacctgcacaatgtgcacatgtaccctaaaacttaaagtataataataaaataaaataaaaaatcatcgaaccattattgcctcacagtaaggctgactaataagagaaaaggtgtacaaatttatttaaccgtgtgcatggggagaatcacagagtgattacccaatttaaaaaataaataaataaaaataaaaataaaatagcctttgcaactaaaaaaaaaagcaagaaagataagaattatgtgtattcttcaaccataaaaaggaaagaatttcaaaaaggaagaggtcaacagtataaaaatccacggctctctaaccccgtattcttttcaattcttggtataacaagcccagcatccttcctgctattttgctgctctttgcttattagccacgaccttgagaatcctggaacaatcttttggatttaatctaatggtgatgcaatttcgtttcttaccttgatggtggaaatagaatgtgagtagagctggtgtggggtgcactggtgagaagtcctgtctctttttccctttgggttttcatttccccaggttttatttaagtcattgccaggaccctagaaagcaatttaaatgtaattatttatttgcagtgataggtgtttgcaattaatagtggacaaaagaattgtggtgaaaaagacttgcagacgtaatgagtagccttctttccctgcttcttaacatatgctatctaggcacattggtaacaaacacctaaattatattggaagctaattttccacatttaaatggcataatataatttagggccaatgtaggcctaaaaacgttaggcttgacatttttccaagcagccttggtttgttttactggacaatgattacttggagtcaagatctgtactctgggtatattcattgctaatggggtgtcactgctgctaggccctctcagtggacagagctaggaaatgtatgagtgtttagtcacccatgcatatgtaatacttgcaattatctctgtatccatccgtgtttgtataaacatatggttcaatatatatatattaaactaaacatgaattcatactgtctgaagctaatccaatatcctagtgttcattctagcctcaatgccttgcttatttgtaactttgtaacgttctctgacagggagaaacctggcttccatgatctgccatttattctcttatttgttcaaccctaggacacatacaatgtaatttcagaattgttaacttgtgactctgtaaggaaaaaattaaccgaggagagtatgatccttaggtacagttcttttgtctttagccttatagttttcaatcaaaacatggttttcccaagtattttttttccttactttctcctccctccctcctttcttttcttttctcttcttttttttctttctttcttttctttcgcggattttaattttttatttatatttttgtttttgttttatttttgttttttgtttgtttgttttttgacagggtctcactctttcgccaaagctggagtgcagtggcatgatctcaactcactgcagccttgaccttccagactcaagggacctcagcctccagagttgctgggactacaggcacgtgccactacacccagctaatttttgaattttgtgtagagacagggtttctccatgttgcccaggctggtctcaaactcctgggctcaaacgacccacccctcaggctcccaaagtgctgggattaaaggagtgagccaccgtgcctgggcagttttccaaagtttaagtcacctcccaatcccttcagattgtttatatcatacattagtaacactgttagatttgtatgttagactctgttctagtctggaattccttggtatcctggttgatttttttttaatttgtatacattagagatcattttgtgtgatgtaaagttctatgggttttgacaaatgcttagagttatgtaaataccaccccagtttcaaatagaacattttttaaaagatctgtatctgaaatttatataaagagatttagattgtaaaaaatatgaaatagaaatgaaagccctgttctgtcttaaaccaaactcagtgtttggctaaactggcatgtaaaccagttctttctgacacctgcagtgaattaccataaacctcatggaggaggtagccttgaacagactcactgagagtggaactttagtctgtaatttttattttcagtcatctgtcgcaagataggcaaacttctaagaaacgtcccttgtattattacgtcaatcttaccagaggtttttaatttttttccagggccttgaatctctcgtattttctttttttctcctgcttccttaaataaaatccaaattccccagagaattttgtaaaattcccaatcttactgcagcttcctcttctgtctttctggtcctctctgttcaatatgcactgctcagtttccagacctgacaactttttgtctggtagcaaaaataatgcatgatcaatagtaaaattgtagaaagagtggatcaaggaaaccaggcacccagagataaatggctggatgtctagaaggaagcttgctggatcaaagggtatccaagttttcacagcctttacatcaccaaattgccctgcagaatggctctattaatttgcactctgccaacatagttaatgggctgtagtgtaattgtccatataccagcagtgtagaagtattccttttttactgcatccatgccaacatctattttttttatttttgataatggccattcttgataatatttgccataattcagtattgtcaagactaaggtggtatcacactgtagttttaatttgcatttctctaatcattagtgatgttgagcattttttcatatgcttgttggccatttgtgtatcttcttttgagaattgtctattcatgtccttagcccactttttgaggagattctttgtttttttctttaactatttcttaaccattttaatccttcatgtcattttgtccctcttctaattttgacccaactatggttttgccaaatactttttgactgccaggtgactgtggcttagattcattgttttgtaaataatataacttggctctctatgaataactgaatatctaaattcattacgcatcaattatttattaattcaaaatatatttactaagcacagtgtaaaacaaaaacaatccatcttttcaatgttattgatgaacacataaaatatatgtaaacattgataaagcataggctaaacttaaattgttacatataaaatctgtaacaaaagacaccgaagttttttgtcagcttgaagtatttgtccacagctatgtattcgacatatggcacatactcaataaatgtttttcatgtaagaaaaggtgcagctaaattactcatgtagttatgagcatcattcccagtagggatcgttagaaaaatgtttgaaatggaaatgacatctcaactggaccttgacacatgaaatcattctaaggcgaactgtttcctcttttccccatagaattttatttttaatctctatcatggccgttgtcttactatattttagcttatctcttcatatgcctatcgtttctgtagaatatgtagaatgcaagtttatcaattgttgttcatcttattaaatctttgtatccttaccataatgcattccttcaaatcatagatatttgttctagtcatgtttaagtaagctattatggattttttttatctttataaactctcgttcttcacaaaaaaagcattgcaatatttacatcataactttactgaagattttgcattcaaagtagatccattccttgaggatttttagagatttatttatttttgtcccagaaacaaaactataatcttacataatatttttcagtgattgtcttagtaacatgctctcaaaattttcaccctgaaggaagttactgaaatatcatttacaaatatagctggattttggaagatatttattttaaacgtccctccatacatacccatgcatttatggtacttcagtgttcaatgctaaattaacttgaacaacactttccatagggttatctaaagcaaccttcaaaaacggctgcattttgtatgttagacttaaaagaaagatgtgaaacgttacaagagcttatgtgtgtgttatcttttagtgaaaaattctagaatattttgctgctttccataccttatcactcatgcatatattctatgatcttacttcacttgtttggggcttcaaagaatttagaggtgggaaagggaagtgggttaatgaatgcctattctatcaggctaaatgttagatgctgggtgggcattgagagattaaaaagtccttgaagagtatataccctaatgaggaaaatagatagataaacagacaattacactacagcccattaactatgttggcagagtgcaaattaatagagccattctgcagggcaatttggtgatgtaaaggctgtgaaaacttggataccctttgatccagcaagcttccttctagacatccagccatttatctctgggtgcctggtttccttgatccactctttctacaattttactattgatcatgcattatttttgctaccagacaaaaagttgtcaggtctggaaactgagcagtgcatattgaacagagaggaccagaaagacagaagaggaagctgcagtaagattgggaattttacaaaattctctggggaatttggattttatttaaggaagcaggagaaaaaaagaaaatacgagagattcaaggccctggaaaaaaattaaaaaccactggtaagattgacataataatacaagggacgtttcttagaagtttgcctatcttgcgacagatgactgaaaataaaaattacaggctaaagttccactctcagtgagtctgttcaaggctacctcctccatgaggtttatggtaattcactgtaggtgtcagaaagaactggtttacatgccaatttagccaaacactgagtttggtttaagacagaacagggctttcatttctatttcatattttttacaatctaaatctctttatataaatttcagatacagatcttttaacagtaagtaaaatagaggaaaccaaaccaaaacaaaacaaaatgtgacccacataatgtgcttgaagagagatgagatttatgccggtgatgcaggtggttggtatattcagtaaatttgcttttagtcgtgagaaaatgtagagaaggcactgtgttttatttcatttaggagaacatatagaaggctctgcacagttattttaatttgaatgttattgaaatagttctgtgtgcatctcacaaaatgaataaaatattgaatttaagtataaaaattatggctatgccaaagttttggggttttaaattggcaaaagtattcacaactgtcattatcaacacattttattatgaaagtttctctggattttagaatatggtcttgttttggactttaaaatgtgtggttggaataattggaagactagaatggcaagattacattgttgaaaaggcccaaaaaatccaagctaggatactaggaacttagaaagagctttaaaaatcagtggtggtatgtgtaggattgccacaatttggttattcttggagaaaagatgctgagtggctgtccccagtgcagattctaatggctgtttcccactgtgttaagtcttgcagcataaaagccatttggaggtatcaggcttaaggtaaaaaacgaaaaaaaaaattattctgatcttgaaaattttggctatattgaagctttatgtagtctctgtccttttacctcttgttctgaatgatggctagcaaaacaagggtaaggtacactacccattcatattgaaactgacctgtccttcattgcataatgtctatgtgactttcggcctcttttaacattgatggacaggcatacaatgacgtttgtagatagtttgatgtccatacattgccattttgagcatctgtcattttttttttgtttttttttttttcatatttttaatcccaaaacgatattgctaataaagtttggaatagtgtacgtttgattctcaaacttcaattttagtcagtccattctgttaactgagaagaagaaattctatgattgattttaattttttttgttttgttttatgtggaatacatgcgtctaactggacctactatgtaaatatacacatggtacatgcattattcactttttttgtttaactcaatgataataagaatgtatgtttccaaagtggaagagtccaaatgtttagacactggattatctgtttagaattcagaaaccacagaaaatagattctaaacatatgcagtcatattttaaaatatgatgaacacaacaaagatacatgcataatctgaaatttatttagtttcaaaaagtcatttgagtcattaaatgtaataatatttttatttttaacatagcaataaaatgagaagaggagactaccaaagtaaaagggaacaataatgactgaaatttagcttgaataaatatagtcaagagtgatctcaaacatgacaattgattgtcatgtagctttggaacttaagtatatatctaaaaagtaattttaatacttattaatcaaattgttatttaattaataggaaattagaaaatcgaagactgaaagttactgaacacagagataacacccactagaattattcatgactgaatttgagatgattctgtcttacgtgttatatggtatttgcattggaacgtctcactaatactaatacctcttatcagtgcagatagctgcattgaccttagaagtaaagagataatttgggggaaattatagtaacacttcagtgatccctctaaatacatctttcactgtaacaaaagagcctctgtggggaattagtgacttcgtgccatgatttctgaatcgtgatacaaccttattgaatttatgaaggatgaggtcagaaagccagacatcacttctaggcttaataatcagtttggatttctcattgtgtagaagtaaacaaaaatgtagttgattccagaggtagcaaaattttatatctacaactaaaaatataatggacccataaatgaacataattagatctgaccaccaaatggcatcaggacattctgactacgggttgtggcttatggccagcagtccatctggggaccagtccatctggggtccactccatagcataagtcacatgacctgtgtaaagcagctgacagaaaaacaaaaccaagaatgccttgaaacatcttatattttatgaatgaatactaggaagtcctttttgtttttctgttctttggttttaggtatttcaaaatctgttaaacaggtgaggctgactagggaagccaacaaatatagcttgtgattttggacagttgtgtttccaagttgagggcacttttttgatcaacttccaatcatttataaagcaaaagatagtatccaattagcgcaaatttatgaagtttgttttatgttacatggggatatcataaagaagcatgtttttcattactgctgaatacagcctgtaagatatgcatagcctgatggtcatcgttcattcctacagatatgatgcctcttggcatatctcttaggtgaaagagtttcccttctggtaatgtcctagggaaaaaggtcacttgtgtccaggagattaaaaccaatattaacttctacaatatgtagaggacaggttagtcttggaaaacactttttaattatctgatcatgtggctagaatatgtaggctgataattagactaccttgctatctgaacaccagaaatctcccctgagcccaggctgagatacagtactttcttctcttagatgcttttggttataagttttttcctgaagttgacaggaacatgaaaactacacaacatttaatttttccttgaagaagtgcttatattttcagaacacatagtccctaattagagtaaattactcctgatggaataagcattctgcaaaagcaggaaagaaaccaaatttaatttcccagtgccatagggaggtcttgactattcaaaaactgtctctaaatcttaggaactatgctttcaagggctaaactaatagaactgagcaggaaataagcctgattagcattttgtaagtaattttgagcacaaaagatatatttacaataatagccaagacttatcatctgcaattgaacccaaacactagcaaaaagaaaaaagtaaactgaaaccattaaaatgacatcaaataaattatgatattcattttcttgtatacttcttatcactttttaattttaaaatatatggttgatatgtctagatcctaataaggggaatgggttagcattgatgtgggtggcttatgaaacatttatatactcactgctcacttgttcttaattcataatgcagctttctcaaggccctcactttaatacagcctgtcagttgctgctatctataatcaggaggcctggaggtatatatagtttttttccccaaacgattttaatgtataacctctggcttataacgcattattttgcatccttccacttggcaaagtgtgttagaagtgattctgaatgtggttggaaacacgtttatagtactcagcaaatgcaatctaataaccatattattcaccagttttggaaaggaaacaagtattttatggagctatggttatcatcaaaggaagaaaaaaccctttttaatagaattttaatatgggttttcccccatttatagcatgtactaggtatcactaagattacactgttacaggtgtctgtggtactttgtaatgaagctgaatttgtcaaagagaataagactttcattttccattgagcacctgttttcatcttgaattttcagaagcagtcagcgaaaagtcaaaggtttctttttattctggccccatggggaaagatttgccatttgatcagcacagtctgcttttctgtctctacttggagtttgctatggccatatggagtcactcctctgaacactgatctctgcctcttgcttttatctaagggtgatatgcaaaggtgtatttctaccaacaaaccacacatttcactgttttgaaggaaccagtaatgcagtgacattcataaagatacataccattctatagaatcattaaatcaaaaaaaaattctacgcaggaaaaaaaaatagatggcttttgcagagaaaccaaagcatgcagaaatcaagatggttacagtaaaaccagttatcacttcagtgcccaaagtgttttcacatatgctagctgtctgtctgacagaattaggaatctgaagattccagaggctgtgtcccaaatatttgctgtggttcctgatggtttctatgccaacagtagattattgtattgcgctggaactaatctctttcttctccaaaccactaggatgctttacacatcttctttgtggtacttaacactgtaggtttaccttaggtaatttcttgtagccatgcacaggttccttatcttaatagtctatcacagaggaaataagacagagtagctctcttgagggacttctgcatgcctttatataccttcaattacttgtttactgtaatcaataagtatttgtcgatggatgggtgactgggtttatggattcagttttgagtcaaaaacatatgcataggttgttacatcgagtgccttttgttgttatcgaaaggggcaccatcatgggatagtttttagatgaaaatttggaatgggggttaggacattttactttgctctttaagttcatctgtgtgtatgatttctatgcatgatatacatcagtaatttgtaccagactgcttgaatagcaagcatattacaaatgtgaatgtagttttctgttataaattttacttaatttttttttttttttttgcttagaaagttatatttttctgggagaaaaacttctcattcctttcctctgctacataattccccatgccttctagatttttttccagtgctaataatggagactcaatttcttgagtgctaagatatatttgccatagtttattatataaccagaaaaaataaaataatgtagaaagcttaaattattaatggggcatttgttttctgttaatcaaatttatctcatttaaccctgtaacactagcgagacatgtcaaaagatataaagaggagaaacaactaaaatatgaacctatcagtggaaatacaaaggtataatttttaaaaagctttaaaacataaaaatgatattaacaactttttaaaaaaatgcatgcccaagtggctatttgacaagtatactacactttcagtctaccctattactttaatgttcacagtgtatactgctatgtttattttatttttcaaagtatacctaaaaaagacatcagaaaaaagcaaattatgctgatgttattatgtttagtagtgttttatgctgtgagtcaactgccagcaaagatttttctcattttatttcaaacgtaggtgaggttgctttgtttggctttcattctgtgtatctctattaacatctgaacctcaggagaaattacctttaaattggctgttagaccttggccatgcaatatgctgactctccttcttcatagcccttcatccatcagagaaagatttgctcaatcaagtcccctctgcagaaacacagctctggtcaccagctgtttgaggcaatacattgaaacagttgaaagactctaagaatttggtctttatacaatttatttaaaatcaattgcttcttgaaaacatatacactttgttcattaaccatttatatacacacacactatgtacacacacacattctatacacactatatatacacatttacaatgtgtatagtgtatgtgtgcatacagtgtgtgtgtgtatgtatacatacacatgtatatataaatggtcaatgaacaaagtgtgtatgttttcaagtatagagatggcttagtatatctgtcatacacatactatatgtgtgtgtgtgtatatgtagtgtgtatgtgtatatatagtgtgtgtgtatattgtgtgtatagtgtgtgtatgggtgtatgtatagagtgtgagtatatagtgtatgcatgtgtgtatatatataaaaattgtcaattaacaaagtgtattgtatatgtttttaagaagtatagagatggcttagtatatctgtcatatacacgtgcacacacactatacatacacactatatatacacatgtacacactacacatacacacatatatggtgtgtatgtatagtgtatgtgtatgtatatgcacatatatagtgtgtgtatgtatattgtgtgtgtgggacagatatactaagccatccctataatttgaagaagcatatctgtaagtcacactcatatttggtctagagtgaacatggatatgggaagccccaacgaaagcattccaaaaatatttacagtgaaagttcctacctaacgggtagcaaagaaaatgacagcgctttgaaaatcagactgctatgttcttacatacccttttatgacttttctaaatactattcagtgagctcatatggatttaataatcaggaaagaagtagatattttgtcaatatggatctgaaatgggacactgcccacatgtgatctctgtgattctgtaaatgcttgtttgactattttaaatttattttgccacttagttatacaaattattaattagcagtaaaacacacaaaaagacacccataattgcaatcaatatttttttgcataacataacatactcttttatatatacataaccattatgtaatcacatgacataggtatagatatagatgccaagagacacacagataaatacaaaagaattcactcttctgtaatctgctttcttcactcaacaacatatcattaacctctttccatttctataaatcagaatctagaatgaatgatggctctgaaaatctgcagtgtttcactaaggagatgtgttcttcataagccactcagcctccccagcactctcataatcatgtgcaaacatgtgtgaacatatttatgattgtttagggaaaatttctaaatataaatttggaaatgcaaagtataaatatcaaaaatatgtgctgttaaaaagcatttaatgcatattgtcgtgttgtccttcagcaacaggtaagaaatacccaaatttttgccagtaataaccattaaatttttttttttttttttgagatggagtttttctctcatcgcccaggctggagtgcaatggcacaatctctgctcactgcaacctccacctcccaggctcaagcaattctcctgcctcagccttccgaatagctgggatcacaggtgcctgccaccacgcgtggctaatttttgtattttagtagagacagtgtttcaccatgttggccaggctgccctcaaactcctgacctcaggtgatccgcctcggcctcccaaggtgataggatttataggcatgatccaccgctcccggccattaaaatcttttgatttttgacagtttatcaaaaaagtagcctgatttaatttactttttaaaaaatcaccagcgatgcagaaatatctaaaacaatctattaatgcctctttcagttgtaatagaaaattaaaggaatacaggcctgggattacagacatgagccacgtgccagccaacaaggatgttatttaaccctcttgtgttcaagttgtccaatcagcattaaattcacctaatattactgttattcagctaatgtttcttccactcacccacaaggatttcctgatacacattatcaaatgccatgttgaagtcagtttcaggtggaaaaaggattcaacacaaaaatcagaagatctgagctttcctctctcttccactgtcactggctgtttaatttccctattgagattcggttgtcatctctaaaatatcagacttctcttaattaatttttttcatctttcaattttagcagtagaacacttcaatctattttccaaagcccgtgataacactcttccacaaaaaacagttttcaataaccattatccaaggcctctcaccttttcctcaattaagaacaccggtccacatgcagctcatgtaaatatcagatgctttagacaggaagacaaactccatgatggcacttacttggtgccctagacagaaagggaagtgcaacacataccctgtggtcactatgatgatactacctctttagtaataaattgattaattttttttgtttcttctggaaaactaaattattgctgcatatgtttttccccagatttctggatttggggtgccctttaggaattcctgcctggtcttaactctaacatgctgcttagtcccaggacataaatttcaattctgtgaatattacaatctgtagttacttcagcctgtgaaataattttaaaagagaagttctacacttgtttttactattggctttgtcatgggattaaggtgtatatggccttccaaggtgatggtttatacagggcatttattttgctgaattattaacctattattttgtaagctatttatagttgaagttcatacatctcattatgttcatcagactacttattttccacatatgcattgcaaaccaaaaaaaaataagcatgtaagaaaaataaatgtatgctatgtatttatggatagctgagtgacacaatttcaatcacaattggagtaacattgttccatgctttatttaatatttactcatagctccaagtttgtttggccattgactcttattcagagaagattgtcggttgtggtttcccccagcctgagcaccttaactaacagatttgtagctgttaatcaaattcattgcagtttcataggttgggaaaggaaaatggccatcaaaggtcaccaatttatattaatgcaataggatttgggaatacacataaaaattcaaattgagcctctgtgttttttttaacaactagtatgtaaaatgatgtgttatcttggttttccatttgaactcccacttttgatttatgataatattattctgaaatacgtatttctcaaccattttttagtaacattttaaagttactgaatgcatatagagtggtttataactttcttaatgttgagagaaagccactttctcttttaagacgtatcctcccacaccaacgtcttacagcaaatatatatattttcacctctaagtccatatatgtctatatatatattttcacctctaagtccatatatgtctatatatatattttcacctctaagtccatatatgtctatatatattttttcacctctaagtccatatatatgtgtgtgtgtgtgtatgtatgtgtgtgtgtgtatatatatatatatatatatatatatatatatatatatatatgtaactgttcacacaagaatttatagtatgaaccctgcatgaatttgagtctgtgctgggcaatcatctgtcaggatttatgaggtaaataagttacagaaatagaggcacattacaaacataatgattcctctaggagtcacttcattctggctatcaatgtggttagactaaataactctttaaattaaatggaagccttgcttgggaattgattcaagtaaaaagaagcaacagaaaattcatttttagtatttttcttcctttggtatttcttcacaccccatctcaccatcatctattttaaggcaagtgcatttatgtaaacctcaatattttccagtgttgtttatatcagacaatatcttgtttttgttattttaatgaaactgcattatgaatcagaacatgacatgccacttaatgttatggaaaagtaacctgctattactgttctgcaagaaataattctctgttacaacataaccacccacaggtatgatctgatggatggattcaggtttgatttttgtgcccaaacttttaaaatcttaccagaatctttaagagatacagagtagaatgatggttaccagagggtgggaagagcagtggagatgggggaatacagcggggttggtttaagggtacaaaagtccagttagatagaacagaatgaacacaatctagtgtttggtagcttaatagggtgactataattaacaataacttagtgtatatttaaaaataactacaggcatagaattggaacattcctaacacaaagaaatgataaatgcttgaggtgatagctaccctaattgccctgatgtgatcattacacattgtatgcttgtatcaaaacatcacatgtaccccgataaatacgtacagctattatgtggccataaaaattaactatgatatgctttaagacagctttcagggaaggaaatatttcccattaaacttatgaaacacattttcccctcaatagacatggataaatattctacagtagaaaaaaaatgtttaagccgtacagacgttttttcacctctaagtccttatagaaataatccccatataagtagagttttaagtaaaacataagacaccacatttttaacctccaaaattcttttagattcagaccatttctggctagtttgtaaaatcagatgactcgtataaacttcagcaagcaagaagggaaaaatgatagtctctcaaactttcaaaaaattgttttttgtccagaaatggataaaagatgtgtagcagaaaatgtagtttaatacgtaaatgttatatttcagaagcaggataacgattacctatacacaaaattatcatttaagttgaattttaaataaggcagacagactaatgtattaatattttctcttttaaacttttgagttgattttgaaagaaacaaaatatatgtttcctgttagcctcttactctcgcatcaggttcatttcatgtgactatcacctggcttagccatctttttaaatcaacagaaaaactgagaattttccgtgaatcctggaaacaccaagagaaacaaaataaaaatagagagatgtaaaacacctgtgggcgtctgcatctaccttgaacttttatttatagctcataatcaactattgagacctcagagtgaggctggatagaatgtgggtttaaacctcattattctttttttttttttttaacattttcttattgtaaaggattattttctcaagtattagctatgtgtgtgtgtattttcagccaaattatgtttttttattttaaaaaaagcatacataggagcttaaaaaataaagtggacctcatgaagtcagagagattggtggttaccagaggccgtgaaatgtggcagggaggagagtgatgaagaaaggttgattaatggatacaaataaacagttaaatagaagaaggaagacctggtacccaatagatcagtaaggtggctatagttagtattcactgactatacatttcaaaatagttaggagagaataattcaaatgtgtgtgtcaaattttttttaatcagaaagagaagataagcgtctaaggtgttggagagtccagttaccctgatttgattatgtgaatgtatcaaattatcacatgtaccacaaaatgtgtgtaccaataataaagaaaaatcaaatgaaacaattcaacatctttaaaaagcacacaaaaatttaaaatgtaactacagcatataccaattaataaatgacttaaaaaactagcctcttcagattcaccatataattttacatatatctttcacttaaatattgaaagcatacatccatgtgccccagatatatgacataccttcttaaatggtggcacattcagcataggccccttcaacattgaaaacaatctgctatgagacactagtcttctgtcccccccatctgttaaaaatcacccaccaggagtgaatgacttaactgtcagatgactatatgtggtacataagtgatatcctcaaaaagtgcctaataggctaccttgtaaaaaattcactcattctctttttaatgtatttattagttcacatatttcactacactttcccaattccctatatctatcctcgctttgctttcagtcatatcatctaaaactttagtatatttttcacaaaaatgtgaggaatacaagaagcataaacagcaagatggcagctgggggaggtttttctaccatcagaaaatattgtttattaatttactgtaatttaaaacatacagttgagccatcagactgtctttcttgacctctacaattgaagcaattatgtgaatatttggagattagtgactggcttattggatcatatggtcatattaatggtcctaataacgatccaagtttgagttcagagtgtccatttattcattcggccatcactggccttattggtcaccgtattgacaccataatggtgcaataaatacggcattgaggaaagaaacacagttcctgcctctgtgggctcacattctagaataaatagacataagcaaataatgatgaatgtaatcattttcagacaggaaaatgccatgccatagggaagtatataagagtcaggaagccacagttgccttggtgatgtttacttgaaggccacatggatgaaactgtgcatgaagcctattgttgtttaaagcatgaaatggaatctagtcctgtacctaagcagattaatcagcggactgtaacatttgatttaggagactctgaagccagcagcatatcaaaccaatttccaaagcttatataatttttccaagtaaccatattgtgtttgtttttttgttgttaaggcagttaaatctcttgtctaaatattatcagagggacattttcctcagctaaaaaccaatgaaattgaataagttgtgaagaaatatggccaagttttatgtaagaaagagtgggattaggcaggacagatgtcacagagcacagcttaggaagggcaagcccaggtgagccccaggaagagcaaagcaagcattgcttggagtgaaagaagtttctgcagtgaacactacactttaacatttctggacacagcagatttgggatatataaaaatattatatataaatatatatatatatatatatatatatacacacacatatatatacatacatcccagatatatagctttgcttttaatctccaatacccatcttctagtttatcaacaccagtgtttcccagacgtaaaaatgtgctttaatgacttatgtgctttcatgacttctgggcaaccactcagatttattccttcactgtcagttattcggccatttaatcattctttctttcattcaacacataatcttgaccattaaatattcactgtgtttagtgctgtgcaaaaagcacttcataggatccctaacgtggagcttgcctactggtagacaaataagatatgtttgacaagggagttaagtaattgtataggtcagttaaaaaagattaactcagatttagtggctaagatcagcgtaagttggagtggtcaaaaacaaaagtggaaccagagtgaaacttaagcagagtcttgaaggatgggtaagaagacatagttggatgaaggaaaaaaaaaaaaagaggaaattccatggggggagagacatttgcagtgaaacttgagtctggtatagccaggaagcagggacatcagcaatatggtatatattacctggaatatgttagatgtttaatgaaagaatgaatcaatgcatatacatacacaggaactggaaggaaatttggaaagggaaatggttggcagtacaattttaatgaagaagcactcgtaaacgacatgattgacagagagctataccataataaaaaggcctgaagaggttatttcgcatttgatccaaaacaaccagttttcatctgccatcaattttacttgtgtctgtcaaggcctttgaggaaattgaaaaatcatgttatttatctagtgaatataaatattaggacaacatgttttaattaaggaatgttgatcaggcaattgtgctttaaaaacatgtttccgattatatggaagttacaggttaatcaagtagtttggaaaataatacattagataattatgcaggttaaatcatattgtcaagtctctcccagccacactaatgcatcacttttacttctgaaaataatttgtggactcaaacaaaatttctcagtttcatccttcaactatgagtgtgagatagctgatgaaattcgtgtcctaaatctctcttcattttgccggactatctgtatgatttaagcacttgcttgttttttttaagtgacttaagaatcttcagcattcaaataaaaattattaatccattaactctcagacctaaagagaatgaatggcttcatgaatcataattcagtcttctagtttggggcacataaaaaaagccaaacattcagttggcctcttccatatctagctgatttgctttagtgattcatttttcattttcctcacaattagactcaaatttctgggctgactttctaattttgagtctctaaagttgtaaattctgtagccatagaacaaaaatgacatagaaacacaaggtaacacaattgtatctttgaatgaaaacatacatatgttgtcttgaccccgttaccattttacaactcttacataaagaaatcaccagatgtttaaaaaatagaacgctgatgaatcttttgttcttccctaacctttatgtttttctgctgcagttttatctcagtaagagttatgctcatagcttacttattcaaaagtattatgcttattttcctcacaaagattttgttaacagaaggtttctttacatagtatttggaaaaatttggatactctatgaagaagaatgcagtagaggtatgagtacagaaaataatcatgagcaaataaagatgatgtgtgaaaaaataaataaaaaattttaaaaattcactgtaagctggattgcagttagcaaagcatcagagaagaatttctgtggagaaattgtaaatattattttaagggaagaaagttccgtatgacacagttgttttctgttagatgaggcccagctgttctatccagttcttggtcacagctaatggaaaaaactcattctgatcattttctaaaattcctactctaaatatgtactcacgaaagtaaagaaatatactttcctgaaatagaggtctgtgcagactttttatattcatatttgcagttttaaaaacgatgatcaattgactaaatgtccagcaaagacttagacatggttgataaggatctcaatatatatactgatttctctgcttagaagttcatctttcaaattatgcaaaatatatactctactgcagaaaaactaatactagtattgtttctttgtaaaatatggcaagcaaaataaataaaaatccatgtatttctaaatatttcttcatctggatatttacaagtatttgtattatacttttattcttatggccacacctcactacttttttttgtgtgtgaaccgaagtgactttcataatgttatgaaaagttattaaggggcagaaactagaacaaaaaccttgaaaagactcccgtttaaaaaatatttttcagtatttttaatactgattttgttctgaaaccaattgtttgaaaattctgaatcaactggatgaaaactgggtagagtacagatccctttaacagatcaaacaagacataactctttaaaaagattttaaaggctgggcacggtggttcacgcctgtaatcccagcactttggaaggcagaggtaggtggatcatgaggtcagcaatttgagaccagcctgaccaacatggtgaaaacccatctctactaaaaatacaaaaagtagccgggcgtggtagtgcgtgcctttaatcccagctactcaggaggctgaggcaggaaaatcacttgaaccctggaagtggaggttgcagtgagctgagatcacgccactgcactccatcctgggccacagagtgagattccattaaaaaaaaaaaaaaaaaaaacttttaaagtgttttcattgacacataataattatacatatgtatgaagtacagtgtgttttgatacatttatattttgtgtaaaaatcaaatcagggcaatttagcatatctataaattatacatttataatttccttgtgatgagaacattcaaaattctctcttttagctattttaaaatgtacaattacagtattgttttccatagtcatcctactgtgtgacagaacactggaacttatccctccagcctaactgtaactttgcacccattgaccagtctctccccattccccttcccctctcccctcctcagcctctgttctactctacttcatgagaacagcttccttagattccacatatgagtgagatcatgtgacatttgtctttctgtgcctactttatttcatttaccataatgtcctctaagttcatccacctttctgtagataacaggatttcattcatttttaatggctgaatggtatctcattgtgtatatataccatatcttctttactcattcatccattggtggacagacacttcggttgattccttatcttgactattgtgaatagtgtcacaataaacatggaggtacaggtatctctcacacttattgcccttcctttagatctatagccagtagtgagattgctggatcatacggtaattctgtttttaattttttgaggaaacgtcatcctgttttctataatggctgtactaatttatattcccgctaacagtttccctttctccacatctccaccagcacttgttaattttgtctttttgagaatagtcaatctaacaggtgtttcattgtggttttcatttgcattttgctgatgattagtgatgttccgcattttttcataaaactgttacacatttgtgtgtcttcttttgagaaatatctttctgggtctttgctgatttttaaattggattattggaggttttttgctattgagttgataacgcagacataaatccatgcacttatagcctactggtttcaacaaaagtgccaagaacatacaatggagaaaggacagtgtattcaataaattgtgctgcaaaaactggatattcacacaggtagaccccatctctcaccatatacaaaaatcaacgcataatggattaaagacttaaatataagacgtgaaacaataaaactaccagaagaaaacacaggggaaatgctacatgacattggtctgggcaaggtttttttggatacagaccccaaaagcacaggcaacaaaagcaaaaggagataaatggagttacatacatcaaagtaagatgtagccctttgactgttctttttcaacggcctgaacaggttccattttcttttcacttcctgcagtaacttcatggtttagaccaatattgttacttttacttgatctttataaccagtaatttttctccttcagtttttccaaaactttatttcctcatattcttaccttgctgcagaactttcaaagatatccatccaacttcttgcagtggggtcaagtgcaaattatttctacttttcttaatgctcttacatttaaaaatgtgttttgcattttttttccatatctttgctcagactatatattgtagcataaactttaagagcatgaaagatctgtgtttaaattcctattcttccacaggacaaatgacttaatggagcctgtgctgcttatctgtaaaattggagattatcaatacaaacaatatgttgtggggattcatggagatgatgcatataaagtccttaggacagaggttgggacctaagaagtttttctcaagtagtagcttctgtatgccgtctagtctccccaccccgccccaactgtttttaaaatcctactcatctttcagaacaagttcatttcccacattctctgtgaccctttatgtgatcagttattagtgccactcatttggcttgtatgttgtctttccctgtgtgtagtatcatccccccagcgaaatcacaaagaagaacatgtcctgtcctttaacactgtgtcttgcacattttgtgttgattaatagattaaagtgatacctgtcataacagtttttcagggttgtccaagcagagaatatggatgacaacaggctgcccaaacagctgttacaggatgaggttaagtgcagtgaccacaggaggtttatacaaactacctcagaaaatggagcacagccacagaatcctgggctgtcaccacgtctggcagattacagtgctgtgcagtaagcagaaatgggacatctcattttaaacaaatactttgggtagattatgaggttcaagagtagaactgtagacaaaaacaagccttacaaatcgcaactgcagctgcaaaggaaaagatgcatctttatgagaacctattgtaggaagacatgcaggttacaaatccatctttagcgacatttacacccccaagagctctagcattagtaatgttatcatccactaggattataatatagtgtgcaatgatagcctgttatgatctgtcagaagtggaaaaacttaacttttatttttagagcagtccagtaaaaatgttaacactctctgggaccaccagcctgagcaatatagaaaaacccgtctctagaaaaaataaaaaaattaacccagcatgttgatgcatgcctattgtcccagctactagggaggctgaactggaaggatcacaagccagggaggttgaggctgcactgagccatgagcatgccactgcactccagcctgggtgacagagtgaggctgtgtctcaaaaacaaaattaaatataaatgtgatctctactttttttaaaatttattattgttatactttaagttttagggtacgtgtgcacaatgtgcaggttacttacatatgtatacatgtgccatgctggtgtgctgcacccactaactcgtcatctagcattaggtatatctcccaatgctatcccttccccctccccccaccccacaacagtccccagagtgtgatgttccccttcctgtgtccatgtgttctcattgttcaattcccacctaagagtgagaatatgtggtgtttggttttttgttcttgcaaatttatgttagcttttctaagcattctctcttttttttttttttttgaaagggggtgctttccagattgagggaaactttctttgtattttccctcatgttcattttagaataagtagggatgattatttatttagaaactgcattgtatggtgggaaaaaagcaccttaatgctgaaattcagagggaattggattcaaatcatagctttgtctcttactctatattcttggataagtagtttaaccttagtaaaccgctctgtgaatcctcacaggaaggtttcagtgctacacaaaaaatgctcagaattatgcctaacctatatgaggcactcaagaaaggtagctattattatatttgactaataagaagttagttaattttgcagccagtcatattgtttaaaaggctggcacaagttacaatttcctgtaattgtcttagaaaccacacctttctaaataggaatgggtatgctctcaggtcaaatgccttatttgttcaacttgcatctatctgattctgcataaagtatttggctgatcagaacagtcaggaggatagaagctaatttaatcaataaatatgttttggaattttgttttacaacaccagagtctggcaaaagcaaataaattgctttctctctttgggattaggtgagaataatccaatttgaaggatcaggttttaattacctaatgaatgaatcctgctaggagttctgaatttcatgtttggtcaagattgacaatgatgaaataagcagaaaaacccaggcaaagagaaaaatagtgaaagcctgagataaagtatgaagaaggtatgtgaacaatatcacccatgaatggtggtgctacaagtcatggtttatttctctgaaaggttatctgaaaattaaaaatcaatgaatcttagaataaatactgactttgagtatctgtaacatgttgcattagaaatcttaggttggaggcaacagaaaccaaatttgttcacttcaacaggcaaagggggaatgtattataaggatgcagggggtgtctcagaacctcagtgcaagagtgcagtctggctcctggacccacaaaaagtttgtctttctctctcattctctctctctctgtaggtcaacttcatccttttacccttggttttggcaaatcatcttcatcaattactcagttcacctactaaaaatggccatagctctagattttgcatcttctcttaccaagagaccagccctcactgtaattgaaaccttccagtcccaattccaaactctcagagaaggaaccccaaaaggttcactgcatatactgaacagcttattatagttgggaatcaaatgataatgctgaaataaatgctcatgacagtgtcttacaaagagtcattcattttcaagcatgttacccaatggtccaaaatccaatgctcattgagataccactaagattatcattatacatgacacaaaactttccattgataataccattttgtattgaatattgtgttatcagatacttaaggcaactgagtcaccatcttgatgtctttatatagaaaagcattcaaatgaaattcagaggtaagaaatacaaaatgtagagggagaggaggtgtattcaaatgacgtttatatccccagcaccaactgtcatttccctttaggtatctttgctcctctgcagagcattctcagcttaatagctctaagatactcagctgtgaacacaaagggggataaaactctgaatgaaaaagatgaaggattctttggtagctcttacaaactgaaagaactgagtctaacaaggaatttgttttgttaactagtagatacatatatattctctccactccccttttagtcactagttaatgttttttgaatgcctgtcaaaaatttacattcaaagatgtaaacatgtggagataagaactagagttaacttttcaaattgtgtcacagtgatctgatgagactagagataggagaaacttagtaaaaagaaataattcattttgtaagaaaataaaaatctacaagtttcttgtgggaaatttatgtttgaaatgataaataagatctacaatccttcaattattgaaaataaatacctccaaaaagaaatgtgtctgcagacctgctataatccttttcttatgtatatcccttaataataaaatttaacaaccaaaaatccacttattattctaataatccactgacttagcaatcttgatgacataatgtggtgcaaaaataaaattttctcttccattttcaatgggatacattatagttttattcaaattgttgtcttgttctagttttccacctaacattaaagacacttgacctgtacttcttgttattttatttttaaataattgataaacgatctgtattccttaatcacttatttttaaagtacagttttgtgaccgattgtttttaataactgtctgcagacagatctatggttggaatcttcctttatcaaataatacttggatactactaaaatttttaaactcttattaacatttataggtgaagaagtggacagagattaataattagtttaaggatacccagccagacagaggtgcgaccagaccaagtcagatctctgaagctgtgactctatttagtagttttatcagactaataaaacgagttaaatttacttgccttcgataatcagcatcaaaattaagaaacaatttgctgtttaatcatattagttatacagtttttgtcttagtaattgtcactacctatattgtatatgtatttattaactttgtctcctttccattagaataaaatttatgcaaaggcaagcacctgagtgtcctctttacctgtctattggtatgacaggaattccttcttaaatgtaagtttatgggaattatgatgtctttactgccttacagaaaaaacaaaaatatattaaaatctttgatgggagacaggaagtggctatagagaatgaaaaatataaattaaaaaaggagagagagagagtgaatcttatgacccaagattttctccataaaaattagccagttgaaagttttatcacagcagtttgtagccacatagatttctgcctaaaggtaaaggcagattaaccaagtgtgagcaacagttcaaccaataactcagattaaaagagaaaggaataaattgcagacttcataaatattttaagtatgtcaaggtcagataaggacaagagtctgaatagaaatgattttcaaagtctgtgaatagttgtgatactatgtgattagagcacaaatgagtccacctactgtattttggaaatgacaggtcatgtactgactaaactgcagaattcccagatgatttggtaaataaatctcctaaagccagtgcgaaatcaagcaactagagtggcagggttttccctttgtgtttgtagcatttacacttgtttgtgtttgcagtaatacaacaatgatgatgacttagatggtgatcctaattctctccttctaagaccttgtcagtggctgttaggtgggggaaggagtaacaaatgctgcctcaaatttgacttacctaactcattttcctgtatggctccagagaatgtgaccctctcagaaattctctcctgcgactctcaggctttattcctccatttctttctactccagctttcttactgtttcttgaacaattcaaccttttcctgccttgcctttgtgcttcctagtcccactgtctgagatgttctctttgctgagaccactagctggctgattccatcttgtccttctggtatctgtttaaatgtcacctggctagaggaggcttcctgactctgctgtgtaagatagattacccactcccttctcatcactctctaacctcttctcttgctttggtgtttgtcttagcaattgtcactacctatattgtatatatatttattatctttctgtcttttacactagaataaaagttatgcaaaggcaagcacctgagtgtcttctttacctatttccgtagcctataactgtgcctggcatacaatcaatatcttccaaataaatgagtgatacttgtggttttggcaaaatatacaggtacggacaacttcaatttctctaggagccttctgcaagtaaatgcttgaatcatacaaaaacacactctattcaaagtaaaacataaattataatattgatcctgattagaaagcctattattgagtgtttagccaggatgagttatatcattttcgtgaaatattacataaactcgttaagtgaagaaaataagaaaaacataaagaagaacaaaatgaaaggcaggatatagcactgcacatattagtatcacacacacatacacaaatggtaactatcaaaaaaaaagaaaagtctcaagggaaattactctggaaaaagaaacgtgaaaactgtgagtaacaaatgggaatttccagccaagccagttatcacaataaaagttcactgttatccttctatctgatcaagccctgtttgaagttgctgacccctcttaaggagatcctagttattggcaccagcccctttaatttgacccatgattgggtactcagatatattgaatggaagcagaaggattttaggaaaaaaaaaatcataaagtcatatttcttaacctttatttgagaagcaattataaagttacttttcgcactatattctgatgctttccagttttcattttccaaaaagatatttttcgatttatatataatttatctccctcctcttccttctcccttcctgcctccctcctctgctctcaggttccatccaatcaacaacgtagattcctccacctccccgctcctacccaccccagggccagggtacagtagcttttattgaactttctatgggttagttttgagaggaattcaggggaagaatcaatgacaaaactctaagaatttacagctcgtgtgtttgtgtgtgtgtgtgtgtgtctttgtggctgtgtgatatggtttggctgtgttcccacccaaatatcatcttgaattgtagctcccacaattcctacgtgtcatgcatggaagggacctggtgggaggttattaaatcatgggggtgggtctttcccatgctgttcttatgatagtgaataagtctcacaattataaagcagagtttccctgcaccagctatctttctcttgcccaccaccatgtgagaagtccctttgcttttccttcatcttccaccatgattgtgaggcctccccagccacatggaatgtgagaccattaaacctctttcctttataaattatctagtctcagatatatctttattagcagcatgagaactaatacaatgtgtgtgtggcggggggtgggtgtgtgtttggagatgtattgcagtggagggagtgattgagagatagatccaatggagtatttacctcacctctagggaaatcacttggtatatttttatccacggtttatcaccactggcccagatactagattggcctcattggctaattcagtgtggtgttccaaaacagctcagtcaatggaagatataaaatacctcaaagttctagaatatgtatgaagcatcaggaaagggagggattcagcctcctaaaagccttgcccccaacccttaatccagtcaaccattaaatacatcaccaaccctgacagtatcagaaaattctaatgaattattcagaatatttatttgttttcaggtaagacaagctcagtttcacagacagtatggaagcctcaaaggaacccccatagtactgtagatcacagttctcataacagagagcaatatatcaattaccagctgcagcaattcagcactgtgctgtatcctcgaatactgcatgtactcagacctggctttctttgaaatcagaatccaatattgtctctgagagatgatttaatagagagtgtgaagatgctctatttcaaactcaaatatcttttaaacttttaatgaaaggtataaagaagtggtagatgggaaatcttaattaaattctatacaaagaggaacagagtttagagaggcattcacaggcaaagtcataatgaccagaaaagagatctgatggaatttctttactagagaatctatttgtcaacctcaggtctcatatatgtatctgccagacctaacaaggaccgacaagagatagctataccttaagaaaatggaaggactgaccaaggaaatagattaagtcactgattcagtgtccacagaaactttatagaacgtaactaccatgaataaagataattgactgtgtgtgtgtgtgtgtgtgtgtgtgtgtgtatttccttaaatctttttccttggtcaatcacaaggatatgtagtcataattacaaggatgtgaggcatgatattgagatataaacagggacaatagcagcctggaagcactgcatggcagtgttgggaaaacttcctactaaggcttgaaggatgccttgcagctcaaccaaaaaaggaaagggcagacatgggcttagttatcacaaagttctagattcggatcaagatttactaaccgtttgaccttgggcgtattgcttaaccattatgactgtttccccacttgtaaaatggaagtgataatgtgtatctttcagtgttgttataaaaattcaatgagaagtttgtaagttaatggagtaaatgtctagcttattaactggttggttactggtagaagcgatataagtggttactgatattaactaataggtttgggtcaaatgagaacagtatgcagaaaggcatagtggtgtgaagtgtaatgtacaagtgatttcatacagctgagtgcagagagcaattgagggagtgatgggagatactgcaggaagagaagcatcatccagatgacagagactagaacttagcctgtgacactaagcatgagagctttatcctgtagtgcagagacagcccgtgaatgatttgtttgttaattacaatgggatccattcttaggcttgcattaagcctcattctgaaaatatatgggtatatgaaaatattctaccattattctttaccatatcagaagcacttttcctccaattagttcaaactagtgatgttttgcttggaatgtttatatccaagcatttacacattggcttctttcaaaattactttctttccagctctaaatactctcatgattccagaagataaaatacaattaatggccttttctgttttctccaaaaacatatttttaattcttgttcatgatagggtgtattaatttcctacagcggctgtaccaagttatcacaaattgggtggctcaaaacaagacaaattcggccgggtgcagtggctcacgcctgtaatcccagcaatttgggaggccaaggcgggcggatcacaaggtcaggagatcgagaccatcctggctaacacggtgaaaccccatctctactaaaaatacaaaaaattagcctggtgtggtggcgggcgcctgtagtcccagctactcgggaggctgaggcaggagaatggcgtgaacccaggaggcagagcttgcagtgagccgagattgcgccactgcactccagcctgggcgacagatagagactccgtctcaaaaaaaacaaaacaaaacaaaacaagacaaattctattctcctgcagttctagaggccagaagtctgaaataaagggctgtttgcttctggaggcactgaaagagaatctaagtccctacctgccagtgactgggttatccttgtctttccttggctttgtagttgtatcactttagtctctacctcagtcctcacagaaccttctttcccatgtgtctctgtgtcgattcttcttctcctttctcctataaagacaccagttattgtatttagagcccacactatttcaatatgacctcattctgagatccttaatttatggacttcagcaaagaccttctgtctaagtaaagtcatgttcacagatgtcaggggttaggactcggacatatcattttgggggacactattcaacctacatagagaatgaattgaaacatgattaagaatctctttttacatgtttcagttatcctgctgtatgtctgctgtatgtctctgctctgttgaaaaggccaaaggcgaggaatgtgccggaagatggtgtttgttgaacagcccttggtctcactccctttgcacagaggccttggctttattatgcccctcaaggaaaaagactagcttcacctgagaaaggatgttggtggtcacttctatgcaaaatacagcaagagaaacacatcctttgcaaatcctggaccaatttgagaacagcttcactctcacaatgttggttttttgttttgttttgttttgttttctataatgtttttggaaatccatctttaaatttagccattttctctcatagcatttgctttttgtctggaaattggaactccaatttctgttactgaaggtttccagtatttcctctttaacaaaatttcatgtgggaattaaactattgtgcatttttttctttcctctgtttttctttcatcgtttttttggaatgtataaggtagagttattatttttacactggtaaaggagcgtgatggcaacaaccgctggtcattcagatgattcactatcgaaggattaacattcattttgaagcttcaagatgttttaagtatggactgagcaccctgccccatcctcccaggtagaagagacaaaaacttagttggctgctgacaggattcactccactgtttctcagttttctactttaagctccccacaccttccatttctagattttcttctgcattctatgaataccatttggctgtgttcagttttacacttaatttcactgttttattctattgatctatacctttagtaaaatttgtatcctttctcataagctccttttttttattatactttaagttttagggtacatgtgcacaacgtgcaggttagttacatatgtatacatgtgccatgttggtgtgctgcacccatcaactcgtcatttaacattaggtatatctcctaatgctatccctcccccctctccccaccccacaacaggccccggtgtgtgatgttccccttcctgtgtccatgtgttctcattgttcaattgccgcctataagtgagaacatgcggtgtttggtttttttgtccttgcgatagtttgctgagaatgatggtttccagcttcatccatgtccctacaaaggacattaactcatcattttttatggctgcatagtattccatagtgtatatgtgccaccttaaacttctgaagaacagaaacggcattgctcttttaactaattttattcttgctacactctgtggtagctattcaccaagtttttattggatccattgaagttaaagacccaaatttatttgaaattttctcatcggtcttattcccaaataaagcactgacctctgtgttattagaatgccattttataacatctgctaattaggagcaggcctttcctttgttaattctacttaactaataaacagcaggaagagtagagttggccaagagaggaggaaataaatgggatgtaaatgagtaaacacccaatgctgggaaagtcagataagagaaaaaaattaaggactgagagaatgtatgagattagaggagaaattctgtaactcagtagagaaagtcagctgtgttcaccctatactgaagcaatgtgctaataattcaagaatttgaaattttcaagacgctttttcaccacaaagaacctggatcccctaacctcaatttccaagcatattctcagtattggacattttcacataaatctctttttgatctcccaaactcagcatgtcacaaactgaaataatcttccctttcaatgcagcccctcctgatgatgttgttaaaggtgctctatattttcttagcctcccgtgctttcagtcttggaatttccctgggctgttgtctctctttctctgccaaactagtgaagagtcattagctgtcatttattgaccttcagatcttatgtcactagaattttctataagttattttgttaattaattcttgtgataaccctatgtagtacatactaacatccccaaagaagttatgaaactcacccagagcataaatgatgctgtaaatgtagcaaagtgcctttgagagaatgaatattgtgggacactgcctgaaggccatgataggtactcttttccctgtacacgtcagcatttatcacacctccactgccttgccagcccccctgtgccatttaccaaaacatgctttgtcagcaaatcattatctaaaactgaagggttgaaaaacagtgcaatgaaactcattattttatttactatgaatgagaacactatttatgcttacatagtggcagtgttccactggaaaaaattctctgtgactcagtatcaggaatggctgtattctgagcaaccagctggatcttatttaatgaatatcatgaaccctattgctcataatgtttcttcctgttttgtctgttggaaatctcagaaccacctctttgacctgaatctaagagttgaattgtaccccatggtgcactttctgaggttcccttgaccaccctcttatttttctcttggctgccccccagttaagccatgcctctctccttttctgaatttgaatggaagacctcactgcgcagattggatttagctttgtgagtggctgcagaggagctagaagtgtcctggaagtgccgggaaaagagcgccccttaggtgagccatgacatgggtgactacaggaagccaggccaagatgccgtctcactgctgtcttctgtggacctctccaggaagtgttttccctgggagtccttccctagaagcccagcatcacgggagtaggcagccttcagagggacctgctcagtttcttggtggctcactttgacacagtagccagtgcagtgatgtgtcatatcccattctttgcttgtttctgtgtctcatttctccttgattcctcagtcgccttgcttcgggcttgtatctctgaaataaaacgttagcaccttgatccatgcttcaggctctgcttcctggagaacttggactatgacaaatgtaagactgtttgttacaggcataaatcggcacttcttgctgctttttggttggtggcttggtgttaagggtagtagtggccaccttttttcatcacagaactggaactacattgccaagagtttgtatttggcagaaactttccttcggatgtctttctcaagaggaaactgacagtaagtgtaattccagtgttatcccccaaactccaacattttaaccccttatttctcattggtactgtaggaatgccagaaagcacaaaagagcaactgcctgtagcctgctgttaatatagttgaaataacttgtcagacttccactatgaaagcagattttttttctgctggcaaaaactagaagaggtgccataaaatcagaaataagctgtgaaatgcactttaagttaatacgaaactgtgttgttctattgacctagcactctgaaaaacaagcagtgttgtcttttgaaggatgataaaactgcaatgaggatttctttgtggcatgggggaggggaggggtgggtttattttattattattattttgttgcaaaataaaagagacagctctctgtgacctcagtgagaaataaatcctaaaacagaatattagtgattttgaaggtatttccatcttagccatcctaaccataaactagttgctgctttatgtgtatcataagctccctttttgccccaaattcgctttccttgtagtttttctaattattttcttccataataagttaacaagacatctctttcataaacaaatgtgtgtgtttgacatgagaaatgctttatttccagctcagaggactctttttggtcaaagcagaataaggctttgtactgagtcttcttccaaagactattttaattttattagttttttaatattcaaaaacaagtcatggcaggggaatagtcagctcatttttaagtgaggccaatttttcttcttatttctcattcactcttatgaaaacttagtcagaaattgaaaagaaaaaagttagagactatctacaaagcaacatagagcagccacagcgtggaaaaacccagcactgttttttttcaagtttcaaatcctgccacacacaaaaaaacattgtatggagttctattttcatgaattataagtcttttggatgcaccatgaaatctaatataagctggtaaagagaattcaccttgaccttgtctcctaaggtgccattttgaagagacagtgctgagtttagtgaagaaatgatgggatggggagctctgttcatgcctgagggcatttggagcaaagagaacctgaaagaattgttagttctgactccatgaccttgtgattagactttgcttcagacctacacagtgaaaccttgagaagcatggttatgagcctggctttggaatgaaaggtgtgggtgcgaccccagccacatgagaaccctgggacatgtcacatcataaatctgcgtaagtgtcaaatttctcagcagttaaaaaacaaaaatattcggccagctgcggtggctcacgcctgtaatcccagcactttgggaggctgaggtgggcggatcacaagctcaggagttcgagactagcctggccaatacggtgaaaccctgtctctactaaaaatagaaaaattagccaggtgtggtggcacatgcctgtaaccccagctactcgggaggctgaggcagaaaaatcacttgaacccgggaggcagaggttgcggtgagctgagatcatgccactggacttcatcctgggtgacatagagagactccgtcaaaaaaaaaaaaaaatcacatctaactcatgatgtacttggagatcgacaagatgactttagtatagctgataggccatcataagttcataggatggtggtgggtattttgtcttattttttatcagtgtattttcagcacctaatatgtagcatgacttcaagatttatttatcaaatattttaaaggacttaagattacccttgactgacccatgtgccaggcaatcttctattattattgggaatattcaagcactattttgttcaggatttgattagtttcttagggatgagcaaagagggcagttttaaagctccttcagagctaactcaaagtcgctgctagcaattaaaagaaggttaaaaaaaaaaagtgggacatggatcctctttattctcctggacattaaaacgtgcctcgacttgtattctccaatgtcccacattaaagtttagctgataagagagttccagtgctaaaacacagtttggaagttactcatctcatacacatccatgttgtaccaaccgatggccctctcagaaacaacaccatcagtttttggatgtctgtagtgttcagctctgtcaacagggcttaggaagggactctagcccctgcgaacatctggagaatctggacaccatctccattaacctgatccagcagatgttcccaccacacatatctatttcaagatcttcattgggagaggtaccatctttcaactgctccaagttatggtccatttcccaccaattagtaaaagaaagtgtctgtcttcatgaatcctgaagtatacacactcagtggtctgtgatatggtttggatatatatcccatccaaatctcaagctgaagtgtgattcccagtgtgggaggtggaacctggtgggtggtgattggatcatgggacagatccttcatgaatggcgtagcaccatccccttggtgacgagtgagttcttggtcagttagttcatgtgagatctggttgtctaaaaagtcagtacctcctccctctctctcttgcccctgctcttgccttgtcatgactgtaaactccctgagacctgaccagaagctaagcacatgttggtgccatgtctgtgcagcctgcagagccatgagccattaaacccctttgctttataaattacccagtctcagatatttctttatagcagcacaagaaagacctaatgcagtccgttgttaaggaaggataggattaggcacctctatggcaatcctagccaagtgccttttcaatctataaaaaacactgcttctgtggcactgctgacagcttcattcagtaaattaggacatggttcactaatgtgggtcttaccacattacaccatgttcctacatctccttcaaaattataaagttttctttggcctgcctcctttcataaaaatgtcagacacatcagatactttagacatttatttggagtaaagagcatcagaatcttaggaaacgggcctctgaaaggaagcattaatgaatgctttgattaatgaacctgggagtttagaaatgataccaaaaaaatatgaagttatatattgttcttgccttattttttatagcataaaccgaaaatgctgatattcctgtgtccatgtttaactttgctgcacttgttcctgtttcatctcatttctgtttttcatgttcaaattttgtttctcatgaccacaggccaggaataaaagggaaaacagaaggccaaagaagatgtagcttattattaagagtcagtgacttgggctcttttcttgctgcgtagacttgcttagaagcctctcgcgtagacacgcactcactccacaaacttcctgtctttctctcctctgtttcctttttcagcatttacaccctccctcatctctctctacagattttacaatccagcctctcccataataatctacagttaatgtttcctctgtggtccctggtaacttcctactcatcaacccaccgaccttcccttagcctttgtcctccttgacccttccttagttttaacgaccccctaatttcttcaagtctaatctttgcttggtttttatctcacagttatatcctcattcttcagcaatcactctaattcttttttctctatctttttcacttgtttctattctattttcatgccttcaaatgagagcatcccccaaggtcctgtttccttttctctcccttctttccctctgtagtctcatccagtttctgtggctttaactatcatcaccatataaatgactctcaccttaccctaaattacatcttcatttctaacctctctttagcttcattctaatattctgaattgcacaatagaaatgtctacttgaaggtttccctaatatctcaagtttaacaggttcaaaactgaactcattctatttcccctatactgctcttctttctgaatttggatttcttttaatgagtccaccatcctctaagaagccttgaatcacctctaattcaatcagtcttgtttttcacactctgtatgtagtccaaggccattctaacaacgttttcacagtctcacttactaatcctccttcgtcttccccagtgccagccccctagttcaagctcctattccctcactagtcccccatgtcaattttctctgctttccactgcattctgtccagggctacctataccaatcttccttacatgcctaagtgcttgtggcaatcccttgctctgaaatcttcaagattttttttcttctcacctaacaaagcagaaattctttcattagccttaggtccctccatgttctatagccaactatagttaaagactcttgtggtctttaattatcaatagtttccaatgcagcccacagtgcaaatacaggaccataagccattctccaaggatgctctgccttttgctaacactgaacttctgctcatcagttgtctctatcagtcctgccagaaaaccctagctctccacctatttgcatttttaaaaagtcactctaggcatgctgaaactgaagagtttcctgaccccccttacaggacctgtggcaggggtgtgggtcaaactcttacgggaggatgaacatacagacagacaggtgcgggagtcgggccaagtgctttttggctccggccccacagtagtgtctagaagtggatgcctgtgactcctgaagccccagtgggcatcttacagtgctcctttatctctgctgtctgctgacggcttaagtgttaaccagctcagtgccctcttggcacccaggttcttgtctgacatacaggaagaatcaggtcacacagacaaaatggaggatagtaaatgtaggggattttattgccaggtggaggtggctctcagctggatggatggggagctagaaaggggatggagtaggaagatgatcttcccctggatttcagccatcctgtggccgatctctctgaacttccccagccgaattcctctcaatattcagatgctcctcttctctccttctctgttgcactgctctactgttcctctgctcttctgcttgtcggctcatggagcctggggcttggggtttatatgggtacaggatagaggggcatggtgggccaaaaggcagcatttgggtgtgaaaacaggaatgcctgtttccatttagagccatttacattaccaggtttccaggcttggggtgcgaaaacaggaatgcctgtacccatttagggccacaggtttccaagcttgagggtggagcctttgctggggaactgccctcttctaaccagtatttccctgtctcctgtccgtatcaatatgctaagtgcctgtgggagaaaaaaaaaatcttccttgagggatataaaaatactcaatagatatttgttacatagaattcaaatgaatacaattggactaagaaaatattttgaacttgcatattgaatcacatcagagggatcaagaaaaagaaaaagaaaaaaatgaagaagaaagagggtcgtgatagtgaaaaggtgtgggaaagagatagagtattaacttttatttgatgaatgtgaaatttcatccttagcatcttggcccaataaacaaatgcctccttgattctatctcgttggggaggctaccctggaaaagcctggaactctctctagtggttgcagagtgtcacaaaaggctatgtatcctcttaacaacggaaacaaacataaatagcaagattcaaataagcatatggagtgagctatctgctgttgaatttggtacttgaggacttaagattatgtaagaaaaggacagttgttccttcttcatattaaataattatactacatatctaaatcgggatttctcaaacttggcactgttgtcattttgggggagataattgtggggggattccctgtgcattgtaatgtgttcagctatgttcctagtttctacccaccagataccagtaacatccttattcctcttccccccagctatgccaaataaaaatgtctctagacattgtcagatgtctcctgggtagcaaaatctaaatttacataaagatacatatggctaaaatgcatataatttttgtaaagctgtgaatacagccatgctaacatattttcccatggaaaagcaactggactcttttttaggttctcattccaaaactcctcctgtttacgttcctttaggctaagcctctaatcaatttgtattctataatattatgcataattctgtaacatccataatagttgatggctatgaaacagacaagactcacagacaccattcaataccacctcttataatgaatatacaaatatggaaagaaagaccccaactatccaaactgtgataactcttgactggggactggtgaacaattcagccataaacatcttcttattatgacagaccagacagatgcaaagaaaaacaaagaaaagacatcatgctaaaagacatgactagaactagttttccttttgaacagcctctcacattaactgttctgtgtaccagaagtgtcttttttgttgtgttttcattttgcctttatgcaaacacaattgcaggctacagatgcacttaattattttcaatggtagtagcattatcatttgtaatactctcctaaggggtagaatgaatctaaaatgttaacaaatttcacatagaatcatagaaaggcagtaattgttcggggaaaagggcagctgtttcctcctcatatccacctgctgagtgacagatgattcggtgactgggtaaaactttgaatctcatattacaaaatcccaatcttacaggtcaccaaaatcccttggagaggttactactttcattcagttacagaaaaataaagcaaaaaaaaaaaatttaactaccattctaggtacctgtctattttttaaacaatcaatagccactttccccagtcttagcagacataatacttctcctagcagacaaatttccagaatttgagtcttaatttgctctttttgtataacttacccaaagaaaccaatctcagttttgattaaggcaataaaatatgttttcgctattcagatagaagattggtttaaataacccatggtggaatggtcagtggcagctgtgctagtctggaaggtaaggctgttaacatgtactttacacaattactgtcagtattggatatgtgtcaaagttatttaaactcagctcccttatttagcatctatttattacagagcaaggctaatttattactcatgatctatcctccttacttattattcagcttcttatttgtgtataaagtgatgtagcttcaaatccacatccttggatgtggaatggaatggatgtggaatggaatggaatggtgtagcttgtgaatccacacaaagtgatgttgtgcagtgcaatagcagtgtgcccgaggcctcatttcattttctactttctgcattgctgattagtctactggcaactttctaaattacggggtctgtgagctcctaagttatgatggttctttggatgttaattatccccattcatacaccctctttattatacatttgatatacagtatgtatggctctcctttgtattctgagaaaatgccactaatggcaattcccagctctgtggctgctggtgccaaaaagagtggtatgtgcctggtggcccctctgtcacatgccgaggacattcaggagtggcaacacgcagcctgcacagagctattacaatcgtctgcgttttctcctccatcaaagccaccatgtttatggtgttttaacaaacattttatgctaaggaaaaggaaaccaaatgctttttttcccttcaaattctattatggatttagggggaaaaaaagcattattgtacatcctgaacctgacttcgatttttctttcaaccctgtattcattaaaaaggaagcaattgataccagtttcttttgaattcagggttcaggataacagcttttattcttaaatataaataccttctttgacttcggttaattgatacattagagtgattgatttcttttatcttttttctttcttttcttttttttttttttttggtaacaaattacccaaaaggtagagtaaggatacctatacttttccttctgagttgaccttctcagatcttgagtcacattagttaagttatgatgtctaggttgttttaagttaatttactttttaattgacaccaaaaaattgtatgcatttatcatatacatgatattttgaaatgtatatgtactgtgaaatggctacattaagctcattaacgtattattacatcacagtggccagtttggattactttaagaggcatgtgaaaaacatgaaaagagtttgaagtagagaaacaaagatgtaaaagccaacatatttaaaaggttatcatttattacacaaatattacacacagcacagtgctactgtgcattttacctactttgtctcattttaaccctcccaacaaacacataagttaggcatcattacccacattttataagggcaggcgctgaagatcattgagatttacaaactcacttaaggccatagttttaagcagtggagcagaaattcaaatagaggtcagaggtctccttaactccaaagtcttttctatttttttttaatcctagtgtagagaaatgtggatgatgatttgagaatgacctttaaatataaagtgtgttattttgtaaaagtctgcaactacatattctttttattcctgggaatagaagaagagaaataaaaagaatgaatctatttgtagcatgaaaaatttgagttggttataagaagtagtttcctgataaaagttgtatgtaaaactgttcttgccttgaaatggagaagtccaagcagaatagattccacattgtgccttaaattgtagcataagtccacatttaccagtatttagtgcagagatgaaagcctaatctagtaatctattgctgtgtaacaaactatcccaaaactttgtggcataagacaacaaccatattattacgctcgtggttctctgtgcctggaatttgggcatagtacagctgtgaagacttgtctttacttcctgatgtctgaggcctcagccagggtggcttgaatgtctggggatgggcagaatggctcatttgaggtaatgtttctagggcttctttctggctgttggctgagttccttggatcttctccacatactgtctttggggactgaaatgggcgagatggctccttactcacatgtttgtcctctcggctgtgatgactggaccagttgaaggctgccagtcatctcttactctttctcttattctttgcatagcctcatcgtgtgggtatcttgggcatcttcacagcatgtagatatcagagtagttgaacttgttacatagtgactgactgccagcaagcattccaatagagcaaggtggaagccttagtgattccagtaacctagtctcaatagtcacacagtgtcatttccattgcattcttttggtcacacagatgagcccagatgcagtgtgaaaggggcctagatagggaagacatggattattgcaggctatttttggagactagatacaacaaaccacatagagttctagggttgaaagacaaacaagcagctggttaaacatgctccacacataaaccatttatctaagggagaaaaaagaatatgctagaaatagacaaatagtcttcttggccaccaaggacagttttgtatatggattaaaggtaatgtgcccccataatgttctaacgtctccctaggcaggaaaaatgtcagaagtctcaagtgaattacatattaataatttgtattttcccatatatatgggtaaaaattgcttagggctataacttgtagctttcaatttgcatcttcattgcaccagggaaggctgctgtgtgacacatatgtttgactatcctagctgaaaacaaagtagtctgggtttaattctattggcaagagatcagctttccataattttagcctagtgaattgttatgggctataattcaaatgtaatgatctgactcattgaaatgataagattcccagctttaggcaggcatattgttcctcctcataagaaagtcaattattttagacatcaggtaccccctcaacttttctttaaatagaagacagacactgttaactgtcctaactagggcaaatgtttgagtcaccagagcttatgcgaacatgtgtagttccgtatttgaatctagtgagcccattgctaatgatggcatacagttcagagatttcactgttgacaaagactatatgttcccctagtagttttctgtataatgttctgtttactgtatattcagctgaggatttgaacaccttcacctggagcaaaatattctgtccacagcctgttttatgtgatgtgctgtacgaaatagattaatgtttctaaagtacatgagaagtgaactctctcactaagacagcctagaattaagtaactttgctgctaagtcatacaatatcttagcctgtctgtggagacgaggagagaatttcattgagtctcataataaacaaaacaaataaaaagctaaggctaattttaaagcataaccaaataccttctgtgcaaagatagactatgaataatgactttgttttcttctatttattcatggtcaggaaggacatattttccttccttactatcatcttgctgtcaaacttcttgaggttaacttggttatatagtcttttacttggaaaggagagtagttaaatctgaccaatttaattgatcagaaaatactgaaacaacaggacacgttcctatagtggtttgcttccttatccctctgttttgactattcaagaccaaagatatgcagagttcaatgggggtagtggttaagagaacacatccttaaaaattattcatcaagatgagattgtggatctactgcatagtaaaatacaactttggcaagttacttaatctgtcttagcttcagttccttctttgtgaaaaaaaaaaaaaaaagaattggtgcatgataacaacattatatacttccttagatagcagtgaagtttaaatggtatgattcattcaagaatttaacacaattcctgttataaaagcactgaataagtatgagctctttctaaaaccattagcatattttttcttacctataaatgaactgtgagtcttattactcaaatttataatcactagactaaactgaaaatcgaggggatgaaagtcacaatccaggtgtgtcataaagtaaattatgttagagtattttcagatgatccaggtctgattttttttgcttaataaaatagtatgggcaattagtggaatttggttcctttattgatttcctgcacactcttatacttaaaaatgtgactttcaagttccctgtggaatcagcaacacaaattccagtggtggccagttcaatttcatgccactacagagtaaacttaagataaactggataatgggagtataggtggagaaacatctaggtgaccacaactgtatatcctgaataattaaactgtattgtaaaataaaatgttatttcttggttttcttgaaagagcagtgtgggaatgaaattatttatgtatttttcaactacagtccatatcttagggttttttgagttgttttaatgaaaatttatataaagcatagctctttttatgtagcttatatagcgattcatatataaagtgtagctatccttttcagttaatggcaacataatacaatattgacaaaggtgcagtagggtgaaactttatgtttcaagtagtacattcatgagcttataagacaatggggtttaaacactcttagccacagaagtaaggaaaataaggggaaaagaccttcaaaccttcatgtgcttcagactgacaaggcctctaaataactagagtggcccaaaacagtgcattttcatctttcacttaaccaaagccagtactcattttctagagcttggttctgaagcatcaccaaggtccaaagaaagattattctgtactagtatgacgaggtagacaggtgataaataagaaatggagatttattttgcctctggctgtttcaaagagggttctcttcattcaaatatcccgagagagggctttctgtttgatccctgtgtgttacacacacacacacacacacacacacacacacacacatctatatagtaggtgtgtgtgtgtacatataaaaaaaaatagatatttaaagtacaagtactagaaacaggagaatgtgtttccaccttatcctgggtgttaccttttcattgccagcaaagctttcacaagggagaaaacactgtgttctgtggagtgtgcttgtcattgacaatctcatcacccctggatacttcaaaaagttatgtcagatcttcactgtctacaagggttttgctttcatgattcatacctggccctttcactgcttgcctttcaggtcaaaagccagaaagtcagcctctccagaagtctgattagcacttgaacttcaggagatttatggccacaaggcttgatttttaaagcagttttatccaagtacagatcatttattctgtggacagtggtatttatcttccaccttttccatacattttatgccaaaaatatacagcttagctattctttttgttgttgttgataatacatttatttgagaatgttaatgccgtcatcctcaagtggcgtatatcatcagtttaatcagtttaatgtgaatttttaaaaaatctctaacattttatacaaaattagagaatcctgacaatataccaattatgctctgagtttatgacctgggttttagaacttgggatctactatttgccctacatttattatgtctactataaaacaagcagttttttcaagtacagaaattacaatgggaattagaccttcttgccctgaaggagttcagggtctagttcagcactgtcccatagaaatataatgtaggccatatacataattttaaaatgtctaatagccccattaaacaaagtaaaaaaaaacagattaaattaatttaaataatgtatttttaattcaatgtatttaaaagaaagaaggagggaaggaaagaggaacagagaggaagaaagacagagagaaaaaggaagaaaagaaaagaagagaagagaaaagaaaataacagaaaagtaaagaaataaaagaaaatttaaacaaaaaaggtatagtttggcgagtatggcacaatcttgatcattgtcaaatactgacagtaagtttacggagattcattgtaccactttctccttttgttgatgttttcaaactttttaattaaaaaaataaatttaaaaaaaaatgccaagacaaaacacacactgctttggcccagagattctattctaattcatttgggaaagttcctagggactggagcattgctatttttaaaagctgctgggatcattctgttatatagccactgttaacaggtataagcaggtacttatgctaacaggacaggagtctggagaggaaggtttttaaaggttattggaaacgaaaggtttttttttttttgtagacagagtctcactctgtcacccatgctggagtgcagtggtgcaatctcggctcactgcagcctctgcctcccaggttcaagtgattctcctgcttcagcctcccgagtagctgggactacaggcacccgccaccacacctggctaattttgtatttttttatttttgggggtttcaccatgttggccaggctggtctcaaactcctgacctcaagtgatccacccaccacggcctcccaatattctgggattgcagggatgagccatcacacccagcctgaaaccaagggttttacaatacagtacaatatgactgtacacacatattaccaaaaaaaccactctagcagggcatggagaatagatgactgatgggcagattggaagcagggaagtcactttaggagactgggaagaaatgacaaaagtctgaactcacacaaagaatggacagatttaagatgggcacagagtatataagtccatttgtggactagtataaagaaattccagagactgggtaatttataaagaaaagtggtttaattggttcacaattctatgggctgtacaggaagcatgatgctggcatctagttggcttctggggaggcctcaggaaacttacaatcatggtggaaggtgaaaggaaagcaagcagatcttttatggctggagcaatgtgggtggagaggtgctatacacttttaaacaaccagatctcgcaagcgctcactcactatcactagggcagcaccaaaggtatggtgctagcccattcaagagaactcagctccagcgatccagtcacctcccaccaggccccacctctaacactggggattacaattcagtatgagatttgatggggacacaaatccaaaccgtatcagtataataaccatctatgaggtaaaacataatgaaattgttcagatttgcagtgaaggtgggagactggtgatcagaaaccagaggaaggagattttcatgacaactggatttgggcagttggataaaggggtggaggtaccattcattaaaatagaaaatacaggcagattttcagggagcaaagagggaaggcatggattcggttccaaatagcatagttagaggccacaggggaaataccatacacaggcaaaaaaaaaaaaaaaaaaattgtaaaagatcagaaggtgggccaggcgtagtggctcacgctcacgcatgtaatcccagcactttgggaggccaaggcgggtgtatcacctgaggtcaggagtttgagaccagcctgaccaacatggcgaaaccccgtctctactaaaaatataaaacttagctggacgtggtggcgggcacctgtaatcccagctagtcagaaggctgaggcggaagagtcacttgaacctgagaagcagaggttgcagtgagccaagatcgcgccactgcactccagcctgggagacagagcaagactctgtctcagaaaaaaaaaaaaaaaaaaaaaaagatcaggaggcatttagagtaagcagacacagtgctcaatggtttcttctgtgttgtctctggaatcttcactgtagccctctgagacagcttctataattatgtccatctgacttaaagtagttgagtaagttgctgaggagcacacagctagtagttgcgggatagaggacttggagctacagctgtccaactccaaagccttaatcatcatgttatagagccatcataaacatacttcagataaaaatacctttgcataatgagaacatttttactgaacatgatattacttcattcaaggatttattcatgcctttgtcagtattttaattgtctggcgaacaggacacataggtcagattaatctgctgcttaatcataatgctaaaaagagtgctgattgcaaggctaaattttgttacttagatttttttcaaataaattttgtgcagatggattttcccaaaagtttaaaaatgaataggctagtcaaaataattagcaccgatggtaacacagctgcttaaggacactggtctgcagtaaaagaatatttgttctattttctctctccaaatctccaagaatcgctattctagattgatgtggaaatcaccagaatcctctcctcgggtgtcactaacaattgaaattaaaaaaaggaagattgccattagcattacttttttacaagtatttttctacctagaaacaaatgtctgtttccagatgtccttccaaaagagtgttatctatgttctacatcttcaagtagtcaaaattaaataaatattatattatatctgagtgttgggaaaataaatgaaacatctcatggtaggtgggaaaaacccagattttgcagtaaaatggccctagttttaaatctttgttccacccttcctggctctgggaccgtgagcccagttacttaaagtttctggtttgcagtcacctaatcgtggacataggaatcagaaatcctgacagaactgtgatgaaatttggccacaccctgtatttattttctagggccactgtaacaaatgaccataaacttaaactaatggcttaaaacaaaacaaatgtattttctttgagtttaggtctgaagtccaaaatgagtcttattgggctaaagtcaaggtgttaacagggctgtttttttgttttgttttgttcttttttttttttttttttttctggagtttctaaaggagaattggttttcttgcatttcacagcttctggaggccacttacaatccttgactcatggccgcttcctctcatcaatctttcctcttgcttctgttgtcgtatctcctactagaaggcactcagtgcacttttgtacatggtacagggaggcagttaatatagagcagtggttctcagccagaagtgattttcttccccaggggccatttagaaatgtctggagacatttttgggttgtgctttacacctttgcatggaggtcctactggcgtctacttagtagaggccaagaattctgccaaacattctacaatgctgggataggctcctacaacagagaattacccacccctaagtgacaatagtttcaaggttgagaaactctgacataaatgttaggattactcaccccagaatccaactgcctagctttaaaccaggctctactactcattaaagtggcctcggacaggtcatgccatctctctgggcctcagagtttcttttgcttccattttttttttccatctggaaataggaataataatagtaattatcatatcagactattgtgagaattaaaacccttagaagaatggttgtatataaaagtatataaaatccttagaagaatggttggcatatattcaataatgttagttcttgttagtactgttattgtcactcagcaaatagtaattaattttgtctgtgcctttccaaatgcctttcaaaatataaactttcttagtgttttgtaagtagagtatgtttaaatccaatagtagaccaaattattttaccaactattgtttagaaaatcaacatttttgcagaattttaatgccagctaatgagacatctaaaccgcagccccttccatggagtctgtcttctttcataaaatttcgcttgggcctcagaaaagggttttcaaggaaatagcttcacatcccacacacgtatctcaggtaatcaaacaatggcaacaccacttagctcaatgcacttctggctatcataatattccctgtgactttggtggatacatgtaaattaagaagctattcaagtcactagtttcgccatggtgagatgtatttgtgtgtgtgtgtgtgaacacactggtgtggtttttagaaaatatacatacaaggttatcccatagccttgtgctattcagtatgatagccattcgccacatgtagttattgatcacttgaaatatggccgttttgaatggagatgagctgctaagtataagttatagaccaaattctgaagacttagtatggaaaaaagaatataaggtatctcaatatttttctcttgattacatattgaaatgataatattttgaatatatagagttgaataaaatgtattattaaaattaaagtcacctatttttttcctcttctttcattttcatttattgaggtaaaatccccttaagtaaaactgaccacttgacactatacaattctatggcattcagtacattttcagtgttgcaaccaccacctctacctagtctgaaagattttcatcgctgcaacagggaaatgcatttcattgagcagtcactccccttccccttatcccaaccagcctggaacaatgatcagtctgctttctgtctttgtgaatttccatcatctgaatgttttatatatatttaaggatgtaatatgtgaccatagtgtctgactttgtgaatttccatcatctgaatgttttatataaatttaaggatacaatatgtgaccatagtgtctgactttgtgaatttccatcatctgaatgttttatataaatttaaggatacaatatgtgaccatagtgtctgactttgtgaatttccatcatctgaatgttttatataaatttaaggatacaatatgtgaccatagtgtctgactttgttcactaagcttcatattttttacattgtagcacttatcagtatttcattcctctttatgggtgaataatattccaacatatggacatactacattagttggtggaaatctgcagtgtttttaccttttacttgttaatacggcctctatgaacacttgtgtacatgtgttgttgctggtttttttaattttaggtttgggtggtacatttgcatgtttgttacatgggtatattacgtaatgataaggattgaacttcaagagtacccatcaccccaatatagaacattgtacccaaaagataatttttcaacccttggccccctcccatcctccccacttttggagttcccattgtctattatttccatctttatataggtacttattgttgagttcccacttgtaaatgagaacatgaaatatttgattttctgttactcaattcacttaagataatggccttcagctccatcagtgttgctcaaaggacatgcttttattcttttttatggctgcatgatattccatggtatatatgtaccacattttcttaatcaatcatgatggtcacttaggttggttccatgactttgctattgtgaatagtgctgtgatgaacatatgagtgcaggaaattttgcctattcctttttaattttttaatatgaagctattataaagtttaaaattacatacgcaattcacattatatttctgttggagagcactattctaaactttgctctgttttgacattctgaggcagactgtgaagcagcctgtcttaaatgaacagagcatgccaacatatataagaagaattacaaagaaatgaatataaagacatttcatacccctcaggcagtgtttatcaaaggtagttcttggaccatctgcttcagtcacttgtggtgcttgtgaagaatgcagattcctgggttccattccagctgtaactatgcagaatctctgtgcccagggctctggatttttatcagattccctcttgatgttcatttgcattaaattttgagaatcgatgataaacttaacaatattaaaggaagaaaaaagatcagacaacaatgatacacagacacaaacaacagtaaaatacctaatgtaatatacatgatatcactcaccactatacataagaaccaaaacattgggcgtcagtgagtgttatatttggattgtagagaaacaatatcattcaatgttgcaatatcatttacttccatattatgtcataatacttggtagctttctgacatgacaagtcattttattcagaagataaaatggaatttagccatctctgtgtttaccctaagtcatctatgtaccaatctgcaagaaaatattagttaaatgttagcagaaaatgccagttgtgaagtgtccctttgaaaacataaattttcttgggggaaggggaatgtgtgtgcgggcatgtgtgtgtgtgtgtataaacatacacatctatatgcatacacatctatatacatatgtgtatatattactttattattgaattagctaaataaactccatgttagaaattcaaagaaatcatttgtgtgataaataaggttgcttattactgagcaactatgattatagcagttttatgaaattttaattacattatgcacctactcaaatattggttttgaacattaatcgagttacctgagaaacatttcatggaatgggaaataaaaatgaaatggcttatttacttatcccaatgcattaaagatgaaactcagtagggaaactcgtaagaaaaaatgagagacctactcagaaatctcattcaatgcaaaccacgggtggattttcagattctataaattatcttcagtgattgaataacatgtagttatgctgacgagactatgcttaaaatgcaatatgtatgacctagatgtatgttatggcctcctacttcttgcagcatcctaaatttagaaacccatcagatattttgtggttactaggtggacgaaatgcctcttaattccgttcaaagccagtgctatttgtcaagtccagcacccgatagaaagaatgggcaataaggtagtagagaaagcagaaggagaagcagagagaaaggaaggcatttgccttggttagccagagactgacactgaattgatgtgacagctccacattgggctattgcatatgttttctgtcccagtgatttctttcctgttacgaattacatgggatggtgactttgctaaaacctagatgtcaaactgttgtacacttcatatatacttatttttaaattattctccaaaatatccaagattcaagttagtagcccaggttgaaaagaaaatttcaagggatagccaagtgttcattttatacaagaacagcctttaaacacgcacagtcagctgtatagtggcagtggacttttgtcagttttcaaattagtcatatcattagacacatggaggaatgtcttctgggacataactgggacatatctgaattagctctatatttatctacagtcagaaattataaccttaaaaatacattcagagaagtttacacctacatgtagtactttcaaaagttgagcaatctttgtataatataatattacttcttattttattttattttttgacatggagtctcgctctgttgcccaggctggagtgcagtgacttcatctcggctcactgcaacctctgcctcccggattcaagcgattctcctgcctcatcctcctgagtatctggggttacaggcatgtgccactgtgcttggctaatttttgtattgttagtagagatggggtttcaccatgttggccaggctggtctcgagctcctgaccccaagtgatccttctgccttggcctcccaaagtgctgggattacaggcatgagcaccacgcctggctattactaccttttagtataatttataagaaagagtaattgatagaaatgcttccagaaataaatactaaacaatttccaataaaccacttttaatttttaaatacagaattgccttacttaaaaaagaaattataatacccttaattagtttgacccttaattagttgaccaaaaatatctcttatgatcttaatattgggagcaactctttaagacagttttcttggcaatgcaagtttattctaaatgctgatgaatactgtaatacctttaaaaaattagtagcaaatatagccaatttttcctgataatagtcaaacaaaaaactctggaacagaagcaaacctaatttgatgctgaattcacaaatgaattcatttttaaatgttaactctagtccataaataatgtacttaagcattaaagcctaaaatattacttaaattcaactagtttgatttcaatttaatttgaacttcaatgattctttcttaatttgtagaattaaggctgaaatgctagagtgggctatttcataaattaatattcatagattcttaaggctttagagaccctaccatgttattctaacaattaattgtttaaaaagagaaaatcagatatattgggatagctgaaaaatggtatgaagaatacaaaatttcaatggccaagatttttcggacacaataaaaagacacaaataaaagagagaaatttagaaagacaacagaaaattgaatgacaaagaaaatcttccttgatgttctaagagcttttggaggttataaaggtgacagattctaaattagaagcattcaactcacaccttgaaagaattggaacaggattttcttgcaggaaaagaagaaacttcaggacttatgaaaagggatcttgctgttgagtcctaaccgagttgtaattaaaaatgaaggtgcagggctgggcacggtggctcacgcctgtaatcccagcactttgggaggctgaggtgggcggatcacaaagtcaagagatggagaccatccgggccaacacggtgaaaccccgtctctactaaaaatacaaaatttagctgtgcgtggtgacacgtgcctgtagtcccacctactcgggaggctgaggcaggaaaatcgcttgaacccaggaggtggaggctgcagtgagcccagatcgtgccactgcactctggcctgctgacggagacgctgtgtcaaaaaaaataaaaaataaataaataaataaaataatataaaataaacagaaaaaatgaaggagcaattgagcagttgaacatgtctgaaaacattagattctatatgtattggacatgcctgaatagtttagattgtcaaaaaagagaaattcttctttaatgttttgagaaaaatatttgccacatgtgtgttgggaataaggaaaaaaatataaaattatttaatataaaactagacgtaaacctaggaggcggagcttgcagtgagccgagatgcgccactgcactccagcctgggcgacagagcaagactctgtctcaaataataataataataatgataataataaataaaaatagaattttggcagcctgtattatatctcacttgtttgcatttatataggagaagaaaatgccttctttattcaaagaaaggcttagagttacgttttttttcaattatttatctcagttcatattagctgaaatgacagatgagccacagaaaagcaataacactaaaattttttttgagatgggggtcacactatgttgcccaggctggtcttgagctcctcagctcaaagaatcctacgatttcagtctcccaaagtgctaggattacaggcatgagccactgcacctaaccataacaccaacattttaagggcactaaacactctttcttttttttaaataactatttaatgagcagatatatcctgttaagtgtattatatacattatcatatttaatctccacaaaatctaaaagctttttttcagacagggaaaccaaggcacagaggcaaaaagttacctaatagaactcatctagataaatgtcatagctgtgattattctggatgctaattttaattttcttttttatgtagattaagttatatgcataacttattatgaaaaatagttgaaagaaaataagtctttaatccttattctgagctcccaaagcactttatttcaacctgttttgaaccttattttctaccttgcatcattattatttgtacacttttcttacatccttgttagactttaaaattctccttagtaattattagtttcttgactttgttccttttaatgcactgtttttaatttaatagaagccattacttttttataactatgaaaattagggctattaagttgccttcactatgttctctagaattttgtaaagttagtaaaagagaaaacctcttctttataacctctacagagaaggtactagatctagtgtggcagaaaggatggaaggatggacggttggatgaatggatggatgaatggatggatggatggatggatggatggatggatgaatggatgaatatcagacataatggatgaatattagacataataaatcacatctcaactgattaagtcctctaggtataaataccaggtacaagaaataaatggcacaaaaaaggagtgagtgaaggaactgttatagatttaaagagacccaatagatacaccaaacaaatggaatgtgtgaacgttgtttgtatcctgtaaaatccttgatttgaacaagtgaactgtaaaagtatacttatgagacaaaggataattaatgagaatattgagagtccgttttaacttctaggtagaataaaagtgttgtgatttatatttttttgaagagtccttatctcatcgacatacattaaaatatttatggaggaaataagaagatgcctgagatttgctttaaaataattgttcatggcgggaggggtggagaataggaaaagatgaatgactttatattaataattgctgaagctgaatgatagctgtacattctcccttttttctctaggtgtttgtaattttctaaaatcagaagttaacatcaaaaaagtttttggcacataattggtatttctttaagttaacaatttcctttccttctcataaaacttaatcattaaatatgggcaacaggctttaaaagatgtgctccaccataaatgtctgtcatacttgctatgatgaacccatgagtatttaagacagcctatagaaaacttttgttctatccagtaataaaaaaaacccttgagcagcaacataaaatagaaatcttgatctttaaattgaattgtataatgagtaaatagaagctgaaaagtatattataaagtcactggctagtggatgcagcagattttttttctcattagtaaaatgctgtgcatggtacaagtgactgataatgtgagttgatctatgatatcccttataactcaaaaattcactgatatttcagatccactagcccaccatataaattcatcagaggatggcaattgtggcatgtgattaagcagcaagccaattgtgtgacatgttgacagtggcagtgcagtacgtactgctcccaagataaactttggcactctagtcagtagattttatttatattttcaaaagcttgtataaaacatgaaatagtcgagtgacttgtgaagcagtcaagatatcaacttcttccacatgaatgaaccaagacacacatttgtggagattctttgactgtctttagagaaagatgatatgccaatcatcccaacactaataagactatacaagaaatagtatatctatcaaaatagacacttatatagacttattttgtaggacattgtctcaagtctccagggcattatcctagagaaaaggcattatatccttagcttgggtagtatccaggacctgaaaaagtatatttaaattggtcttttaaaatatacgtaactttcctatggtgcaaaacgaggataatatcaattttgactcttattatttgtagtctttctttagaggtacctggtatacagaaatctctcacaacaccagctgcgttggtccagccttatgtagggaaggtatttccagtttttaagagaattcctaagttcaggctggcatgcaatttttactacataagaaaaattttatctaaacatgaacccaatctactgccctaattcatggtagtagaaaacatttcacacaaagagtaatatgctaactgaattagtcatctattacttcataacagattactttgaaacttagcagcttaaagcaacacacatctattttctgaagggttctgtgagtcaggagtctgggtaaaacttagcttcgagccttgcctcaggacatctcacaacatagcagtcaagcgtcatctagccaaggtgtcactctgtcacccaggctggagtgtagtggtacaaacatggctcactgcagactcgaactcccaggctttggtgatcctcccacctcagcctcctgaggagttgggactacaggcacctgccaccatgcctggctaatttttttgtgttttttgtagggacaggtttttgccatgttgaccaggttggtctcaaactcctgggctcaagcaatccacccacctcggcctcccaaaggagtgggattacaggcatgagccagtgcacccggcccacagtgtcttttaatctgatcatgaaagtggcatttcatcactgttgccatagtctattcattagaagccagtccagctcattctcaagaggagggattacacagggaggggtacgagtgccagaagctggagctctttagggatctacatactgccaactacactaatagtacattcaaacttcttgaaaaatgttacatgaaattagcagtatagtgatataaatagattcagatgctaatggaaggctattctgttgctcagatttttctctagttcattctgctccctcagttgggatggccttgctccattccatttgtccaaggtgcacaaatatctacctctctttgcaaactcaactcaagcatatggcctctatgagatggatctgacctctctgccttcatggtacccccataaggctctgctgcaggcttttcaatagcactttattgcacgtatcctcagtgtctttccattcagctaacagattgtaagcacgttaaagcaaggacaatcattagatactgttgcatgaatgaattatacattatatctcaattgctcttcaattctatgtacagtatactgaattatagtataatatactacgtatactatacttaattccatcttagatggggagtagggtctaaagtaagtagataaggtgagaactgcttagagtcaaaatcaaatggctcaacagagtggcttaacccaatgagatgcgtacccaagaaaagactctcaaaaccaacacactgatgacagagctagaaatgtatatccctcatcttactctcactctggagcttaactttattaagtggaatcgcttgcatcccaattctggagtccctcatagaattggctgaggtctcattgcagccacactgcagttcagctttgccctctgctcaattgcatttatctactgtctcatgcctgaataaaccttatgcacacaaatttctgcctcacagtctctttcaaaaaaaaaatccaatgtaaagatggcttcttgctctcaaacccaaatttcaaaagcctttttaaaatttcttcaccctcctgggtctcttcagtcctgtttctcactgtttctacctgttctactctcctacgctaaaaaagcaaaaaccccaagaaatgggcaggcactcactctttttaagggtgatttagagggaatagctgaggacaagctgggaaggaggcaaggctctaatctcttttctgttaataattgctgtttccgtcatagtactgcggtttgattaaaatgtattttatgaatggtgcatgattttttttctcaaaatgacagaatcagttacagatcccacacctgaactctcccatcactcagcatcccctatctggggggttctctgaagcacctgctagcgctacatgcttcttctccaatagccaggcagtacagtggcagtttattgggtgaaatgcctttttacaaaagacttctataattgcagtcaagtctatataagctgaaacaaattccagtttcttccttttattttatttatttatttatttatttatttatttatttatttatttattttttcctgacggagtcttgctctgtcgcccaggctggagtgcagtggcgccatctcggctcactgcaagctccgcctcccaggttcacgccattctcctgcctcagcctcccgagtagttgggactacaggcgcccgccaccatgcctagctaatttttttgtatttttagtagagacggggtttcactgtgttagccaggatggtctcgatctcctgactttgtgatccgcccgcctcggcctcccaaagtgctgggattacaggcatgagccaccacacccagcccaccttcttctatcacctcgataatttgaagaaagacctaatttaaacataagatacctacatgtcattttgcttgttttacagccactaggcagttagaaaagaaatcccaatcacatgtgtactccatctataaaaagttggtataaatatgatgtttaccttgttctcatatttcaaggaatttgttagttgcgctatatcctgctgtttctcatatttgtttactcctggttatggtaaattctttgcacatttgattatgggcacatgttaagcagggctgaatagtaggtgtatcggaattgggagtattcctgcagaaagggtttgtgttggcttccaccagtctcctcaaagttatcatcgatggggacacttaaatgttaatttcttggtgtgtgtgttggggtggggaggggattttcctttgaccacataagcgatgtaaatttgcatcccagactcaggcgagagaagaaccaagactaatgttttcaggagaatcaggcttgtttgtcttctactgagactaggtctcccctgtgccagtgggttgattttttttcctaatccgtatttcacagagtgtaagtccagtggtgtgctggtaaatgtttagcaaccaaccctttgaaaaagaaagtatgcatatatgtctaaacgtaggtttattataaatcttactgacccaaaggattatatagtacacctatgactactaataatataatgtaaaatactctatttgcagtttaatatagtcaattgattgtcatagaatgtattcgtggatgtaaaaggagacttttacccaactgagaataaggactaattattcagagcttgtgcctgcaagggagtcagccatcatcacttgtatttggcagactcaaagtcaggaagagcagagggagagctttataattaaaaaatggtggaaagcacaggaatgctccaattgaaagttgttggcaaggtgaagcgcaggcaggctaactagaagcaggacatcttacgtggtgagattggagagtgtattttggctttccctggttcctcctgagttgcaaacagagacaacaaaaaaaatagggaagccgaaagacattgaccaagttctgactgttttgggctgattgctgcagaggttgcagtttgacttcctggactgcatgttgcagaagttgtggatgagaattctgttgtcgtatatgatttgtccactgcccatttgtatattcagtcccacactttcactgattgttgctgaactcctgcatctgtagcctgtctgtggttgtaattgacaaatgaatgtagttccaacatgagtgtttgttgatatttttgtttttgttaatgggtagcaacaagatgttggaatttcatttgttcaccaatgatatcagtcactactgaattgcataatagatgtcaaaatactcgacgttttttcttttctactcacaatataactacagacatgctacacattaaagtgaatctgcattaataacaaaatttccatcattttcttaagtctatgcaatcaaaacaattagtgaagtcttgtagcatttgccgatctccacagtataatacttctatcatggccaatttctagctaccagtgtgtcattaatgaacatgaagttgggaagcaatgtgcaaaagaataatagcattatgttgtatttccgctatagagatacaattcacacagacaacctcaaaaacataggtagtggtaaaatgtaacaaataattaggaagtcataagttttgagcatttatgagtttatttttgtagacatgaggtcttgctatgttgcccaggctggtcttgaactcctgggctcaagcaatcctcctgccttggcctccaaaagtgctaagattacagacatgagccaccgctctcgccccaaactttatttttaatatgacttacttaattcaaaatttacctaattttaaataatgactctatttaacaacaagcttacaaaattcatgaaaatttaacaattggtataaacaagtggtataaggacacacagtttacatccataaataaatacttaatgcctcagtcttctgggttttgagaatttgagtatgaatttttattccactttgtacaggccaaggcctcatctattttcctagagaggctgttaaaaccccaaactcttgaatattagactatcaaccccaagctcatccattctgctgggcagctagggcatcagtctaagtgctggcttttagtttcaacttgggttttggctcctgtgtattttccttacttttttccagcttattacacatttaaatgagtgtttctaaaactctcatctagcacttctaagtgttttctcatggggaggttttaagatatctggtcacaatattgcctggaatgaaagggtcctgtcttgtgttagcactctctagaaatttctgaccttgaatctgactctgtataaaggagttttcctgactttcaaaactcagctttttaagacttgatagtaaccaagttcagtttattttatgcatgaaaacttgtggttcttcagtgattcttataatttttggccttcgagaggtatgctttgattgcaaaaaggagaactagtccttcctagatgtgccagctgtaagaagcatgccgttaagtgcagggttgcctgctggatgcttgatgtgtgagtcttcaatgtgtagatttcagaagatgtgtaaaggcaagacagtggcacattcttccaaactacagcatgaaagtgttggtccctaacttagaacattcacataaattcatgaaagaaaatgtgataaactgaagtaggacaaaccatccatcggaaaaaaaagagatgaatggtaatatttcattgacttctgatatagtcccataattataaagacaaacaagatgaaaacagagtttactatgaaaaacagttgatggatagatacgcaatatgcaacatgcaattttaaaatttatcaacatgaacagcaatatgttgacctaaaaaaaattcaggcaactgaattgaatgatgcctaatttcccaaagttgctgtgccatgtaaaacgctgtagaggagggagtacacatattaataaatacaatcaaagacatatatgggaattaacactgcttagcatcaagattgattccccgtacaaaagtggtttcttttttttcctcttcaacgcttttttttttcgccaccacaatcagaagtttctgttgcagtactgagttatttttatagattgtggaaaccttgataaattcttttgagaattagctgggtcttaaaagaatctctttgtttcagcagaaaatatagtctgagcacgtaagcctccgtgatagaagggcagatgctcctgtggctatttttcacttttcaatttcccttttgtttttcaatttaagtgacatacttaattttactaccctaattatttggcaatattattgtatcctgtgttgtaacttgcaggatactcttccaataataagaatatatttctcataaatttaaattaagaaacaataaagttactcatcagttacataattttaacttgtccagtccagaattaactttgtcttggagtggtaacaacagacacttttctccttaccaaaataaaaattttaactgtcaactgtgtattaaaagagccccccattaaatgattatattcctcctatcgtattttctccaattcaaatacatattcatgtagtataaatttcattttgtgcaggaatgacagccagttatgtcaggctagattgatttgattgatttgcttaacaaatgttttctttcagaagatccaattattcttgtaggccatcttggggaatgcacacttgttctacagcttgattcctagctgtggattcatttaatcatgtttcactataaattcatgaactgtagatagtggtgtccaggcaattttttcttaaattattaatagatacatccaatgttaggtatgggtttaaattgttgtccctgatacaaagtatgttttatagcagaaatatgattgaatgcataatttatttaaggtttagcaaagatgcaagacgtgttcctttccaaatgcaaacactctgaaagcactgctagataagtaaacactgtgctttaagagagagtgtgtgaggcaataaatgtcatccccaactcagataaacactaaaattatatttatgtgatgatggagatgtttttgtggcatctaagcacctttaaaacacagccaggattattgatgaatatgccctttacagttgctttggtttgcttgttttttgtttgctttgtagtgatctttgacagataaaattgtttttccattaatcccccttcattgcaatgtttttaaatccccatatgttctgatatttccaaaacagtgagttgagatataaaacttatctgaggagatgacagggctttcctcttcattttcaactgacatttgttattgattggatacttacctcttctcccaactttgggggtcttctgcgttgttgggaaccttctacatttccagtggcaaaggcactctccctggctcaaatttaacacctccaaattagtccttaatatttttcatttcaaaaaaatgtttgttttcttaatcaatgaaagatttcaataatattctgagaaattttcttagtgcctataacctacaatttagataatgaagcaatttatgactatccacttatgttctgctttgcctggcatagacaatgacatttctccttgcaggagtcaataggttttgtgttggttcatgctcatggtgatagtgagtttctgtgtgtgtgtttaattatggttgatagtccaataagaaataaccaagtgaatacagctttaatattcaagtggcataaaatctgagattttcaaggatccccaagttcacaataaatgtgtatattatacatgagaacagatcaacaaagctgaattgaaatggacatgttcacctttaacctgacttaatcattagtcacaggacatcccataccagcctggcagcttggtatatttgaactggtttccacaaaataaaaatgtctaagaaagtataatggaggttaccaggtggagggagagggcaatggggaattgttttcattattttttaaatttatgatttttaaaaaatttttttgaggctgggtctcattctgtcaaccaggctggagagcagtggtgcgatcatggctcactgcaacctccacctctgggctcccgtgatcctcccacctcagcctcccaagtagctgggactacgactgcataccaccacccccggctgatttttgtattttttgtagagccaggggttttgacatgttgcccaggctggtctccaactcctgagctcaagtggtccactcgccttggcctcccaaagtggactacagacatgagccgctgcacccagcctgctttttaatgggtacagagtttctgtctggatgatgaaatttgtctgaaaatattagaggtgatggtggcataacactgtgattgcacttaatgccattgaattgtacacctaagaatagttcaaatggcaaattttatgtcatatatattttaccacgataaaaattaaataaataagtagatgatacttaagtgtccagatttcactaaaaattgaagaacaacaacaaacaggaaataatgaaaacgttagaagcctaattgccaagactatgccttatttatgatagtaactggtgatatttatatctaacttttaggagaaagggtacctattactctatttcactgaaataataaacaagtataaaagctaaaggaatatgctattttttttccacctattaggcatctagagttataaaggatacctttttaagaattctacaggtccttctgaccggtatattcagacgtatagacctcaaaattactagtgatgaggatgataaattatgatacatttatgctaatcccacttgtccttaacagtcacaattgctccgtctgatcccttgtctcccagtattttccctaacctagcgattaagtgatgatagcagagggtcactctgttcactttgattcatctgcagacatctatattttcatgattctggctttatcgtggtttcatcatctgtgaccttctcttgcccttgacagagttggttgtgcattcacaaatgattctgaggctgggaaatttcttttttttttttattgtcaaagctcttaggtgctggacattcataaaggagaaaccacaagttctaaaaagcaatttgtgccttccatggtgactgggaagagttacatatcattcccttctgccctggcagacactgcactagacatttcccctctttagaagaatttgcccatcttggtagtctgagggagcaaaggatgaatttggaaaggtcatgttgttttttcaatctgtaacaaaaaatttcacaaataatattttgtcttgtattacatacaagatacagtcaagtaaaattttaaatgtaacttacatttctcaggaagattatttaggtagtaagatgtctatgttccttcatgcctccccactcctaaacagcctcttatcttcctggaaaactcttttcatctccagtaaaaggtgtcatgttacttcctgcttgatgccttcctcaccttgcccagatcagtttaatctgttcaacttaccaagcaagcttaattattattatgtgattttaggtctgttattctcttcagcttttggagccctctagagcaggtctgtggcctaactcaattttgccatcttcctcatcctatgccagtcattttttgtttcatttctccagtaagtcttttgttcttgaatgaatgaataaatgatgaatgaatgaatgaatgaatgcttaaacaaacaaaaaatatccagacctatacattttatttatttttctgtttctattttgctgataaccagtaatggctttggagtcagagaagggttcagttttaatttctatcaccttagaagcagtttcaccttggataaattacccaacccctctcagcctcagtttcttcatccgtatagtaatggttataataattatgacaaaaagaaggaagtcaggtgattaacgttaggtaataatctctctaataggaactgatagcagcagcaaaaatagacataagcaaaatcttgaattttttttataagagaactttcaccagagaaataacatccaggaagattcctggagatcattagaagcaaaggatgaaacagtggacatgtttcataggcattcttcaacctaaaataaatgggttgtgttttaaaggtttgtttctgagccgattgccttagagctcagaaatacattctttcatacaaacaacatgctagttgatggctctgttcttagcacagcctacaaagtgtaggtaccttagaatatgcactaaataaagaattaatagtaccatttcagttatcataccaacatttttctatagggcagtgtgttctgtgttcataatttaaacttctaggaacacaggaaacatctggaggaaggaagttagagaagaaaatttggcaatcaaacagatccagaagatagaacttattgaaatcaggtaacaaaatgaaaattaaatctaaaactaggcttttatacccattttcaagatgataatcaaaattaaccaaaaatctcaaaaatgaatctttagggaacatattacgtgggaaagaactgtatgaatattactgttaaatagaactaaattaaaatcctgagttgatatgtagaattccagaattgtgaaaaatgtatataacttcttgagttttaatttccttatatgaacatggaacaataatactggaaatagttgccaagaagaattataatgccctaggttattaggaatgtctttcttgtatcatttatcttttatttttgaactccagcattagcttgcattcaaacacttatatgtgatgtatacatttatgtatatatgtatgtatgtgtctgtatatatgtatgtgtctgtatatatgtatgtatatgtatgtgtgtataaatagtatatatagtatgtgtgtgagagtatatatattcacctgtatgtgtgtatatgtgtgtgtgtatgtgcgtgtgacgtgtgtgtgtgagatgtgggtgtgtatatatgtgtattgagatataggtatacacacacacacatatatatacgtatatatcacacatatatatacgtatatatatgtatatatatacatatatatatgtgtgatatatacgtgtatatatgtatatatatacacgtatatatatagtccttgaaaccgtttggctcaaaacacctctattatttagtttttttctttctacagaattctcaaactttccatatatttttcttaagctgcttcttgctccccttctcatcttgcccatgcttagatgctgtcagatcattcattttgctacagtttccattcattttgttgccttcactctgtctgtgccaccttccctcgtggtttttgattctcagaacttttgctgaggtgtcttcacttttcttttcttccatggtctccctaaaacccatctaccactgtgattgtttttctacttctattgaacattctcactttaaggttttatggagcatttaaactccttctttgtatgttccccttttgactcttcatattgtcatctttatcatcctgaatggttgcctcctactttccccttcagactggggttttcagtccatctttggtggaatatttggtctccacttatttcatttttattcattattgtcctggttctttgtgtagaattgcctctccataaataagccctgtttctccttttgtagaacagtttatttttctgtatttgtttctccacatcttgttcattctagcaactttctttttactcatttgacttttcttccaacatttgaaatcaaacatcaatttattttataagtatttcttttgaattgtcatgcaacattctaaactcaaatcataaagtcagagaattttagaggtagatagaaccataagtatcaccttggccagaccgtatgtattaccaaaaaggaaagtaactggaaaacatcttctcaatgcccagctcttaagtgttatcttccccttgcactccagtgaaactttaggttgagtcatattctgtattgattatcagttccacctgtataatattgtttttcttctattcaaaaatggactgatatagcatatatggttatctttaattgcagtaaattacacatcacataaaattcactgttttaaagtgtacaattcactgacatctggtgcctttatcatgttgagcaaccatcactattgtctaattccagaacatttttatcatcccaaaagaaagctctttgcccaagaagtcactccctagtcctccctcacccctacctcctggaaaccgccattctgctttctgtctctaagcatgacctattctagatctttcttctaaatggaatcatgtaatatgtggcctattttatctggcttctttcaacacatatagttttataatctgctatttacaacttgctatgtatggttatataatctgaaaacatagcaaaagtgtatatatattataaaagttttgaaaaatattcttctgcatacacagtgcctttatttttatttatttttatttttgacaaggtctcatctgttatgcaggctggagtgtagtggcacaatcttagctccatgcaacctctgtcttccaggctcaagcgatcctcctgactcagcctcttgagtagctgagagtaaattagtgtgcaccaccacaactagctattttttgtagagacaggtttcaccatgtggcccaggctcacaatgcctttttatattcccaagttttacatgctttgtttttacccatgctagtactgtgacctttttcctacaactcaaacaactttcctgatgttgagtttaattcatagagcacacagagaagcatgtcccagttgtcctgtggaacacttgcatgcctgtcacagacctgcctgggaagctcccagcagacactcagtcccacttgacaaagattcttcattcattctggtttttgtcctgcagtctctaagtaaatataagatgtagactgatatgaagctctccaaaactcctcacttaccccaggtttagtaactctatgtatgtccacaaccaaaggccatctcctttaatatccaccaccttctagcatagtgggaacaaagagacttgtcacacttatgttcttgagttgtccccataacaaccactttatttctccatcttggttgcctcttccctccaccagtgacatctgcccacttttgcagacctctgccttaaagtcctgcaccactgtcctctttaacagtggagaaaggccccttctgtgccattgaccaagggatgaatggtggcaggtcacacttctttttatccctgcccttccttttatcgtattttttgttacttcaccaccacatcttttgatatcttcttgccagtgaagtgcagaaggaagttggttatttggacataactcttgaatgaacatgcacacacacacacacacacacacacacacacacacacacacacacctgccaaacacaaatttgttaattttcagtaataatacagtctaggtctatatgaaggaagcaaactttccccaaatgcattatcatctgcagagagcaccagcttcaaagaaaacagagttcaatattcattattatgcagattgatatcaatcacacatgctcattaacaaacaacaaagtttaccttctgccaccaagagtgtgcccagaagaccacctacatgaaaaacagagtcatctactcattgcttttctgcccttagcacaaaatcacatttctaggcaacactatactactttttgcgagcagaagatgattatgggagcatctcctacacaagcaagagctgttcacaggaatgctgagatgctggaggaggctattctagtaacatgttctttggattcatccctattttaattaacaatcagagtcctcacaatattatttcgggtagggtaactgttttactcttgcaaagcaataaaccttactttaacagaatttaacagatatctctttaaaaaactgctttaatgtttttaccttctatcttctttttctccagctttatcctgacagagaagttagcactaattaatctattttctcttccccctcttttttcccttgtgtgtgtcttttctgccttcatctaccccagtgaatttgttcagcattttggctcactcatttcttcagctaactacagcttactactacagccaccactactagagccactcctgtctcatcctggatggttgacagagatgaaaacatcttgctaaagcaaatatacagctcccctttcactggctctccagtcctcctgctgtctttgcttgacctcctgcaactgctataataccccaccctttttcttctctcactctctccactgtggccctgatagcttctttcaaacttgcaaacacagttgtcagactcttgtgacaattctgcaagcaaggtacatagtacataatacataatacttaatgattatcttttatcttggtggattactgattgaaaagattgggcttgagaaccctggcttcctacttccaaatatgattctttttctttcctgttgcttacaaaatggtgatatttatcatgtcaaagttaaaactactcagactgtgttaccacagaaattcacattaaatacaaaccatgactacttgtttccctgggccaaaagtcaggaaggattttctccaaaacaaaattgtggaatatttgaggattagtatgtgcaggcacagcctgctctttccactttcgccccaatcctaaatggagatgacaccatcaattaatcaaacaacacatatttattcagcacataccctgcactaaatggaattaaagccaaaagagccacatttttcaaatgatgtgaagggcaaaaatatctctgtgttcaaccgggcatgtttgttttaaacagatggctaggcacccacttctatttatctgcatttcattgactttctttccaaatgcatactctgcagccacagcctcctttggaaattttccttattttaaaatggttacagaaaatccttacaccactttgttcttttcagaatgactcgtctagaatctagataaaaacagccgcgaacaggagataacttgaaaactattgtacaaattactgtcttttctttcaaggaatatctattgatatggtattcccaaattagcccaggatctaaacccatttgcaggcagcctgtgaaggacaaaatgtctgggccctcaagcattaagtattgtaaatgggatgagaacagtgtgtcctcagtgttattgccctagtacataactatttagctagcttattatatgatctgtaatagtaaatagtcataaactatttactatttaaatattaatagaaataaactacttttatgctgccctctgatgcttttattgttatttttaatttccagttatattttagatatagggggtacacgtacaggcttgttacatgggtgtattatatgcagttcatgagcgtagtatcaaataagtagtttttgaacccatgctcccttcctgtcatccccctccactagtcggcagtgaccattgttcccgtaattatgtccatgtgtgcccaatgtttagctccctcttataagtgagaacatgaggtatttggctttctgttcctgcattagttggcttaggattatgggctccagctccatccatgttgctgcaaaggacactatctcattctttttcatgacttcatagtattccatggtatatatgtaccacagtttctttattcagtttgccattgatgggcatctaggttgatttgatgtctttgctcttgtgatagtatggtaatgaacatatgagtgcaatatgtttttggaattatgatctattttcctttgagtatatacacagtcatgaaattggtatgtcaaatagcagctctgttttatgttctttgagaaatctccaaactgctttccacaggggttgaactaatttacattcccagcagcagtgtataagcattcccttatctgtgcagcctcaattatatttgagtttttaataatagccattttgaccagtgtgggatggcatctcattgtggttttgatttgcatttctctgacaattagtgatgatgaccatttttccatatgtttgttggctgcttgcatgtcttctttcgaaaagtgtctgttcatgtcctttgcctaatttttaatagggttatttgattttttcgtgttaatttgtttaagttccttatagagtctagatgttagacctttgtctgatgcatgctttgcaaatattttctcccattctgtagggtgtctgtttactctattgatagtttctctggctatgcagaagctctttaatttagttagatcttacttgtcaatatttgtttttgttgcaattgctttgggggactagtcaaaaattctttgccaaagaagaatattttctaggttttcttctaagatttttatagtttcaggtcttacatttaaatctttgatctatctcgagtgaatttttgtatatggtgaaaggtaagaatccagtttttgtacattgctagccagttatcccagaaccatctattgagtagggagtccttttcccattgctcgtttctgttggccttgtcaatcatcagatggttataaatgtttggctttatttctgagttttctattctgttccattggtctatatgtctgtttttaccagtatcagctgttttgttcactatatagccttatagtatagttcaaagttgaatagtgtggtgcctctggctttgttctttttgcttggggttgctttggctatttgggctcttttttggttccaaattaattttagaatttttttctaattctgtaaagaatcatgttggtaattttatatttaatctgtaaattgttttgggcactaaggccattttcatgatattgattctttctatccatgagcatggaatgtttttccatgtatttgtgttgtctcagatttccgtgttatcattctctttgtagaaatctttcacttcttcggttagctgtatttcaaagtaattcagtttcttcgtggctattgtaaatgggattgtgttcttgattttattctcagcctgggcattattggtatatagaaatgctactgacttttgtacattgattttgtattctgaaatcttactgaaattatttatcagttctagtagcctttcgacagcacctttaaggttttctaggtataaaatcatattgtcagccaaaaaatataatttgactacttttttttcctagttgtatgatttttttttttttttcccttgaggctgagactcactctgtctctcaggctggagtgcagtggtgtgatctcggctcactgcaacctccgcctcccgagttcaagcgattctcctgcctcagcctcccaagtagctgggattacaggcatgcgccaccacacccggctaatttttgtatttttggtagagatgtggtttcaccatgttaaccaggctggtctcaagctcctcacctcaggtgatctgcctgtcttggcctcccagtgtgctgggattacagatgtgagccaccatgcccagcctatttgtatgatttttattgtttcttcttacccaattgctctgggaagcacttctactactatgtcgaacagaagtggcgcataaataaactactgagctaatttattatctgatctaatattcagaaataaatgctcctacctttggattcctttaatggataaatctatctctagaccctcttagtttatgctaactcaccttagttgagtaggtggcctgtcactaccctgatggactacatctcaggggtcagccagaatccttcttaggagccaggcactattctaattattttataggtattaactcatttactcttcacaataaccctatgatccagtcttatctttattttagaaatgacgaaactaaagcatacaaattttaagtaaactgctcaagatcacgcagctagtaagtgtcaaagctggggtttaattccagataatccaatttcctttctgcctctaaaaagccttgtgtgttacagatttagttgttgcctttcttattttatctagcctcatgagggaaagaactggtaatctccctcaccctcaggcacgtttctctgtagactccacatcttctcaggaggtagtgaaaaggtgggaaaaataaattactgatctcttcaacttcgagcaacacgtccttcttgctggtatttcctcaagctgtagatggtgggctttctcctcttgcgggctcctgtggtcctagtctttctagagaagaactatattaatatggtagatggtcatggatgaaatacaaaccaaaacgtttttacatattgagcacttaattactgatttgagcaagtcttccaggataggtttgactcactgatctatatcattccctggaatcctgcccataacccatcacagtcacggatctccgtaggcggtagtgtgttttgcagttgcagaaaacctctcaattccttcaaatacaccacagtcagaaagtcctatgacttaggacttagttctctgctaaaatgttcataggatggaagatggaagaagcatgacagaagggagttaccagagagttggagtaggggcaggaatgaatgcaacaaaaatggcagccagggtgctgaggtgtataaggttctcttgtagcctgccactccttgggggagcatctctaaacatttaaaagtactaaaacacttcacacattggatcccaagtttttttccatctcatttggttttcttcagtagccttagactcctaggtctctgtgatgctgaagccactgctgtattcatgtggattatttgacatcatgcagaaaaatataaccagtttattgctggaatttttttttttttctttttttttttttttgagacagagtcttgctctgtcgcccaggctagagtgcagtggcgcaatctcgactcactgcaagctccgcctcccaggttcatgccattctcctgcctcagcctcccgagtagctgggactacaggcacccgccaccacgtccggctaatttttttgtattttttagtagaggcggggtttcaccgtgttagccaggatggtctggatctcctgacctcgtgatccgcctgccttggcctcccaaagtgctgggattacaggcgtgagccaccgcacttggcctattgctggaatttttaatcttcccaactggttggttgttttggcatcctgttgggtgtcactagatgccatttaaaacagattacttaaatctaaattttaagaggaaatttagaatctgaaatgagaacctataaataatctcttgagtcttaactggctggccaaacaataaaataaacctataataaaattctgcacatgaggcaactaatctctaaatttaaataacagttgcatttacctccagccaggtgtttggaaagtaaataatgcgaagcagtgattgagataaaatatggctttacatgaaaaatcagtatttccaccttcctctttttatattcaagttaaaagtagcccattgaacttttaaaagttgaaatatatttccaaaagaaaaaagattcattatttattgttatattgttgacataccagagtaacacagaatagcttttgaaatgcatagaccatcacaattccttttagtgatgaagggaaacattagcatgctttgatttggccatgatgtcccagacattgtttgtcattagcttagtaaatggtttaaagatagaggaaatgatgaacttctactaaaatttcagaggagacttgaaagtttagtttgattgcagtgcagccaacttcatatgttttagtgctattttaagttgaaatttctcccctcctttttttttaacaataaatgtaaatagcagagattttaggcaattgccaaggtgtttatttgttcagttagccatttctactaaaatctttgagccgtcctagcctcacctagcttgaagctaatattaacagcatctgtagttcgttgctgttcaagactcaactattcctgaggctgttcaccaaacatgttacataaatcattcctagtcctcacaacagcccattcaggtcgatattatcatctccatttaacaattaaagaaacaagttcaggaaagttaagatcacacggctggtgagtatttgaaccatattgcttacctgataaaatgtagtccattactataagtcccccacaacatggttgtaaattccatttcacctaaaatagtagcagggctgacagtccaacttcagcaaagttcctgcataacatatttcatcttgaataagtaatggcatctttttaacccttaagcatttgataaggttcttttgttgaaattaattattgataagaatggtcgcatgaaaggatacagaaagagagatgttgtgaaagttaccccagatcatttaatttagtaacagtagttagcaaaaaatatatatatattttttttctttctctaacctggattctctcttgttcatactactcccagttcctaacccagtgccccacattctaagcagccttgaaatatctgccgaaagactgaatacagaaacgaataagtgcatgaaggaataaacacataaataaacaacaatacttatataggtgttagttattcttaaagttctattatttggtgacatggattaacatgtcctttgaaatttgaatccaggtggtaaaacctagaataacaagctagtctattatacagatgctgtttctgtcaccccaagaaatactataaagtggcttcaatgtattattataaattaaatatgatcgcttttttgctctttggacagaaaatgactaaaagatgaaagtgtgtaagcacacacagtggtgtctgataaacctttgttggattgagtggaatatttcacagcaatggcaataggtacttgtaaccaaactctcaaatattgtgtgacagttgttctgattagctctatctcaccattaatatttattgaagcaaaatccatcatggagaattcataataccttttgcatctgaaatttaatggcatatttttatgtgaagcataccagtctcctaagctgtgtagcatttttttatattctttactttctgcttaggtattacttttataattgaataattggctattttttcttgtagatttgttcccaatcctctagattttccaagatcactatgagtattattaagtaaacaaaatcatgaaccatggagaaaagtgcttttagaaaagggttttcatggtcttgatgagctttattttttttttctgcaatggccacacatattttagctactgaacaaaatctgcaaataaactcttttactcatttgtgattactgaataaaatagaagtgtacaatgatataggctctgatgggaaaattttgtaaacaccaggtggagaggacacagaggtgatgcaaacatcttccacattttcaaatgtcagctgttctcaagagaggaagcttaaataaacatcatttatagtcttagcagatgttatcgatacgtaacactttaattgtagttttccaatatcagtgctgttaataacagttcagaaaagatctgaagtgctttgattttaatcagtggtcatttaaaaaatagctgtgctaaatggcgtatgtttgtctttaaatcatctccgttagacagatggtatctttggaattgttgtgacatttcattgttgctggtgactgatgactcattgtaggaaaatccttgtgtacacaatacgtgaaaataagattgtttggtgttctttcctacagctaattttcaaacagaatttcaacagatgtgacaattttaccaagatgttgtcaaaataagagcaacccactgacaaatgaaatctggctcatgttcagccctttggtaccattctggtttgttccaagtatcaggagactttgtatcaatgtcagccctgataacttgatcatttcagatggcacactgtcaattttttcatcctttctaatgactcactttgcaatcgagatgcaacacttcctggtttttcttttcctccacctccccccactcatgtattaccaaagaaacaatgcttgtaactgatctttagttgtttggaaataaaatgagatcatctactagaaagacttttagaggtcatggagaaagatgatccatgatgaaggaactcacagggtcctaaggaatttcaggtttagctgtgaatgttagattgataaccttgcatagtgaaaaaggtaactcctatgacaattcagtcattgcttccttgactaacgtggtggtactaaccctgggaaaatgaggtccacacataatgatatcatgcattagtttaagtgtaaaaaaaggccgtaaaaggagcccattattatcaatggcaactggatgagcaatactgttaaaatactgggttttattacagtgagctgacacaacagaatattcagaatcacttaaagtagcccagcacaaaaccctttaatgatgtatcatcccctaggagggctaatcaaaaacagataaaagaggggagacaataatatttgtgcacagtaaatcctattttaaaagaataatgggatcaaggtgtaactttgtttttaagaagtgggtagtgcgtatagtaaaatgtaactgtgttttctctgaatagcgtattttattcctgaccagtcttccagaagtatccagagggcaaaagtgtgactgaaagcaatacagtgaaaattctgttgtttctcctatttctgaagtgactggcgttgttatcatactgcattattcacctactagaaagagaaaatagcccaaagttttccatttccattatggctccagtaattctcattctgttccgctgacttctacatgggaataaaaaatgttgtagcattctacacattgcagaaaatagcttacactcaaagcccttatcaagagaagaaagttttaatactattgctaccatataaaaagagacagcagtcatttaaaaagatagttttcatttcatgtttaataattatctccttaattattatgtttttgtaaatatataaagttagtaagtatttgggaaacactatgagtttgttttttttttttttttttttttttttagcaagggaagtttggtagttaaaaataaccacgattgggaggctgatgcgggcagatcacacggtcaggagattgagaccatcctggctaacacggtgaaaccccctctctactaaaaatacaaaaaattagccgggcatggtggcagacgcctgtagtcccagctactcgggaggctgaggcaggagaatggcatgaacccgggaggtggagctttcagtgagccgagattgcgccactgcattccagcctgggtgacagagcaagactccatctcaaataaataaataaataaataaccacgaatactttgcaattcattcggtcaagaggaggagactgtttctccctcttttatttgggttgaccttgtaccttgctttgaccagcaggatatggtagatgtgatgccatgggacttctgagctgaggacttgagagagcttgtagcttctttctgtctcaccctcttaaaacttggtcaccaagaggtaaactgaactagcctgctggagaggccagtggagaagaactgaggtgtcctcactgccagtccgttatctgccagatatgtgtagacagcctatttagaacattgagcccttgtcaagccaccagatgacagcagcctcttaggtcacctcagaggagaccagcagaaaaactgaccagctgagcccagccaaaatcaccaactcctggaattatgaatgaataagggatgactgtttgcagccactacgttttgtgacaatattttaggcaggaaaatattctgaaaaagtagagtgaaaaatcagatccagcctggccagccctcttcccgcagcccagcacatctatcagcccaatatctcctgccatgaccacaggccagttatgaaaggaaagaccaccatgatcctctgacataaactctgtgctgtcacgtctcctggggaaaattattccactgaggtcatagactgagttaaattacaagctgagggatctcctcctggggcacctttgcttgtatgatccaccttaatgtcaaatgattctatcctttttagtgtcactggctgcaggcaggcaaacctgcttactcaaatcaacttgacataataggaataagaatgtaaccattgtgcagcaagccagtgacagaacagatcctcaaagaattgagtgggtcctcatctcctgcacttgcctaaaacaatataaaagagtgagccaaggtatatgtgtgtgaatgtatatttcctttacagggtagacttttcttttgcttcatatgggctaccagacctctgcttttgagcacacctctgttgggtaactcacttatgcttttgatcttctgtgtatactttgctgtgtttgtttggtggaccaagagctaacaaaagtataagcaactttagcccagcccaagtcaccaacttggacagtctttcttgcctaacctagaacagatattaaattatttaggagaaaatgagactttactatcagttttgtttgtttccttcatttttttttttttttttttgagatgtggtctcactgtcgcccaggctgaagtacagtggcatgatcatggctcattgcagcctcaacctcctggactcaagcaatcctccctcctcagcctcccaagtagctgggactacagtcacatgccactacacctggctaattttttaaaaatatttttgcagtgatggggtcttgctatgttgcccaggctcatctcaaactcctaggctaaagtaattctcctgcctagacctttcaaagtgctgagactacgggcatgagccactgcacccgacatgtttcattatttttttaaagtttagactgaaggtgatgtcatagatttaaacagtctctccctaaccaaaatttggatggtaaggcagaagaaagcatgagaaagggaaacttgagggaaggtctccaaatacagaaaaggatgatgatgaaaagtattcacacatgtggtggttttgctacttttttctccatttcatttacgcaagcatttgctgagcaactgcagtgtgacagtcactttgctgggtgctaaggggactgagatgtgtaaagtgtgacattttcagtcagaagtttataatccactggtgaagacagacagtacaaatgaatagttataattcagtgctacatatactatgattaaagtatttgccacgatgtacaaaagtagtagtttcaattttgaataatgagagaacagacacaacctctaaaaactgtactgtttcccagcaccaaatatgcttacatattggaaatgatttgtttgccattcctacatgctcatatttgcttaaaaagactgaaaatgctgtgtatctctttttatttaccatcctcaagcacaagtagaaactcaataaatatttgtgattcctggtgcaacaaatgtttctgcttcccctcacctgcctgagttatgcacctgtaaaacatctttctgcggttcattctgcactgtgcctgtcattgtttggacctaggaagacttctacctgattataaccaagtgagatatgacaaatatttaaggaaaattctagagaaatcacttaatgcattaaattgatttttcagaaaaataatgaatggtatgtgttctaaattttcttactctctttaccaacgagaatgcattgtaagctctcagaacatagatatcagaacttattactacctcagagactacacacattgtaaccctttaaaaactgttggcaaattggactgaatagatcttctgtaaacataatctaataggtaatcccgtgggcattgactcagtaaaattaaatgtcaccttttaaggcctttctagaaatgcttatgaacatatgagtaaaaataaaaaattaggagtgctcattttaagataaaatttgtaactgaatgttttcctttaattcccttgaactcagatcttagaaaaaaacttcaatataaggcgtagctttactttctggtgtacttagtaaaatgctcattgttagaagaaatgaaaggatgtagccaattgatatggaagagagagtgggccttcaagagtgcagggcattaataaaaccaaaaatacttagaaaataattgcttaatacatttaaaatttaattttaaagaaaaatataaagtgtggatgattaaaggtctttaaaattttaaacttctgtagctttatccaaaggcatttctataatcacttaattctgtttctaagtaattggctaacacaattagcttaaaaaacagtttttaatattcacaaatcagttcacttgtattatactcatttttttctttaatggaatgcattctgttaatataagacaatattcagagtgtgctttcttatttgtagcaaaatcctgttctgaagaagcacatgtttggtacaagccacctgaaatcaaagacttagagaaaagtcacttttaatccaattaaaatagccatacactttcatatcctttttaaataaaatttcaaattaaaaacctttataggtttccttagactggctgtggaatacataaaggtgattccattagatcctattctaatgaactgggattatggaaatttccacagatctcttcttagtcacatttaataggaaatatatattacatacatatttatggaaataacaaattagagtttaatgtatgctgtactgtcaaggatcaatatagaattatttggaatgacatggaaactaagaggcttgagaaatttttgatgctagatgttggtataatatttgatttagttttccccagtctctcaatatttctagattccacaaagatccaggcatctcctgaagataacagtttcttactaggcaaaaacccttgggatgccttgatgctaaacatttagaagatgctcagaagcatgaataatcatctagcaccaaccgaagagataataaaaatgtgatacacactgtggtcatcttcccagctatgttctacttctccccagtgttatggcagcttagtagtttaaaagggattgatatcaactgtggtttgatactgattgtactggttgtatcagcaaaacccattcagttcagcatagaaaaatacagagagatgtgatggggctttagaaaaagattcccatttgtcctgcagtgagagccactagaagagaccctcactatccctggaagtagagaaggaaacctaggatcccaactgtgcttagcatcttgtagaaaacttaggatgaagtgtatgccagggatgcctaagcagacagagaaaatgcatccagttccttggcgatatcactgagctgcaaacccaagcaaccatgaagctatccttaccccttcacctccctgttactctttgctccattttgcagttgaaggcctcctggctaataccattaacaaactaagacttttttttttacactgtttaagattgaggtaagatatacatataaaatatactatctttaccatttttagtgtatacttcaatggtcataaatacatttacatccatttttttttccttcatccctccctcccctctattcttcctggcctctggtagccaccattctactctctatcctcatgagatccacctttttagctcccacatgtgaatgagagcatgtggtatttggcttcctgtgcctggcttatttcacttaacataatggcctccagttccatccacgttgcgcaaatgacaggatttcatttcttatggctaaatagtattccattgtgtatgtgtaccacacatcaccaggtgtgattatgttcattctccaggtgaggttaagggacttactgaaattctgtgtggtctatggccataccatgctgaatgtgccctatcttatctgaagttgtctatagtgatgaaaccacatgttgcagaacaatttaaaaaataaaaatcttaagagccttcttaatatttattcttttcgatttttccatagagtgtgtgcctaaattaaatctctaggaatgataataaagtagtgatccttacagcagggctattttgtagtctgtatactcataattaacctgtcacgaaaaaaatttggggtgccataaatcagctctactagaggaatgagtatgcatagacaaacaaaacctgacaaacaaaaattgagaagtagcattttcatcccatgaggaaattttaaaagaaggctgtagatagggagcagtaattgagagttgctcactggaagaagtgctttttctgttcttcctgaggtggccaactgcatctaagatggaattatgcttttactgtttatgtttttccctacacttatacctctgtcctagcagagcattctcagctgggccggaagacccttccatgcccactgttgctgctgctggaagtctaagattaaatgagtaaggagacatccaatgatatgacactgtgttagaccatggaacctccggtcactcatgtttatcaccccattaattaggtgctaattgcaaaagctccttaaatgtagctttctgccttgctcagtgccctgacaacctgatcttaggatgaaactcgcatcaacaccaatgcctcagagaaacaggcctaatatttgtaatgttcaagttacagagtttagcctcaaaggaaagatgtgcagaagcttaagtttttatagcagggttaatgccctcattatatattcaacatgctttaaaaaagacaagatacaatgtggcaaaattatctttcctacaaggacttgcattttgatagttatctattaatgttatccagaataagtcgtgtaatttcaaaacaatatgctactcaaaagcaaattagatttctcataaggcaacttctttgaaaacatttttgctatttcaataataaattattctacactgaggatcagtttcatgaggacattcaattttaataaatcaagtatttctgcctgatttagttcaaaacaaattatttcattttcttaaagccaaggcactaactcttttactttacatgactcagacatggctgaacacattacagaaatcttctaaaataattcattattgaatatgtaatttattggtaaaataactagagaatacttatattctctatataataggaatgtgaaagaagtaactgtgtatggtgaactttggaagtttcttttaccaatccaaaatattttattttccctgaaaaaccatagtctaagctcaggcaaataaattgaaaataaaattttgaaatacaagttgtttgaaatatggggattgccagtaatcttgttacagtcaatacatattgctgaatgccatcaaaaaattaattgatcatggtttatattttgctcttggaacaaaaggaagctctcccacattggtgataaaaatccattgaaaatacatctgttgactatagatcaatgtgatgctacagactgtcttttcctttaaggaaagtgtaacttaagatggataattactgcaactcagaaggataaaacacatgtagccagtgtggcttttggcttttcctcagcaagcttgcccttagtgacaggattgcagaagagagaagctagaaataagaaaggccagagccagaggaaacgacagaactgtgggactgctccttccctccaaccccaaggaatgatcaccagctctaatgaccatgccccaaatttcttatctttgattttgacagctaagatgacttgacaaagctaggctcacgctgggcaggaggagtatccagcgtcaggctagtggcagaagctcagcctggttgcatgaccctgatgtgcaggacagatccatcccttaggcagagaaggctgacaaaatcagacaggatgtctggagtccagcctggactgtagaaccctggtcttggcctacaaatgaagccacaaaggcttggtccaatcacataggttaagcaaatgaagcctggcagcaaaatggtaaacactccccaagcacacttcactttggattggcaagatttgtttgctatccgctatcaaatggctgagctgctcactaaaactgatttattggctcagggtaaagcctggtagattaaagtcttcagtgactgacattgagcaatcctaagaaaaagaatagggatcgacagcccttgcatatatagatttttcatttgggattatttagtttctttggggatgctatgtatgtccctagagatctttataaatagaatactcattagtaagacatgaataaggggaaatcaatcatttctggagatgttttgcatcctaaggtgctttcaggttccccccactcccaccatgtagacttttccattgctctctgttggaatctgcaagtcttcatgaggtaatgtctctaagagcacgaatccagagtagacagttactgtgagttctctcttctactttttgaagctactgaaggcctatgtttagaaaataaaaatagattttaagagtttgtgtcctactgcatcattttccttctaagttagagaatgctattggaaatcttgtgatgagccaagaaaggataataggccccttcaccccaatgagatgcaaattccaggtgcttggctggaaccattcactagctaaaggactctcccaaaaagccttgcatttgtatctcagcaaaatggaaaatttctgtagaccatcaaacatggtgtctgtctctctctttctctctctctctctgtctctctgtctctctctctctctctgtctttctctctctctctctccctctctgtctctctctctctctccctctctcagttaaatcttctaagtggaagtcctcaatgtcaagagtccactgcactacaggtgtaccttgcttaatgacagggataccttctgagaatgtgtcattaggtgattttgtccttgtgtaaacatcgtagagtgtatttacacaaacctagatggtatagcctactacacacctaggctatgtggtataacctattgctctttggctacaaacctgtgcagcatgtgactgtgctgaatagagtaggcatttgtaacacagtggtacttatgtatctaaacatacctaaacttcaaaggtacagtaaaaatatggtgttaaaatcttatgggatcaccataatatatgcagtccatcattgaccaaaacgtccttaggctgcacatgaacgtatttccattatcacatttggtctgcaatttgattaaactgcttccaagtgacaacagggttagaactttctagtcttaataatcagatgccctttgatacagttaattaagccaaaaaaaggcatgatctcttatctaactatgatttctataaaaaaataagagagtgagagaagggtttttgttttgtggtgagacaacaaagcatagccatcatagaataaaatgtttaaaataacgtgtttattaaaacgtttgatgaaaatggtaatatctctaaagatttgagtgcctttctcaccaatatttaccctgtttcagttattttataccaaagtttcttaactgagaacataaaagatcaacttttagagagatgatcgattctcccatccaaaactacagatgcatgttttactgagaaggtcctatagttttttacgaggttctcaaaggggtacatgatctaaaaaagacagagaactagattttaaatgactctcctgccttgtctgcccctccttgcagaagtagtttcagacagagtagtacgtttctttcaactcaactctccctgaaactttttaggcgtctaggtcaggtttgttgcttggccctggagtattctagctttcagaggagcttttcttctaattgcttaaacatcgttttctactttagctccaaggtccttggcaggctggtggttacccaagagaagtgtaactttccccagtgccttcttttggcaggttcccctgccccaacacacagacagtttctctgaattcctggtaatatacaagtgttacacaggcagcatgatgccttgagaatttttggtccgtaggcattgttagtttcattaacatttattctaaggtctttctgtgattaaaaaataatacccatttattacctgctacaaaaaacttggaatacagagaaaaggtcaaaataatataactgttatccagaaatgcagaaatgatgatttttaaggttttttcttttcataatatcttacacctactataatgttatgtacacttccagaatgtattcacttagtatctatagttacacattctaatgtcaatgatgatctatgtaacaaatcttaataattaagttttaaagaaaacataaaatacctaggtggcactgtataaagttttatcctcagtatggaacttgggctattttattttttaatagaaaagataaacaacctcctgtaattaataggacgtttgattttctttcttgaatagaggtatatttttactcagtaatacataactttcttaaaggaaaactatggctgaataagatgcatggaaatgtttccttttaatccatttccttatttttttttgtcacatcctatttggaatcgaaactattattagacatttactatattctaaggaattcacatgcatttttctcctttattttatacaaaatcatgtgatgtaggcactgcttttatcctcactttatagaagaagaaactaaggcttaggggaaatagcttatccaaggtcagaaagccaggatgcagagccaggcatgtccagttctctaacttggaagctcatgctcttacctacaatgctagtgattcccaaagtatggtccctggaccagcagcttcagcattgcctgggaattggtagaaatgaaaactctcctggacatgttgaattggaatggggcccagctatcattactttaacaagtccaccagttgtctctgatgcatgcaagactatgaggatcacttctttctaatagattgcctccaaattttaaaaggtaactgatacaaaaatttttttaatctatattttttaaaaagaaattatgttaaactcttgccaaaggaatattacgttagggttttattgcttaatctttcagaattttactttggggatttcttgagttttatgcattagagatcataataattgaagtgaaattgaggggtggagcatggtgagtgagtgctgggagcatttccgtactttcttcaagttattcatgaatgatgagctgggttatgattcaagtcaacagatgactacaaaacagatgctgttatgcaaatcagacttgctgattggcaataagagaaacaaaaattattttttaaacaggtccaatttttagacatatttttcaaataaatgagttttttattgaaaaatgcagcaacttcacaatcttagttctgttgacccaatgcggtttttgttccccaagacctgctatcctgatcctggtgtatatgtttcatttttcccctttactctgcatgtgactactgatgaggagagacccatacatttagaatgccatttacatatttctcaagtccaggacattttggtgttaaatgtattagattttttaaaacgtaggtgtgattaggtgtaatttaatataaatatggccagctttagtgtccctgggtagccaaaatgcaattttttaaattagtatttgaaagggaaggcctcctgtagccatcataatcgtattttcactgtatttttattcctttccagatctgactgtcttaaaatttaattactattagcaagacctttatgggaagaatagaaatattcttgtaatagtgttagcatattaaatgtaattttcaggtgatcctcctaggattccagcactcctccattgagccaatttagctgccttttttctgccctgacagttcacatgcatccaactcagaaatatattctttctatgtctcctctgatgctgttagaactttgttgccctagtatattagtgttcattcatttgtgatgaaactgtcaaatctgatatgcattttaatgctgttcatatgaataatactaaacatactaattatagcccttctatgtcttaaagtagacttattggtttgttgttgtttatttatctttaaactctgttaatcatttttaattcaattgaggaggttttgaaaaagaaatcaaacattgctagataagaacataaaagaaaaatacacatttttgcctaaaaccaaggacaaatgactaaagaattaatacgaggacctaaaaaagtgtaattgtgaccaaattttaaaagaaatgtataaagggatgttacagctgcggtctgaagaaatttgagagatcgcttcttaatctgcagtcacttgtctgggacaacgtagcagacaagagactgcaatttaagaagcgatctctcaaatttcttcttgctgtgactagaagctcatggcaccccctcccttggtgggccatctcagttctggtaggagcagctgattctcattggctcaagtactcttaggcagcttgtggcacttctgacaggagaaggacagccacctgcaggcttttgcttgccccaagaggttatttgtcagcctgtaggctcctaattacttagaattaacatatccatatttctatgcttggtcttgattggaacgtttattccctaaatcagaaacagcataagaatataaacaagtcgtacttcacattttaattatctctaatagcatttcttcttttttcttgtaacaaatatagagcattctgttaaattataataagtgatgacggctcctagcctgcagttggtgggatataaatttccacttctgaaaactgacacccatggatttcaatagagctaagtgcatggcttttgtgctcagggttcaaattgttttcattattcagtttttagcctttccttaaaagtgaacctgcacccaaaacttgctcactgctaactcaggactagaccaccttttcattccattattttaaaaacatgacagtaaataatccaagggttcaaattcattgctgcatttggtttcctgtcagagaaagaaacagagagacaatcaaatgggtttcattgccagattatagaatcagctaatgaattttcaattatcattgcatttatgctttattatttaaatgttcagaagtgtgtgctgttattccaagccaaattggttttctatgatttgccaagatgacaaggggtgtgtgtgtgtgtgtgtgtgtgtgtgtgtgtgtgtgtgtgtgtgtgtgtggtgtgtctttatttgtggttatttcattatatgtgctgatttttttccttttgattcataacagaacttgttggagagagccaatacatgatattagcagatttactgtaaaaacctcttgaggttaatgatttgtggttcagaatggaagggaaattcatggctagacatatgcacatccttactgccttctgcttcagcctgactttctcagcattggtacatatctttgtcctacctaaggactgctgctatttctttgacttgtagacaattccctgaaattgcaataggataagtactaaaaagaaagtccatagctgtgaaaaagaagcattacaaaatatacacaatttactatttgctttctccctgggtaattagtgaaatagaaggaaagtaaagaatgcagagctttgattactgtctaaaatatcttatgctgaagagaaatcgccatagagttgctttcagatgaccttgacacagacagactattctggattatccaagtggactcagtgtaaccacaagagtccttaaaaatggaagaagatggtcgacaagaaggtcagatggtgttatgtgagaaaaacttcaccagctttatttggttttgaagatggaggaagtggccatcagccaaggaatgcaggcagcttctagaagctgaaaaaacaatgaagcagattctcccctaaagcctccagagaggaatgcagctctgccgacaccttggttttagcccagtgagatctgtgttggacttcttatctccagatgagatagataatgaatttgttttgttttatgccactgaaaaatgaatagccgaggttttatatattcaggaagaacaccagaacttgttcattctaaataaggagaggacatattaagtggatttattttccattttagtagttctcaatacagaattttaaaacacagtctccaaatataaccaatactgagataggaatatgtacaggaagatatacaaatgtatgaatatatgcatctacatctacagatacatattatacacatgcatacacacatatacacatatatacatacatattgtgtttcttcttcttagtcaatttctactcttcctccaataccatcttaggtctcatccttcaatgtgaggtttttttcatgattctagtctacaaggtccacttccttctctcaactgaggtttttcctataacctcaaataattcataatctctcctacaaaggtaagacttatttatttaaaatgcagctgaaatcactttgtatgtttaatttctacatattactgactccctcaccagatcataagcactttgaatacatgaactaatatttcatttctttattttgaatggttatagtcaatacagtgccctatgaataatggtgtttaatactgacaccatattgatgagaagatggacaaacttcctttgtgaaccacgagataaatctagaatactactaaagatatagaatgttataggaagtgcccaaaacatactagcattgaaattgcagataaatgaatgacaattctgggacaacactatccaatagaactttctgagatgagggaaatattatgtatctacactctccaatatggtactcaccagccacatgtagctgttgagcatggggtgtgactgaatttattactttaatatgtctaagtataaatagccacatttggctggtggcctccatattggacagcacaaagacacttcttttgtgtgtgtgtgtgtgtgtgtgtgtgtgtgtgtgtgtttgtgtgtgtttttttgtgtgtgtgtgttttttttaattttttttttattatactttgattagtagactactctttgagttctaagggctagtgtaataaaggattagggtcatttttccactttcctgatgcttttttttaattcctggcgcactgtattaataatggtagagcaatgctacccagagtggtctataattcagaccatgcaaggaattgtttgttactagtccatgacaaattaagtacagaaattgaaagtaagcatttagaagacttacagccgcttgatattgacatagcattcaaatgtggagtcagtgaactcaacgcattaaacaaggcactttgaatattattaaacctgcacagtatcatctggcatatagcagtagggccaaatattggtccttggaaaatcagaaaattttaatagctgcctcgtataggacagctacagatagtttaaaaagtccatgtatagagaactagaaatcagaggccaaaattatagcctattcaccataaatcagccaagttgtatagaccagacctttcagaaagatacgactcaaaaatacaagcactcttataaactataaactccagccttctcaatttgcaaattaaaaaaacaagtactaagaagatgtgacatactcagctacttacatcagagcttgaagaactttccttctagctctcaggcaacctctttttccactatgctaaatggatttggaccaagagagatcttacgattccctcccacaacaaatggaaatctgagaatattactacaacacttccataaaatccaccatacagtcagcttgtgcctgtaccaactgaggcttttctcccctttttaatgggttgtcacatgatgaatttaaaagaaaatcaatgcaaacaaggtatccacatggctcagtgcatatggaaaaatgaatcaatgaaaaccacccttatactaaacttttagatttgaacaaggtattgattagttttctttgttttgctgagccataaaaggatgcttcatattttgatttctgtctttgaagtgttcctagatagtaggcaaaaaatggtaataaactgttaacagcttaggacttcctaaaaggagcccagaaagaatccagccaagcagtattctctgcattggaaatagggcagggcttagtattgaatgtgtaagggatggcattggcactctagctagatcctctttataagcaggtgctttcgattcccagccacacctttctctgaaagattgccttgggccacaggagctatctggcataagaagttatgcctcttttccttctcctgtctccaggaggtgggggcattcagctgccaagaatggactgatcaggagtttcagatctcctgtgtcttttgtgtgtttggatatgggggtacaaatgtctggcccctttgcccagaggcaggatttactgtgtggtgctctggagctcctctttataggataaggctgaaaccatatctgtgctggccccatcccttccctttttctgcttcctctcacttgcttacagatttctcctaagagcacaccctcaataaatcacttgcacaagaatccccatctcagagcactgtttttagagaatgtgaccaacaacagtgtatgccaactgaagacattaaaaagctattttctattacctcaaatattttgtcctctggcttgattcaaattcagaataatatttaattatcttattattcaaaaagagaaaactaagagatatctgaatttttttatgcctttgaaaagactcttgtctcctaagtttggactccttattatcgttgatcactgatttcagagcaaaacttctgctctattatagaacatgtagctatttctgagtttgtgttaattgctatttcttatctgatgagcccattgtaaaagttttttcgcaagaacttaagaaatttcaagtacataaataatttcttatgcaaatacaaaatacctcatatttttaaatctatggaaagttttaatatgttatttagtgaaagagttaatcaaatgtttgccctttggggccatgtgagggagcctgctttattaatttatgataaataaaaatttgtatgaaataacaaataagaaaatataattttcaattttatattcaaatcatatcagtggctcagaaaatggaatttattaggaagaaatcctatcgctctttgcataattttctggtgctgaaacatgagaaaaatctggctgctcattactatatcctggtttaacattgctttcaaatgctcattcaccaacctaagcttttttctttcctgtatctctgtggagttctcataaaatatgcacttaagctaatgtaaaaataatgcattcttccattatgctccaaatcatttcacagtgtcatgtgtttgttaataaattcagttgtcagtcatctcctttggtagctatttccattagagatttagctaccatttagtggtggtggagtcactaaaattccaatcactatcttcaacaatgttttatttctctttattttattcatccatgtgacccaatttcttatttcatcaagaaatatctaataaatgatgtctttttttcttctatttcttcctgaaatcataatagcactgcagaaccccttctttatttgcagaattcccagaataaaattctgtggaatggtcacttggggtaaataccactgaacaagaaattttctatggcgttgaacaagagcagaatcatttgtgatcatttttaactttcatcctgtgctgatggggcctatggtcttctaaaagctaaacagaacaagactttccaacagagaaaatatgaaatatacattttgtggatgataaaacaaatatttattgttagtcaacgtgattcaaaaaatgcagtctctacattcaaatggatcaaatcagaaaagagaagacaaaaagacataagcaatcctaatacaatgtgattagtcccagatgtctggacaagactctctggaagcagagaggtgaggaaaacttgcccatttgctgtttggaagagaccgagggaaaggtcacagaagattactagttgaagtggtttgtatacttgtattgaaaagggcagttttaaagataccgaccctacattatttaattcccacatctatccttacactacttaggtatctctctgtcaagaatcaatcttgttcgaattttttatttctctatcctaactacttctcttccatatccaccaacttactaaggattaggtaaaatctactactgacaggaaagccaaaaataacaatggcttaaatgagatggaacagattttctcagctggtgggtcataaaatgaactgttaatcagaatctgtaacactagtttttccgtcagcatcacctctcctgccaaatggtattgagttgggtttgtacaaagacagtcctttctgtttctagggtcagactgcagctctacttcccatagctatactcaaaagattataagatgggccattcagaatgtttatacttatatctgggaaatccaattcctactgaagtctaaagagatctgtgtcagctctaggtgctctcttttgatgggctggatttggcaaatgtacattctagtctgggctgaggctggagtttttgtcgttgaaaaggaaataaaatcttctgccttttgcaaactttgaccagaattcatgaaggaataaatatatatttataagcaatgattacgcattagctgatgttcagaaaattaagagaagagaaagactttcacacaaaagaaaagcttgtgcaagacctgaaccttgagaatgtacatgttaatcatagtaaatgcaaattcccagtgcaaagagcaaaaatcaactttgggcaatattggttacagtaaatatgaatgtttttctcctgatcaccaaactggatcgtatataaaatgtagttgatgctgagggttgataactgagttatcagctttctggtatgttggagaaatcatgcatttagaacataacactgagtttattaaattcatcgtgttttttttttaattactttttagagatggggtcttactctgttggtcaagctggagtgcaatggtgctgtcacagctcactgcagcctccaactcctgggctcaagcaatcctcccacatcatcctcttgagtagctgagactacaggcataaccccactcctactttaagtttgcagtttaattagtagcaaaggcattcatagacccttaaaattataaaacgatatacagttgttaaacaagaaaaaggagagatagacagacagacagagaactattcaaaactccaaacttccaatattgaacatctctggatgtttgtggatactgtaagtttttcatatttttgttaaaaaaaaaaaaagcaaacatcactaacaaggaagatagtcccaaagagttctggactgattagaaatccagagagtagctgattcttgcctcatatgaactagaacaagtttgaggaactaacaaataaaattttttcctgaaatcacatgcttgtttttccataagacaacaattaaagaaaaaaattgaaaagaaaaaaatggtaatttgcatcattcttttggaattttgaggaacattgaatttatttatttatttatttatttttgctaaagagttattagaagacactgtccattttttcaaacaccagaggctcctgcagctcaaaattatgctgacctcctctggctcccaggattctgcttgatcttagctgtcctgttttgattcagtagctcccagaataatcccaaatgcacatcatcacagggctctgaaagctccataattaatgaggaggtgggtgctatttttctttctctacatgttttgacattattctgggcattgtttgatgcatgaaggaggctttacgtaaatagtaaaaaagctgttttagttttactgtcactcagtttttatccctgtaataaaacagtaatgcagaatgaatggctcaaaactgaaatgaaatgaagatggcaaagtaaaatagtatcccaaaagttagaaaattaattcatttggtatgatgtaattattaaataaattttacagaagcttctctttgcagtgaagaaatagtcaaattcaaatgtatcataggactttccttagatgacacataaagatgtatgtgccaaaagtatgatctatgtaagtgaagactctgagcagagaaattaaaacatgtagctttcatttttgttaaagaatcttcaaagagaatttcactgaagctagttggatgtagtaacataggggaaaaagtatttctaaattgcatctacatgtgcaaactaaaaggcatacttaggaatcatctgtacaaactaaagcaaaaaatataaaggtttcatctttgtgtcattatctgaacatataaatatttttaatgggaggaagctatcttagataactggctctgaattcatttgaataattatatatagtttaaataagggtttcttcatttgaataaccaaactaacaataagtgaatcaaaacaaaatgtatttttcttatgtaaactaagccctgcagtgaacagcatggggctgatgtggtagctctgtaatcagtgtaacccaggctctttcttactgctctgctatcctgtaatgtgactacctatgggcccaaggtatttgagtgagcctgaccatcacatctttccagccagaagtaaaaaaagaggccagggccaggcgcaggggctcacgcttgtaatcccagcactttgggaggccgaggtgactggatcatgaggtcaagagatcgagaccatcctggccaaccaacatggtgaaaccccgtctctactaaaaatgcaaaaattagctgggcgtaatggtgcacacctgtaatcccagctacttgagaggctgaggcaggaaggttgcttgaacccaggaggtagaggttgcagtgagccgagatcacaccactgcactccagcccgggcaacagagcaagactccgtctcaaaagaaaagaaaaggaaagagaaaagaaagagggcaacaaagcgacaccacctagctctacaaaaatttaaacaaacaaacaaacaaaaaaaccaaaaaactaaaaaaagggtgtgtgatgacacatacctatagtctcagctactcaggaggatgaggtgggaggatccattgagcccaggaattccaggccacagtgggccataattgtgccactgcactccatcctaggtgacaaagcaagacctggccaaaaaaaaaaaaaaaaaaaaaaaattaaaaaacggagattgcccttacctttaaatgcacttcccagaaactgcatactcgctttctgcttgtattgaatctggaatgcagacagccatgccaggctatagaaatatggtctctattctgagcagcccagggctaaactaaaaaatcggggcttctgttaccaagaaagaatggggttagaaagtgaggacaaccggttctctatgtctcagttactgttgtttctttttcaccagttgtgacattttcccccttttatgcaaatgactgaaggttttttagtttgatgaataataataatattttttgttaccggatagacacagatcctcatagggtaaagacatgaattgattccattactcaaccccaagtttcattttcaaaaacaaaaatttaaatgttgtgtgacatagtttgagccataatattctttctgtcttttatttacttatacctagaattttatcagaatttaatgcacgtaacaacctctttgactttcaaagttactcactctatttgcttattcttttatttatcatttaatgacatttactaaatttgagacactctgttagacattcaactctgtgatcttacagatagttcaccaaatgcatttcaaggccaatgaaggatattaacaaaaattaaggcttgtgtgataatttcattggaaagtttcatctgaacaaagatgaagcagggtcaatgcaacccttagggttgttatgcagaagataagaaataaagaaaaagaggaaaaaacattgcagatatttgggtaactttgaaataacaggagttcagatgtatttcagaataggaccaagagaagaaaagtaaagactgtgtatattatacatatccattatctacttgcataaacaactattacactttgaatattttccctcttactataatattggaaccaatgaattgtggagaaatataaagaagagtatgaagaataaaatgatcactattcaccattctctcacccaggagaaaaccactaactactgttaatattttattatgtgttattttagtattttacattcatttacagttgtgcacattttggggagttaatattttacatgctattttgcaagtcaactattctttttgcaaattactttctgtcaagtaacatgagaaaattctcaaaatatagtactgatatttttgtcttacaaagcattacttaatgattgcataatattttacatgtgtccatttcataatttatccagttccatgttggagaaactgggtatcattgtgtctagaatgcatgatgacatttttactttaagtaattttaaatctaacttaaccttcagtttttttcatttgtgaagtcgactaatacgctctctcatgagaatgtgataaagatcaaaagcagtgcctaattcatagtaaagactcaatatctacgaacatatttctttggacataagaatatttctatttttatgttatcctaaacaactcgttggaccagaacattgttggaacatggtgaaaactttcattgtgttcaattatgcatccatgcattcattcctttattcaaggaatatttattaagcatgtatttgtttgccagataattttaaattttacagtaagcctcttatgcacttaataagaaacagttattaaagttttgactaaaatttttaactgcaattataataatgtcaactagtcaaataaatgttatttaacacatccagtaaagattctatgaaaggatcagattctagaaaatgtaaaataattttaaatttgactgtgactatgaaaatattctttctacagatatttcctaatattcaaattcttgttttgatcatttagatgacataagtgtcactttcctatgtgtgtcagggcaaaatgcagtggagtaaaagtgtcactttcaaagctatttctatacaatcatagtgctttggagcttagacactgtgaccccccttcttttactcttcctaatcatctgtttgaaagctctgtcaagagaaaggaatcaatatagtacatttattctttgctttattattactgttttttgcataaagagataggttccttggaaaatctgcaaatatctgatcagatctccagggtagaatgtttaataatgaataaaatgacctcagggtggaggtttcatctacaaagggtcaactgcctccttgcctcttgtcctgctcccttgcctaacctgttccacactgcagaggggtctttctgaatttcacatccctccatgactctctttggaggatctgcatctactccttcttcactgtctctcttgctgattccaaaatgtgactcggcctcagaattaccacgggtagtttttaaagacacagatcctcaagctcctgccagaaacattgaatcacaatcatcatgtttggggcttgggaattgttatttctaaaaagttttctaggtgattttgatgtggtccaaagacttacatttggaaagttttgggctattgtcagggtctgtgaagccatcccccttcctccccatggcctgaaatctgcctcctccttcttcatctgttgctatccccagaccctttgtgccagccacatgccagccttagtaatgaaaaatggcacttctgcagtgtacctttcggataggacttctgctatatagagaagcactatataagttaatatacttaatgcattacgttaaatgattcttataatctattttggctaggatagcaaagtagcctaaacagctaggaggctgggaaatccaagatcaaggtgccagcacattgtgtctggtgaagtctttcttccattttaatagatgggttctcttttctgtgttctcatatggcggaagggggagcaagctatctctggggtctcttttacaagggcactaatcccactcatgagatccccaccctcatgacctaattgtctcccaaacgctctacctcctaatattaagaccatcaaattgaagattaggttttaacatggggattacgggggacacaaacattcaacctgtagcaataacatgtatacaatgtgttagaatcatgtctgacatatagggaaacatataaagaatgttaatgctaaaatatgttaaaggtaaaaataaattgatagagatggacagaaagatagatagatacatagatacacagatacaaagatagatacatagataggtagatcaataatacatgtattatttcagttaatcctcacataaaccctgtgaagtacataccattattttccccattttttagagtaggaaactaaaatgcttttcatacaattggaaaaaaaagtgtaatccaatgctggatatttgtaattccttaaatgtggtaatgccttctgttacctgggtgataaaggtgagaaattcatgtgatgccttctctcctctaactccctgacaagtgtccttctatgtagtcccttttcacacctcataggttgtacatgtctgttttatctgtcagaatgacccataggattatatatttcttgagtgcagggaccatgtgttattggtaaatgcattgccagagcctatactgaatctgatacagggtttgtgttgagtaattgttacataataaaaggagcaactactctgaaaaccaccgctgctcacctgctggtaattcgaatctcaggcatagaacctcaagaagaactcatgatcagagcaagaagattctccagcactagcctcagccattcacagtgactttctagaacacagtttttaaaaggattctaagataaagtctgggctcagtgccgaaaaactttcacccacctcacctatggtgtggagatagggggagatgaagatatacgtgctatgctgccatcaagcagcaataatgtcagactggaatttcaattatttcagacagagcaacctatggtgatcattaaattgaagactggtcgttctttaggctgtatttataaggaggcttggttaaagtagaatccaagactctgatttagtcaagctttctttgatatttggtgccagtcctaaatgaagtggaatttgaagaatgaaaatacaaagagtcagttttccacagaactaaactttatatatgtatatatgtgtgtgtgtatatatatatacacacatatatatatatgtatatatatatattcttttctttgtataaaatatgtaaagaaataatgtggaaaagtacaggtataaataaatgtaaagcacacctttgaaaggcacacacatgaaatgaatttttatatcatggaaatgtacatttttggtttaaaatatataagaaaaatgcaatgacactgttattgacaaaatatgataatattttatcatcttaatgttttatgctcaaatgaattctagcactcatttcattaaataagaacaaatttggattatgttattcagatcaaaacataattctaccctcatgacattgaaaggacagtaatgtctgccttttttttttaatttactttgttctctgcccttcatgtgcagtgaaatttgatatttacacaggagcaaagaaagaaaagtgctgttttttgatgaaacactgtgactttcagggcctgcatgtgtgtgaattaggccaagcttttagggactcatctaggataatatctcatgaggataaaatgtacagttgggagaaaaacataggatgtgaaattttgtgtaatgtcacaggaggtactatttgcatatcgttcaaaagtggagatgtggcctatggtaacatcttgtcagtaaagaaaccacagttgggctgggtacagtggctcacacctgtagcccctgcactttgggaggctgaggtaggagaattgcttgaggccaagaaatccagacaagcctgggcaacatagcaagacccatctctacaacaattttttttttttttttaattagccaagcatgatggtgcatgcctgttcctagctacttgggaagctgaggcatgaggattcctcgagcccatgagtttgaggctacagtaagctataatcatgccactgcattccagcctcagtgatagagcaagaccctgtcaaaagaaaaagagggagaaaagaaagaaagaaagggagaggggagagagagagaaaggaaaaaaaagcgggagggaggaggaaggaaggaaggaaggaaagaaggaaggaaggaaggaaggaaggaagttagttctcagtgcgtgaacatttgttatattttactgatatttttaaaagcttattacttcattgatttttttttcttctctactaaaatcagaatggacacaatagaaagatgaacacatatagttgtgcattctcatctgactggctaagcatccttaagaactcaatatagaacagtgaaaaattccaaatcactatcacatttcagaataaaagggaatcatatgatgaaattattagaaaatattttaagtttattcactcagttaatttaagaaatattgcttaggaagaaaaatagacattattctcctgctctcttctagaacaagtaactctagaatacaaagtttattatgtatgaggtcactgtactttatttctaatatccttaactattaataaaacatcataatcattgttttctctaccacactattttatcctttgtttgagagtagatgttcaacagataaattattttacaactttatgaagcttcttccaattgtatatcaacaaatttttccttccttttgaattccaagcatgtcttcttaatttctattcacaattgacttataggaagttccataaagtatttttatgccattctgtagtggtagtcatgttttaggggctgcttccaaggatatgaggtgattgtcaaggtacacaactgtagccatcagagcacttttcaacacacaggaaatagtaaagaaggaagggaagggtgattactgagatgtgttctcaagttctgtcaagtgaaattgcttggataaatcaccattacccatcacctacaggataatggatgtcttagtatgtgtaatgatataacatcactctttataaacattaaacttagaattgacatgttttttaatttcataagtctgaagattttaaaaacattctctctgtacataagtcctagaactagctttgtgtatttccataaaactatatatacatacatgtggcatatacataaacatatatataatacatcatatttatatagtttatatagacatctttatggtatatttacacatatacccctcttatacatacatagtttacataatttatatatgtatagtttatatgtgtgtatatatgtttttatgaatagattcatatgtaaatgtatttttagtttacagagatatgtgtgtatatatatatatatatatgtgggtgtgggtgtgtgtgttatatatgtttgtttttataggtcctgctttatatcaacatacttctttttatgttttatttttgtatttaagataatgttaattattaaaatcacaatctactgtataaacaaggtgagaaagaatgtaccttttcagtgaaatagaagggtagagctggttccttcacatagaagtatagcttgtttgattaggtcaatttaattgtgtactttattatagaggcagggcttttatataactttacataacattctacttttggttctatatccaccaaagcaattagagaagtttgttgatttaatatcctaacagaatattttccttgcttttattttagaccaatggttgcactcaaggttaattcaaggtatcaggaaggtgtgactgtgacaatgtttagtgatgacaggggcaaatcaatgcaagatcagtggcctggatattgattattatcatgagatcttggtgagatgaagtcattatttaattagacttttagttatactaatacatgattctcagaatagactgtccttagctctgatgttggcagttccatcatcacttataaatttaaaaggacggtgtatagaaaatttagagaaatgttagaatagacacataggaaaattataagtgctaggcttcattttctgtgcaaggaacacaagtagtttgtctctaaactcatcatttctcagatctccttagttaatattagcaggcctcattgagaattctataaaattatcatgaagatgatcacatctgatttctttttgacggaaactacttagtaaagttaactttggttttggagcaatttcaataagcccttagagctaggaaatggtagttgattagattttttccttactcatagctttcaaatgctaagtctgaaaactaataatgaaatttctcacctgcattatggcaaaggaaacacgtcctctatatatgtacaactacttttgccatgtaaatagatgtatttgcatcctattcttttgtcgtatctattttttaaagtaattaaaagcaattctaattcatgagcattctttctttctttttttttttttttgaaatggagtcttgctctgtcgcccaggctgagagcgcggtggcacagtctcagctcactgcaacctccgcctcctgggttcaagtgattctcctgcctcagcctcctgagtagctggaattacaggcatgcaccaccacaccccggtaatttttttgtatttttagtagaaacggtgtttcaccatgttggccaaactggtgccaaactcctgacctcaaatgatccacccgcctcagcctcccaaagtgctgagattacaggcatgagccagtgcacccagactcttattttttcaaaataagctattttctcctttactcatgaagtataaaaataaacatctcatctactgaaatttctggttcaaatttcatttgcttctaaatcactattcatatgcattctgtgaattagtgctatgaaaatttagttggacacgtatttctaaaataattcctactgtccttaaatccaatttagccattacatgattactatggttttatgagggaaaatttcttttggctaagttggcaacattttaaaaataacacattgtacaaaaaagtacaggaaaaccccatactgtatgtgggaatatttatattttcctgaatactgagtaaatccaaaggagataagccactttattttgtttcccagatatcaaatgatgtgttctttattttaattaaaaggccacagcagcctactacagtgaaaacaaaatacttacgtttattacaagttattgaaaaactgaagaaagcttttattttaagaattctcatgggagagaagatttttcaagttaatataaataaattataattttttcacagaatgatgcaagaatcacacttctgttttcctgtttacaaatttaaaatttccatttaagtaagggcatgaatccaatctatgtaactctttattcttggtaaggtttattgctataccataacctcttgctctgggaatagcattacatctataggaatatattacctttacaaaattacaatattgcctcatagttttaatctcaactaattaatttaatatttctgaatagatttagttcttcagaaattataacattgtggattggttatttgttcctatagagcacatttttggttttgccctaatagttcaattcccatttcttttcccaaaaccaggttaggaattattgctcattgcttattctaaaagaaactttgattctgttttccttctttctttaaggcagaggagatggaaattaggatatgttccattaacagccccacaagccaggaaagcatgagtgaaagtgttagtgctgtgactgaagatagtggttctgtaaggctgactctagtgttctctattgcttgtctttgagtttaaagaagagagtttttcccatttgtttagctgttttttgtttccctaatctgtgctacacgttcatagttttggtacaatatccagtacgatttttaaatgggcacacttattcatttatttcttcatctaataaacttttatcaaacatataccgtgagtcagtttctacactgtatgctgagaattcatagtctgtgcccaggcaaaccttatgttttagtggttctgtagggtaggtctacttttgcaaaaggtaaataagctgtgggctttcagcagaaatatcttctatatacctgtttttgcctgatttcagtttgttagaacatgaggttgatataatttttacttattttttaaagtattgccatgatacacaaaatcatggcccctgcatacctttcctgttttgtcactgtataacatttttcacatagcaccctgtacttcaactattttattttattttattttattttattttattttatttttttgagactgagtctcgctgtgtcgcccaggctggagtgcagtggcacaacctcagctcagtacaacttctgcctcctgggttcaagcaattctcctggcacagcctcccaagtagctgggattgcaggtgtgcaccaccacacccaggtaatttttgtatttttagtagatacagcattttgccatgttgtccaggctggtctcgatctcctaacctcaagtgatccgtccaccttggcctcccaaagtgctggaataacaggcaagagccaccgcacccaaccacaactattcttaatcacttgcattttccatcaagttctgttgcctcagatcatctgacctttcccatacgtgtaatatggttaacctggtatatgttaatatcaagttgttaaattgttctaggtactagtgaacttaaacttcagtaatggtatcagaaacttatcaaataatcatacaaatatattttcaattatagttacataatgatggcataagaattcaaaatatttttctctgaaacaaattttataaagataccttctgaatattattcataaacctcataaaaattaccttgacaatagcactggggataggaaatgaatgtttttcttgggattcataattctaccctaacagaacaaatcttaagtaaaaattgcccctttggaaacctagtgtttgcctatattgtagtcatccccagaaaagatgagtgaaaaagcaaatgaatgtgttccattatgtcgagatatcctaagaaaacttacattgtttccagaagatagttaaggaataattttagttttataagttccaataatagtaattttaatcaatacattgaaattatcacttgttatttttctgcagttatttcctggaaccatttttatttgaaatctgacacctttccacaatccctttgaagatgtagtacacaagtgaatagtttaccattaaaactgtaatttcctttaaaaatttttggaatagtataatggtgattgtgtaattaaaatttcaaggtgcacaaagagcctactacagaaaacacgctaaggctgaattatgaatacaggcccctttgggaaaagcttctgatcgtttcagctacttcattgtgtggtttgagtatttgctctgcagaaaatatcattcctttatgtcacacactgtctttgagattatcagacttggtttcaataaaacttttcgagtgatgtaatggccttcctttgtaggcaagtacagtgacattctaacattgaggcttcgagtccttaggtgcatggaccggggagaatatttttcttggtggttagtgctttcttgtctccactcacctctactttttcaaaacatttaatagttgaaaaaagcaaactgctctgcttattaactaaaaccactccaggtcacagtaggaagccaatgttatagaccaaataacatttcaaaattctgcaaagtccatggcaactggtctgagaggacaacttaaaataataaaagagcattcaaagactatgagctcatttggaagtatgcttttgctcttgaaattgcatttgtttttctatgatatttatttaggtggaagttcgtaggcttgtcacttttcacaaaaatagttatacatatagaattgggattataggacatctaaattagaagaaaataacctggtttctgatcttgggcttggccactaagttttgaatgaaatcatctatctgttggtgaagcacaattacctcatgagtgaaataatggaattgtcttagagatgtggtgttcaaactgtgatcaacagacacctacttcttagcagaggatcaaggtcaagtagcttcataagggaactgcaaattcctacacccgtgttatcctgaacttctccgtgtttcctctttttaaaaagttctctttttaagtaacatcttttaccagtaggttttgatgaatgaatgaataagtgaatgaatgaatgtttttattggctcttaaatgccataggagacatcactttgagctacatctgtgcctttcacgtacaaaaaagcctagagtatatttgctactctcctattttatgtattaaaatcaaccaagttcttctctttggtaggattactagaagaaattggactttcttctaagcatcttaccccattggctatgcatcgactttacccaattagtcccaacataaaataatgacttggtcaggggaaactgagggctgctctgctcttcgtgtccagagccctaaggctatggtagaagacctcctctccaaaccaaaagaagaagagtctttacctcttttcttgtccattatcacatcagcataaaaagacataatatgtgtgtgtgtgtgtgtgtgtgtgtgcatgcacgcttgtgtataaaacctaggaaactaccaagattgcaataattttgataaaggaagatggaggcagtatctttgctttttagcaatatagtagtgaagaaagaggtgataattaaaaggagttgttgtagatatttccatgtttgctttacacaaggtaaatgttccataaatgttgctgataaatgacagattctaaatgaggagactgcaagggtcctgctgcattagcaacaagtgaagttaaacgtaagggaaaatcaagagaatcagcgttgagacatggttacaatgatgagtccttcccttccttatctcccaaatttccatctcaagttctgtgttagactttaacatacttcctagccatgttgatttcaggtgtgaccacatgacttgctctagtcaatgactgtgagtaatgtggccacaaatgttgaagagaaatcgaaagcacttatttatagagttttccgatttctgtagtgcaaatcatcttgaaacgatgtgatgtcactgaacttggaatttaaaagagatatgcagtagcatgctattgcatattatttccatcatacagatacaacagatgtaaataaccttaagaccatagatgacaataaaatatagtaaactaagagttggtgggttttaagtattcatttttaatgaaatttccttgattgtaagtttatataatttaatttttattaatggccatctttaaccacttgctcatcaaatttataaacattcaacattggttcttgcaaaccaatatgcacaaaactcaagcacaccactaattaagcagaaagaagcccagttccttctagcaaaagctttaaggtaaagcttattgttctccatgccttctttacttccctctgctatcatagctgaattgttccagaaagaagctgttactgtcagatgtggtctcagagtggggatagaatggaacagattgagagctagaaataaaactttttgttgtaagtcaatgaaattttgaggtcaatagttactattgtataactctagctagactgagtaaaaactctaacttataagatttttaaaaaattaattaatttttaattgaaaaaaattgtatacattatatacagcatgatgttttgaaatatatatgtgtgtatatatatataatggaatggctaaatcaagctaattaacatatgcattacctcacatacctatctttttttgtggtaagaacacttaaaatctactcagtgattttcaagaatattattaactatagtcactatgttgtataatagatctcgtgaacttattcgtcctatctcacagaaattttgtatccttcaaccaatacttcctcaactcccaacactgctggtaaccatcattctactttctgcttctatgagtttgaattttttttattatagtttaagttctggggtacatgtgcagaatgtgcagttttgttacttaggtatacacgtgccatggtggtttgttgcccccatcaaccccgtcacctacattaggtatttctccaaatgctatccctcccctagctccccagccctcgacaggccctggtgtgtgatgttcccctccctgtgtccatgtgttctctttgttaaactcccatttatgagtgaggacatgcagtgtttggttttctgttcttatgatagtttgctgagaatggtggtttccagcttcatccatgtacctgtaaaggacatgaactcatcttttttatggctgcatagtattccatggtgcatatgtgccacattttctttacccagtctatcattgatgggcatttggattggttccaagtcttcgctagtgtgaatagtgccacaataaacatacgtgtgcacatgtctttatagtagaatgatttcatacataagtgagatcaccggtattagtcttttgtgcctgggttatttcacttaccagtgttctccagattcatccctgttgttgcaaatggcaggattttctactttttaaagactgaatagtattccattgtgtcgaccacattttttgttcatcagttgatggacacttaggttgatttcatatcttggctattgcaaataatatgggagtacagacatctcttataagatatttttaatcaccataattcctctgatagagggattctgttagagattttcctacaaggttgagtaagtcagatgtcctggggtctgagaaaataaataacaaaaccaaacatttatacattattggcatatattgaaagcgaggcaatgaagtttcattttctcacaaatgactcatcaatttgattttttcctcatttggcaatttgtcccaaattccaatttatacttggttcacaaagaatttgggaacctgcaaatactggtggtgctttagagtacttgctctgcaatgattttgcgtggatattttatacttccctgtgtctgtgcttttccttgtttgtttctcttcttctggaataccctgtcagacatccctatctttgtggctcctactcactcttccctgaaaccccaactagacatgtagatagtacgttccatgaactgagagatcccagtctctgtactcactactctatttctagcacctgacaaatactttgtattcaattgtgttcattaaataaattactgaaaataaaccacctttgaaatccatttatactctggcatgtgtgttgttatatttattattctatattacattcagaggacttgtgtctgtgtgctagcataaactaagacaccttgagactagcatcactgccatctttctgtacaaaactatggcaatgcttagaactcatagcaggaatttttgaaatatatatttttatttgaacatcttctatagcttctctatatagcaatgaagtgtctcttcatgaatgtaaattttattccaagttggacagttggaactgggggcttagagatgacagaaagactaaaaataggtgctgatgatggagtattgccataaaatatctacaaaataggcatggcagaaacttaaaaaggtacatgaattcagttattataaaaaagatagtcaccttgcatttacacagcactttgcagcaaaatgaatttcaaagcaatttgccaaacagttttacaaaggatcatttggctgagtcacaaagagtgtcttctggtgtgggactctatagctgttcacaatgcacatcaagatgccaatgagctggtttgctgatctcagcagaaggggacttactaaggagcacctgctggagcttgcatagttttcttgggatgcttagcgttacttgattctgggatttcttctccctcgagtaaatgccactatttctgggaaaacatgggacagagctttttacctcctataaaaaggccttaaaacaggcatattacctagcttaaaagacaaaatagagtaattgatttagtacccagaggacaacctaagtcattacaaatcaaaccagcaaacatttattgaacaccttaggcaagttacttatactctctaagcctcagtttccttacttgtaaaggtcttttctcagacattactatgaggattaaatgaggactgaatgtaaaatatttatcagacggcatttcacacattaaatttacctagcattatttttattatctttaattcagtatcttacatgtcattatgttagttaaaacaagaaaattacatttttaaacatttttaaacatgtttattgcatttttacaattataaatatcttgaacaatgcctttaggttttttaaaaataaatgataggtaaattgttaaaaattaatctaatgaaatgatgtgtacactaaattcttatatgaatataggccttattgatattgtgcatagaatttagctaaaatctagtgagtaagaattatgactatatttaaacaagtttagataaatagcatacccactctctaaattgttgtgcgttggcacaatgaaaagtaccccaagaaaatcaaaacaggaccaaaatagattggtgaattcacaagtaacatgttacatacgtgaatgaaaatacagttggtttcattgaaatctataatgtattgagtcaaagtaaaagaaccatcaaaaagaaactgcaccagatggagttaaacagtcatggaagattttgttcaagactattgcaatgggagagcgacaccattgcacaagagggaaaaaaataaacaacttcactgaaccaaaatgctggagaggttttagcattggagtgaactgttggaaaagtgctggagaagattaagggggaggttttggtcaatgtgattaagccacatgtgtttgcttattggtgcttgttaaagttatgctcctaccctcacatagagactagaagataggggccctatcttattgattatttttcaaacagttggctcccagttccttgagaaggatattcctgagttgtaaaggtgacaagaggcttggagaagatttacatctcaaagaggcagagaaagaatttacaacttttctaaggtaaatgcactaagaaaagagaagtcagagcctatagttagaaagaaacctgtctaaaatttagtcaagcagaagggaccataggggtgctgccgtgtcggtcaataccccaatgaaacttggtcagctcaattttccagaattgtgttaacacagtgaaatagatcaaaacatattagccaaagaatatttagctattttttctatgcctactgatcatgcagctgggagaaagaacataacagataaatgtattggcccaagttattagattatctcaatattgacctagatttatcttaatttattctagaaattaatccactttttctttgccagaacatttccttattacacatgaattatcaatatagtagagagacacacttaaagtagggatgtaaaagcaaagggaattacagcattaaatgtttgattaaaattaaatgtcaggaatcctgaattatgttgacagttccatgtttcaatgtatattcagaaggtgaaaaaaaactccctgtcttgaaatatgtaaaatcttaaaattttagcagaagatttttgcctataattagtggcagcccttaagggagcacaaagatctcaaagacagttagtagactttgaccctaagttatctcaattgagttgaaaatatcctactgaagcctgaaaaagggaaagggccaattacaaagtgctttaatttctccacaatggcttttgcaaagcactaatgaaaagtcattttctatggacatttgataggatcctgctattgttcagattcagacagttaaaagaaatcaacagtcacacagtcatcttgaaagaggcaaaaattgaccaaggagaagtgaataattcgcatctagctgtgaatgaaaatagtctgaaggcacagctaactaagccacatgctccttttccagtgtcatggtcaataacaagtctcaggtaggagcgtggcgtgtgctttctccaatgttggcaactccagtcaataaagtataattggaacctgccaagaaggtagtgtgtcaaaggtgtatttaagcagaaacttagatgctgaactgtttgtgtaaaaattgagcacatagtctaattataagtttaagaacttaaaaaagtttgaaccttgtaaatcagccctgtgaatgatgcacactgctggaacatgacaactgcatcaatagagctcagtcagaatagaggaagaagtgtcaaaattacaagaggagcactgctcttagcaaataattaaagggaggattgagagaggtgtctttgattgggataagcaaaaaggttaaaatgccattttaatttatctccttaaaagacacacaagtgaaaacaagaccttttttgttaaatcaataaatagtaatttgattagcttatgcttgttaggcattttgatctaccatcatacagcctactatttaaactttcttgacactcaagattctatgatattacaaacagaatggaggcaagatgcacagtccactttactattgattgtataggtcgagtgtggagtaaaagttcaatcagttctaatgaccatggacattttgataattataattacccctcaatgtgactccaaattcagaggcttcaagaggctcactacatgcctttctctggcagtctcacttttgaaattggaaagaaggttaaatctgcatatctgagctctgccctgctctgagaaccaattgatttcccttggtagatgtgtcattcaaaaactatattttactgctaatagtacataatcaaagatacaggcaaattaatgaactactttcttactagaataaaataaagtatgcttaggatcaccttcttccatgtaacttagcatttcattggcaaaattgcattaatcattccagtactttcatagagtaatctcagttttcctcagcatcattttgttgttagattgaaccctgatctattgttaatgctgctttggagaggaaatttttgtctataccacaaattaatttgacatgtactcatgtagagaaagcaaaaagtaagttgtttgcacatttttcttttatttgcatctttgactcatttcaggaaattaaagagataatcacatggtatactagatagacagtatcaaggaccaacttactggatgatacttaacaatgtctgaatgctgtgatgtgaccgagccaggcaccactccagtgcaacccctccatcccagtttcatgtctgaaaattcaagggctggattggcaaattgacaaacagcacttggaacatattggagaatatagatgttttaattgaacttaatcctttttatattaaagaacacaaaccttataatgaaatgactggtttttagtgcttttttcaaaattatttactgtttccttttaccagatttatcaatgaagaagatgcaatgtcaagctttcaaggaaaactttgtatgtatagtttgacttcttactatgccacagtgtaaaatgccaggaaggttaaaatcagacttaagatttgttacaatgcatgatgaactatagctctttaaatctgaatagacagctgggtgcggtggctcatacctgtcatcccagcactttgggaggctgaggcaggcaggtcacctgaagtcaggagtttgagaccaccctggtggtctcaacatggtgaaacaccgtctccactaaaaatacaaaaattagctgggcgtggtggtggatgcctgaaatcccagctacttgggaggctgaggcaggagaatcgcttaaaccccagggggaggcggaggttgcagtgagccaagattgcaccactgcactccagcctgggcaacagaggctgactccatcccccagcccccaaaatatctgaatggacatcaggtacacatggactaataactccttgagcctaattagaaagaaagaataaattgggattgaaggaggtatgggaaatgacattggaatttcaacaacatgaaattgaattttattaagattaatctatatacataatatattcttcccctcagttttagaaaactaatttgtagaactatgtcgcagtttgtttggattttattatatcaattggcatcatagttttccaggcctccactgataatccttgtagagagttctgcaatgatctgcataaaatagtagcctctttgaaatccagacatttcttgaattctagactcagtgtacaggctaagtacttattcaagtctttcagcctctctcttctttaaaaggtacaacacagagtccctatatgctggctctttccaagtttggaaatttgcatgtagtgacattgtatgaagaaaagacatatcaggagacatgagctctttctttagttgtacaactactgatcagtcacatgatatcaacaagccaatttagttcctaggactcaatttcctcatcccttgattctgtattttttgcagtgagactgtattctaaagtgttggccaaaatatgcagctacaaaaatgagccctagaatattaaacatgtttattattttattcccatcccgttccatctggcttatctccttctgcctcttctgatgccattttctcaaggaaaactgcatattttctcaagataaatcattttctgagggcatgatttatttctgataagtgtctaaattagatcagttattttttcaataatctttaatactctctgctttaaaaaaagacttattgtactgagtactttgatttagaaatgcaaaagatgttgaaactctttctttcctaagggtaaaaatgatattaaccacccacttgtttatgggctctagttaatagctacagtaaatgaacatgacagataggaacaaatgtcagtgttttaacatttttatataggcaaagctggcatgctaagccagaatccccatttaactattgcatgtcacgcacatactcctcaaaaacaaaaatgtatgtttatttgagtatattcaaatgatgcttttctgtgaaagggccatgtatgcaaagtgacccccaaatcctgaaggagctgaggaaccaaagaaggaggcagacagattcagtttgtcgatattgggtgatgtattgagggaacttaaagacagaaccgtggccttggatagcagcaagacaggcagatccccacgctgctactcctcagacccgaggcttatacagcttcaggaaagcagatgcgctcctcagcaagacagttaaaggcaaccttccagaacaggcaagaatgtggtgtgtgtcatagcctgtactttgtatgatagcatcaaggttgctttgttcttacgctagttgaagtaaacattaataaagtaaaaaccaggaggcagtcatggggctaatcagaaagtcaacatggcagattagcattcaaagtggagtcacttttccctcccctggtgctgacattgaaatgggtcaaaccacctagttttattttctaggcgccaccaactatgagttgcacgactttggacaaggtatttggcctttctcatttccgtttccagagatgaaattgatctcaaggggcattttaaggagtagtttcaagttttaaaggagattaaatatattaaagtttttcaagaactgcaaagtactgtataaagaactattactgtttgtgtttatgtcaacagttggacttatttactctttatgttggcatgagaaattttccttctcatgttttccattttctgggaaaaaaataaaaataaacaaaacaccttccttgaatcttagttccctccttagtcactatgctgtttctctgcgtaacttacaaactaatttttaaagcaatagacctcaaatattaatttaaaagtctccaaaatgacttcctaaatcttagatccaatcaccttccttcagattcctgaaatccatctcacgtcatctgacacgagtggttacaacactcttgaagttcctcccctggctttcattaatctgaaactaagtactcagatcactcattaattcattgaaacactcatccatccagtgattcaacacatatttatttatcccttactgtggttaggcactgtttgaaagcactagaaataaagcagtgaacagtgaagacagcaggaggaatcgctgccctcatggagcttacagtctgtgcgggagatagacagtgaacacatggatattgatagatattgcgtgactagtgttcttgcatgctgcccatgggtgacacactgttgctgctgctgaccatggacagcatctggatggtaataccaagagaagagacctcgggaatgcattaagtctcactgtcccctcttctttcctactgccctaaagtgaacattatgtgttgtttggtctttgtcgtccttttccccctttaagtctttttagcagtttattttattaagtaaaaacaatttccattgctagattaaaccattatgacccatcaatcagtatgcttatgtcctctgtttgagaagctggacttctagcccattgtgagtactggctctttacattgtggtctcattcatgataaatgttgccaataacttatgtataagttgtctattttttagtgtttacagggacatttcttttttctacatgtgaatctaacgtacatttttaaggaaacaattcagataatatacacttaaagtcacttaaaaaaaggagaaagaaaatttattgataatgccatccccccaaacaaagcatctgtttttatttttatggactcactttatatatttgtcaatattcattccaaaatatcataaattttttttctagttctggtaaattataacagcattcaagttcttgcttctgtgtcctgccttccacattttaataggaattttcttctcaaatgcagcacattttcacatctctcacacatactcacatggtcacaatcatcctgaaaccttcaatgactctgaactttgtaattgcacagaaaacattgagaatctgtctcttcagaagtaatcaaaatttgaattagaggcagagatccagtacaatcatcttcatattttttgttatgtcctccctaaaataaatttgaaactctatatacactcatgaacattggtaagttgttatctaaaatttttatcataagtttaaatagatgccagtaatcccagcacttttggaggctgaggtgagtggatcacttgaggttgggagtttgacaccaacctagccaacatgattggtgacaccctgtctctatacaaaaattagctaggcgtgttggcacacacctgtagttccaggtacttgggaggctgaggcaggagaatcgcttgaacccaggaagcagaggttgcagtgcgccgagatcatgccactgtactccagcctgggtgacagagcaagactaggtctctaaataaatgaataaataaatagttggaaaggatgcatttggtgccatattgtaaatattaacagttaagacaacattacattagtcttataaacactttcaatgaactaaagatctaaatttctcttcaatttgcaagccattattatccatttaaaaagacataagcaggtttttctttaacagttgttttcctttctcctgaacttgtatttccattataattcccctacaaaaatttatgctaatataatacaaatttatgctttgaaaaatttaataaccaccctatcatttctgcaaacaaacacatgtatataaagtaaaattaattttctgtttaatttccatgattgtaaggctccaagtgctaagatattccttcagattgagttatcattacaattattattgatattgatcaaaactatgcaactaaattttttgataattaaagcttaagagtaaagttttgttgcaaattttttccttaatgaaatggtaggatttcccccctaataggtgaataaatctttggataaatattacttatggacagagttctactcctttttgtgtgtatacagtatgtattgaaacataaatggttcacttggaataaaaggaatgttgttataggaaagtcactcaattcattgaacatcttccaaactgtaagtcaaaaataatatagtagcagacctgcttgcaaaggatcttgggtattagaataatttgtttctctacatgcataatcatgttttgaattgttcctagcatcccaccccaatttctggtcctcagctacttacatgctggcattatgcaccacatgacatttaggacaggtgagaagaacgtcctttttgtgacttgtaagaagttggcagtgaaatagatgaccttgacagtaggctcagtcttagatctattttaggaaataattcacctaagatgtggaaattacctctgtacacgtctccctaagaaaagcctcccatgtcctgctttaggccatggccctacataataggagaacagaaccatatgtctgtatttaaaaactagatagtggcctgaggtctaccacctgtgggcagagaatggaaatgggactcaggaaggctctcctgagagttatgtacgtttaatgaagtttgatatagaagaaagtaccatttttccagtacaggtctgcatgatcttgctgctgaggctcaggacatattactcaactattcatgacaaaaagcataggaattcagttggcattgctgttggagttgttattacatattttgactggaaatttcagaaaaagtaaagctctatagattatagtctcctcgattcattttccctgtagcacagtaaacagacagcatttgaatcatttaaaataccttcgaagcctgcaaaaacaaacccaaattgaagatcaaataatcgatgcttattatgagagaaaatgtgttttctgttattcaagtacattatgctaacatggctgtcctgatgaagtctgggggaaaaaatgttgaaaaagtaaatgccaataaaaattagaaagtcctcataaaacttccttcaaaaaggacttgaaaagattaatttaattgttcttcctaaatgtgataagtacatttgatattcctttactttagacagacattaacatcagaaggccaagggtaatgaaaatgctgactaaaagattgtaaaatcccatttttacctgtattgaagcttttctctattaacaaagtggtattcctttagaagctgaattaactctttcaacttgcaggcgtttaatttagtatcctgagagacacactttataatatgcaacatgtttaattaccaaaggactctacgtatgtgggtgaggggataattcttttggtgttagcatttttatggcaatatgcaataaactcattgattttgttactagatttctataccatttgaactatttaatatcagtgtttgtgcacaacaaagttcttgggaatattcgtaaattatattttttagttatctgcctgacataaggcaatgtgggaagtattcttagaactcagtaaaattatgcttaatatttttatttaagctttgacctacaacttaatcagtggctttatagaattctttttaaatgcagaaattaatggtggatgatgttcctaggattttcactgtgaattgaaataagtctactaggatttttcataggaaaatgggatcatggatgatatatccttaacatggtctcattggctacaatagaaatggacaagagcatcatatctgaaacaccaagatgatattaaagttttctaaaatgtttttgtgccaaataagtcatcaatcacataaaattacatctattgatatactatcatgatatgcaataacgcattctcatttaacttcagaatattttcctttccactaaaggagaaaaacatcagtgccatggaattcaggggggtttttccagggaaaaattttagcaaagttggaggagatgtcaggaaaaatttagtcacttcttatatttcatcattcttttaagtaattactgtaagtaacactgctttcctctacatcaaatattttataatttacaaataaaactggtgtcatccttcaaagtaacccccttctgaaactaaaaaattattcaagcaaccatgcattatttggggaaactatattttatgttgccttgacacaagaaaattaggaacattatttttgtatcaaccttctaccccatgatttattttatgaaaatgtgcttttgttggtatattctcccctccctcacccatccccagaactcttgggaatactgaaaatactgaaaggcaccacatgcccagtaatcctacttagacttttattatgttgttctcggaatatgtttacttaagataaaaataacagaaacatttaatcagtcaagagtccaaggatactgaattcctccgtgttcccaatattccactttgagtttcttttcctgttctcctggcatttgcagcagtgggaattccgtatggtgtgctgcccactagcctgttattcatgaagtcagttctgcactagctctgttgtacagccattcattcaaacaaattctcacctgttattcttctgctgtggatcttgctccctggtaactttgaaatccatcattcattttcattatagcacctcaagcagtgccagcacatggtgataaatattaaatattttctgaatgaacttgaaataaattcagtcatagccatctattccattaatattggaaaagagggaagaagaacatttttttcttgatgcagtgctgtctttttttctcctttcaaagaccgccatcttattttctttgtcctttgattttattattcttgaagggtagagacaccactggcatcttttgaaggatctctacccgatcagattcttcatgcccatggaagtttccaagtaatgttcacttctttgctaatgacagttcatggcttaattgtcagccaactgattacagcattaccaaactagtgtataatctccctctgatatttctcttattttttttctccttctttgaggcttttcagaaaaggtccatgctggtactttgcagggtgaggttaagaatgggcattattcatggaatcccactgctgctttgagccaggaagactttctcatagggctcatcaggaattagaatcactgatgtgaatccatatgtgtgctaacaactaggtggtccataaactagatagcattaatgcaacctggcaggaagccatcattgtgcatagagtggcgattgattaatcgatcgattgatcaataaacaatagcaacacaaacttcatatttatgttttgtacatccagaattaccaaaaaaccacaatgtgttgtgtccgtgcatgttcctgtgtgtatagggcatattttaacattattcacctcttaccatatgccagctacttacactaggtgtttaaagctgtacatgttcctgagagagtgattgatttggttttatattcttgaaaatggcacatccccttactttaaaggcagattctgtgtatttcaaagcagatccattataagtatgtaaatattcctgtacagaggctagaaattcatagcttttaccaaggtggattctcacttcagtgactcatatttaaactcactgctaaaatgtttcttctaaatgaagtagtatttaagctgtaatttctagctgaggaagacaactatttcctgatgagacgcttagggatcttgttttacattctgtgtgcacatattgaaaattcacatttgattaaagttcggaatgtcaagcacactgcccaaataaaaggcaaatcctcataatggtacagcaaggtaaaatttaaatgatgtgttcgactgggtaaacatattagaaagctgtctgaaatatgtatttaactagcagaaagaactattttattctaatgaatgaaaaatatccattcttgtgtgtgcatgtgtgtatgtatatatatatatatatatgtccgtttataatttaaatgctaaatttggaaatactccagtctttcacatgattgataacatacatttactaactcctatggcggttttatttatgtgtttttgttttttgctttttgtttttgtttttgagatggagtttcactcttgttgcccaggctggagtgctatggcgcgatctcagctcaccacaccctctgcctcccaggttcaagcgattctcctgcctcagcttcccaagtagctgggattacaggcatgtgccaccacacctgggtaattttgtatttgtagtggagacggggtttctccatgttggtcaggctggtctcgaatgcctgacctcaggtgatctgcccggcttggcctcccaaagggctgggattacaggcatgagtcactgtgcctagccttatgttttaaggaatgaaattaaatatagaaactgaatctaggtgacactgaatttgtaatatacgctgacaagtgctaacataggactggcaggaacagacacagaccttaaataatcttatttcctatgtcctgcttttgttgtgtaagcgttccacagcattgatgttacttaaacttggctttggaaattctgcagttacagttattagataggcaaattatgtctattccttttatcccagactcagaaagtgctgtcgttttatggcttgcaaatgcttcataagcctcatgcttttctggggaggttcctagttaataagtaaattaaatttttaaaaataggctgaatattttatcactgtggcattataaacatttgtcatccatgtagggaacatttttccttcaggctctgatttacaattcataattgtttcctgtcttatccttgttctctctcaatggtacaagatggagaaaagatagtttcagagtgtagacattttaatcagtattcaaatggaattagaaggccccaaggttttctgtgtgtatgcatggaaattcatctccaccaaccaccattagcaacagctgaaatcataggtgacttctcaagagagaaagtattaaaatatcatttaggtcatgcacgtcaagctaattttggcatcatgtaattcagggttgatattatttagatcgtttcttttttgatataactacatgggtaaatacagcctctcgttagggttaagcaattgtgtctttagctccgaaatccctttacactcaaatatggcagtaggaattcatttgttggaggaactgttctttctctttttaaacagctttatcaagatacattttatgtactataaaagttcacccgtttgtagaggccaagtttttagtatatttacggtgttagcaagcaccactgttcccataatctaattatggaacatttttgtcacacaaaaagaaaacttaggcccatcagcagtcattctccagcccccacacctgcttccatcactcccttgccccatcccctgacaaccactaatctactttctgtctctatggatttgcctattctggacattttatatataaatggaatcatacaatatatggtctatgagtagcttttgtcatttagcataatgttttcaaagttcatccatgatgcagtatgtatccaaattttattccttttaattggtgaataatattttgctgtacagatataccacattctgtttactcattcatcatttggagaatatttggattgtttccagtttggaggtactatgaaggatgctatagacatttgtgcaaaagttttttgggtgatgtatattttcatttctcttgagcatgtaactaaaagtagaattgctagatcacatggtagttttatgtttaatcttttgaggaactgccaaactgtttttccaatgtggctgtactattatacatccctattagcaatatataaatgtttcaatgtcttcacatgtacacccacactggttattatctgtcttttttattattgtcatcttaatggtgtgaagcagtatcatattttgatttgcatttccctaataattaatgatgttgagcatgttttgttgagtctgttagccatttgcgtatcttctttggaaaaatgtctactcaaatcttttgcctgttctttaacagggttgtttgtcctttttttgtggagttgtgtatatgctggatactagactcttatcagatatatgatttacaaatattttctcccatctattggttatcatgttactttcctgacagtgtcctttgatacacaaaagttttcatttttatgcatttttatgaagtcctatttattttttcttttggtgtcatactaagaattcattcttaaatccaagatcatcaagatttaccccatatgtttctttcatttgctcttatatttaggtcatagatccatttagagttagtttttgtagatggtatgaggtagggtaggttccagctgcatttttttgcatgcagatatccagttgactcatattgagttggtgaggatattatcctttcctccttgaatggtctttgcacgcttgttgaaaatcaattggccataaatgtgtgggttcatttctggtgtctcagttctatttcactgatctgtatgtctgttcttacaccagtaccactgtgtcattgttgctattttacaaaaatgcataacactcttagaattttttgacagtacattgttgttaactatctacacattgtcatacagtacatctctagaatatttccatcttgcatgactgaaactctatatccattgaacagccactcccattttcttcatcccctatccccaggtaactgtcattgtgatctctgcttccatgagtttttctactctagatacttcatataagtagaatcatgcggtatctgtccttttgtgactggcttattttacgtagcataatgcccttgaggttcactcatgatgtagcatatgataggatttctttcttttttaaagctgaataatattccatttattttataccatattttttctcattcattcattgatggacatttaagatgtttgtacctcttagctatttgaataatgtttcagtgaatgagaatctaatgcctccactgatctgacaggagacggagctcacacagtaacaattgaagcattgttttcaatgttctctgagaacctgttttcaattttttggaataaatacccagaagtggcattgctaggtagtactataccatattagttactttagctttgtagtgcatttgaagtcaggaaatgtgagtcctccaacgtagcttctctttttcaagattgtttgactgtttgggcatttgcaattttatatgaacttgagggaaagctgttagaattttgaaagagattgcggtgaatctataaattgctttaagtagtattgctattttaacaaaatatgtcttctagtccataaacatgggatgtatttccattgaattaggtcatttgtaatttccttcagcaatgttctgtagttttccatgtaaaattctatcatttcttagttgatttattcccaggtatttttaagatgctaatgaaacagttttctttttttttttttgagatggagtttcgctctttttgcccaggcaggagtgcaatggtgcgatctcagctcactgcaacctccgcctcctgggttcaaacgattctcctctctcaacctcctgagtagctgggattacaggtgcccgccaccatgcccagctaatttttgtatttttagtagagatggggtttcaccatgttggccaggctggtcttgaactcctgaactcgtgatccacccgccttggcctcccaaagtgctggaattacaggtttaagccaccgtgcctggccagttttcttaactttcttttcccattgttcattgctactgtatagaaacccaacacatttttgtgtggttaatcttgtaccctgtaactttgctagatttatttattagctccagaaggtttttttatggattctttgggatttcctatatacactgtattagtccatttttatactgccatgaagaagtatgactgggtaatttataaaggaaagaggtttaatggactcacattgctggggaggcctcacaatcatggcagaaggcaaaagagaagcaacggtacatcttacatggtggcaggcaagagagcttgttcagggaagtcccacttataaaaccatcagatcttgtgagacttattcactaccatgagaacagtatggggaaaaccatccccatgattcaaaattatctcctaggcctgcccttgataggtggggagttttacaattcaaggtgagatttgggtgaggacacagccaaaccatatgttataggatcatgtaatctgtgagcagagagagtttttattgttgttgttcttgttgtttttattttttgagacagagtctcactctgtcacccaggctggagtgcagtggcaccaccttggctcactgcaacctctgcctcccaagttcaagcaattatctgtctcagccttccgagtagctgggattacaggcacccaccacgacacccagcaaatttttgtatttttagtagagatggggtttcaccatcttggctaggctggtcttgaactcctgaccttgtgatccacccgcctcagcctcccaaagtggctacaattttcaatacagtgttaaacagcagtgatgaaagcaagcttccttgtccttatcttagagagaaatctttcagtcttatatcattgaatatgatgttagctgtgagttttcataaatgtccattatcatgtttagagaattcccttctattcctacttttctgtatatttttatcataaaagtgtggtggatttcattaaatttcttttctgcataatttagatgattgtgtgtgtttttcctttgttctcttactagacacgtattatattgacagtttcttatgttgaatcacccttaactttctgggagaaatctcatttggttagtgtgtagtataatcctttttttttttttctgagatgaagtctcactctgttgctcaggctggagtgcagtggtgcgatctccgctcactgcaacctccgcctcccaggttcaagcaattctcctgcctcagcctcccgagtaattgtacctacaggcacatgccaccacatccggctaattgtttttgtttttagtagagatggggtttcaccatgttggccaggctggtctcgaactcctgacctcaggtgatcctgctgcctcggcctcccaaaattctgggattacaggcatgagccactgcaccgggctgtataatccttttaatatgctcttggatttgctttgatagtgttttgttaaagactttttagtcaacatatataaggggtatttgtctatagcaggggtccccaaccccccagccgtggactgtggcctgttaggaacgggttcacacagcaggacatgagcacctgatgagtgagcattaccacctgaactccacctcctgtcagatcagtggggcaatagattcttataggagtgtggaccctattgtgaactgcatatgcaagggatctaggttgcatgctccttatgagaatctaactaatgcttgatgatccgaggtggaacagtttcatcccacaaccattcccccacccccacacctgtccacggaaaaattgtcttccacgaaacttgtgccaaaagggttggagactgctggtctgcagttttctttccttattatgtctttgtctggctttggtatcaggtagtgctgctctctcagaatgagttaggaagtgttacctcatcttctgttttttggaagagtttaagaaggatttttcttgattcttctttaatgtttggtagaatttacaagttaagccatctggtccagagtttttctttgtccggaggtgttttattactgactccatgtctttacttattataggtctattcatgttttttatttcttcatgattcagtcttggtagggtgtatctttccagggattttttgtattaaggttatataatttgtgggtgtatattatattaccacaaactgagtggctgaaaacaacagaaactatttcatagttcaggcgcttagaagtctgaaatcagattgtcagaagccaagaagtcggaactcaggttgtcaggtggttctttctggatgcttggagggaaacactgtcccatgcctctctcccggcttctggcgggtggttgccagtaatccttgttatttcttgcttatcaatgcattgctccagtcactgcctcaatcttcacatcatcttcttctttgtgtctctgagtgtccttttctgtctcttacagggacactttcactggatttagggcttatcctaatgaagtacgatcttatctagatccttactttatttatattggcaaataccctatttcctaataaagtcttatttgtaggctctggatggacatgcattttgtcaggattctatttaatccaccacagcgtacaactgttcatagcatttttatataatcatctttatctctgtaagattgagagtaatgttccttctttcacttctgattttagttactttttcttttctctctttgatagtcagcctagctgaaaattggtcgatttggttgatcttttcaaagaaccagttgttggttccattgactttctctgctgtttctctatttgctttttttgtttattttcactctaatctttattatttcttttcttccactagctttgggcttagttttttcctttttttctagttccttaaggtataaagtgaggttattgatttgaaatctttcttctcttttaacataggcatttatggctataagttttggcatgttgtgttttcattttcattcatctaagtattttctattttccctagtgatttattccttaacccattgtttgtatgaaacgtatgtggtttaattttcacgtccttgtgaacttttcagttttccctctgttactgatttctagcttcattcctttgtggtcagagaatatactttgtacgattgcaatcttttcaaatttaagacttgaaatttagtaatgctttttcgactgaaatttatcagtctctttcttgactaagtgctcttctggttgctgtatgtttttattagattccagtgttctgaaaagttgattctgtcatgtcattttttgctagttttgctcttttcttcagtggcgggactaattattggcactgtgtctgccatttgtgtgacatcactcatcttccatgcttatcttacaggcgtctgttacatgccttccttcaagagccctccctgtctactctggcttctcagttctaagctaattgtccttttatgggttccctttacattgcatttccccaagataataattatttccctcaaatgactgaacatgaacatattctgggcatcccaataatggcactaggtttcttctttcatcccagtaaatggatgaatgaaggttgcacaaatgaataaagatgaaataaatttaatttcccatgagcttactacaaagcctatttataggttactattaaagaatcaaaatcagaaatatttaacacaaaagatactttacatgtaatttaatcattctttaggatctggtgatataagattatgaggaaaatcaaaagatcataatcacaagagtcatcttaaatgacatattatgactcattatgactcttatgagtcatcatttaatgtgactgtacattagaaactgtggaagaaagcatcaactcttgcccaaaaggacatttagaatgtattctagctgaatgttttacttacattaacttatctatcttttgagagcagaagatagatatgtttatttgattattttggttatatgattttcatagaaacaagcatctgctaggtgtatgttcattgtgtgtatatatatatatatatatacttttaactttcacatattttcttgcttatttaatattttaagaaacagtcacgtgttacattggctactattaggaatagctaatgtgagcatccatgcatcaatgctggtccagatatagaaatcttaagtgtattagagacctgaaatgaaatattattacatggctaagaacatgctatacctcaagtcccgtttagaaaacataagaattacttgctaaaacattttgacatacatggctagccaggtagataagtctctgtcctaccccacaatacagctttattaaggattctttttgtattccttgatatgtttcaatgtgttgcactttagccataaaaaaaaaattagtgagtttccaaatgaactcaatgatttttgttattttatttactttttgtttattttacaaggatcgttggttataaattttactatattttcaagactagtaaactgtaatatcaattacaaaataataatgtatgtcaatcattatacacaagcagaaaattaaaaaataactaaatccaagatgtaatgaattcttatcaaaatctcacttagttggctcacaaacttgtgtctgtcttttcagtagtgggaaaattaaattggaacaattgactattttcttttttcccaactaatattgtaaaagattattgttttcaaaataaattttactgtgtatctttaaggtatatatcatgatgtttaagatacatggacatagcaaaatggttactgtagtggaacaaattaatatacccatcatcttacccagtcacccatcccctctcagagaatcgctgtaatctttttctttagcaaaagtcctgaatacagtacactagtgttaactataatcttcattttgtacattagatctttcaaattgttcattctacataattgctacttttcatccttgacttatatatccccatttcctgacccaatcctaacccttgtaaccgccattttattctctatctctatataattgaccctttttccccagatgccacaaatatttgaaatcatgcaatatttttctttctgtgtctggcttttttcacttaggataatgtcctatatgtccattcatgttgtggcagatggcaggaactcctttttttaagactcaataatattttattgtgcatatataccaacttctttatccattctttccatgatgcacacctgtgttattttcatatcttggctattgtgaataaagctgcaataaacatggaagtgcagatatctttacaaggtggtgatttcatttcctttgggtatatataaccagaaaagggattactggactttatactggtttttatttttagtttctttaggaacctccatattgttttctttaatggccacatcaatcccttttctcaccaacaatgtacaagggttccatttttctccacacccttgccaacacttgttatcatctgcttttatcctaacaggtgtgagatggcatctcatagtgcattcctctgatgactaatgatgttgggaaccttttcatgttcctgttggccatttttgtgtcatctttggagaaatgtcttcataagtccttgataaaagattatgaatagcatgtaaaagttaggtgagagctcaaataagtattaaaaataatgttgtcatcatcagcttattctttgacccaagtttatttcccagtttactatgactatctggaaagttacagctacattatttaaaaaataaacaaaaatccacattaccaactaaaaaaataatctcagctttttatttctaaagagggattgtgttctttattgttgctaaaagaatacatttttttcagtaattttttttctaaaggtccatacatttacaaatagtccacataagccctctaagcttgaggtgttattctattttaaattttaagtatgagtttttagaactcttttctttattttggttttgctaaacatatagacttatctaatttttcagagtttttttttttaatgttggatgttttacacaaaccagttggtggatcattttggatcattgacatctactcaacttaaatactggtataaatattatccagaggaaactcatgataaacttaaaagtacatgatacacccatggaaaggctaaaatagtgacagtcacatacactgtaaaaatttggataaaactggaggtctcacatattgctggtagaaatgtaaaatgttacaaacaagctggaaacagtttagcgatttcttacaaaacgaaacatactcttaccaccatgtgatccagcaattgcacccttgggcatttctttcagagaaatgaaaatgtatatttctacaaaaacttgtacataaatccgcatagcaactttattcctaataagaaagtaatggaaacaacccagatatccttcagtgggagagtagttaaataaattctgatacatccaaataatggaatactactcagcaataaaaagagatgaactattaatatatgcaacaagttggatggaccttgagggcattatgctcagaaaaaaaaagtcaagctcaaaaggttacttattgtatggttttatttatatagaattcttgaaatgacaaaattatagagttggaaaatagattagtggttgccaggtgatggggacattagatgaggcgaaggtagcaaaagggagttcttttatggtgatagaacagttctgtatgttgattgtggtggtggtggttccacaaatgaatacatgaaataaaatagcatagaactgtgtatagacacacacacacacacacacacacacacacacaagtgaatacaggttcataaactctaaaatctgaggtctacagactagttaatagcaatgtactaatgtcactttcctcatttttatattacacaacagctatataagatgtcactattgaggcaagttgaaggaaggatacacaggagtttattattttttaaactatttttgagcttatattaatttcaaaatgaaaagattttaaagagtatctattgtgcaattataaaacactatgaaaaatagagatgtctcctcacacaattggcatttaaagcaacattttcagaagcttacttttaaaagtcttcagtttgaagtgatgatttttattttaattcaagcatgcccttgtgtaagctcaaaagatgtgatttgtgaacatgaaagcttcgactctgatcccctgggctccattttcttcttcttcaactgccctttatttgaccaggaaggatatcatttccagaagtactaggagacccacatttaacttgaacaacattgttctttcagattattaaggctgttcaattttctctgttggttgctaccccgagttggagactcttctgaaatgtcagactgagaaaatagtactggttccaacacaatgaaaaaaacaaatgaaaagctttggaatgaatgcaatcaatagcctttgaaaacaaagttaaaaagcaacaattgaatgctaagatgtataaaatcatcttgttcttttttttaatttgaatatcaatgtggccaagaaatggggaagcacaatagagcatttgattcaataagcacttaacaaatacccaagtcatcattgtaataccttatatgatgtgcatgttgtgcatagcacaaggttataaaatgcgtagcagtgaaagttataaaaatgaatgagacagtccttggcatccaagagatctcaaatttatatccccaatattggcaaatgctctaggttctaataccagaacactgagtgagaagcacagcatcatttaataccaatggtgagataaccaaaacccaacagattcaaacgtagaaataccttagttagcccaagtgaaaattgggtagtctttggagaaaagcatcagtcaggagagaaattgcaaggctgtagaaaataaaatcctgtggtaaaggtttgcaagttagtaaccatgcccagtaagtttgcaagatagcaaccatgccaataaggaaaatgtgtaagaattttaaatttcacattaatattgtctgaggaatgcaaaattctttttcctgttttttttttttttctttttttgtgaatggcttgggacacatgtgataaaggaaaattctgaaacagtgctgctcagttacgggtaaaacttggcactatctcccatccaagtactaacctggcccaaccctccttagcttccaagatcaggtgagattgggtgcattcagcatggtatggccttggacaaatttggctctatctacaaaatagcctgtctggagattacataatggcattaatatatccttaaaagaaaagtcaacagactcctcacctttatacccatttattgtttctgttttgttgttggaaaatgagttttagaattaatcgataggaaacccttctatgaatacctttataaagaaaggccaattatattttacttcatttatttgacttacagtattttactcactgactttctattgttgatcatgttgattctattttattcaagccagtattgaattatcaggaaaagtaaaaatgaaaaggatattactctgggataaaaaaaattaaaggatattactttggcatgaaaaatgaggtaggttaatgaggatgggtagaaggatggacagatgtgtgaaaaagcaactgtagaaaaacgtaaattgtaccatgtaggaaatgtggctgtgaactgtaaaagtctttcacctattctgcatgtttgaaaactttcataaaattttggaaagaaaatgcaaaaaaactcaaaaggacaactagaaattttagtgcctaaatagacagctttatttcctaaaataatttttttagtgattttgtcaacatactgggtaaaattaagaaaatgttacagaaaccaaaggcttgcattaagaatctcaaaattgatcctaggtaagggatagaatcatagagaaatagctatagtaattgaaagtatccatttatgtggaaatatttcttgttgttccatcaatacactggtgttatgtttcttcagcatctgaatgttcttgttacctgtgagctcaagtccaccactctccaagagggccaaatgatacaaattagatttttttcctcagatctagaatgcaagtacagcaatgtatagttacttgactaaaatatcaaagtgatatggaaccaaccaaatgaatatggcaacaatttttacatctagtcatgaataagagtagttttctgtatttgctttctaattttggtctccactatcttgtatgagttcattctcacatactactataaagcactgcccgagagtataattttttaaaggaaagaagtttaattgatgcacagtgcagcatggctgaggaggtctcaagaaactacaatcatggcagaaggggaagcaaacacatccttcttcacatggtggcagtgaggagaagtgccaagcaaaaggggaaaaagcccccctataaaaccatcacatctggtgagaactccctcactatcacaagaatagcaggatgagagtaactgcccccatgattcacctcccatgatgtggggattatggaaactataattcacgatgagatttgggtggggaccatatcctgtcttaaatattccttcctcttgaagtcaaattagaattcttaatgagtcttaaaaagcccttattggtttagaattgattaattgaggagccctgattttctgatccagggcaaataggatttcattgtcagtggatacgtagctcctctgaattactgcaaggattgcttctcacatttaacactggtccctgaaattttccatgaattttccagaagtgcaaaagctgcagatgcccaaagatggtaccttggcagttccattgcttctaagcaggcctggatcttagagatctcagacaagttgatattgatctttgaagaaacgttatgtacaaaggaaatatatctgccaacctcctttagaaacagggtcaaataagcagttggaaaattttctaaatgtgtcacattaaactttaataatacctacgtttttatggggcttttaactttgcaaactgctttcacatgcattatctcattccatcttctatggcaatgaaacagtgtctaggctttagggctgaattacaatgacatcgatatgaaaatgttgacagggacatgcaaaaaagttattactatgccaagcagaagaattcaacaggaattggatggattcaagatcagtaattacaaagggttaagattctgcttgtggtttatcactgctattttgtctttttttcctcctctttatccttcttatttttgattttctttttctttgcaataaatctgcaggtcagcccaaccccagggtgtatccgtgccctcatgaagatgctgtactgcccatactgtcgggggcttcccactgtgaggccctgcaacaactactgtctcaacgtcatgaagggctgcttggcaaatcaggctgacctcgacacagagtggaatctgtttataggtaagaagtgtttaaatggatccgagaacagagacgggacaacagcaagtgtttatggggcttgatgggtgggtcagaagttataagaaaccagacacagtggttcacatctgtaatcccagcactttgggaggccagtacagatggattgcttgagcccaggagtttgaggccagcctggacaacatagtgagattcccatctttacaaaaaataaaaaataagctgggcgtggtagcacacatctatggtcccagctgtttaggagaccgaggtgagaggattgcttgagcttcggaggttgaggctacagtgagctgtgattgcgccactgcactccagcctgggtgacagagtgggaccctgtctcaaaaaaaaaaaatgttatgatgacttttagagactaggatggtttttaaaaccatgtttagcaaattataaacattattttacattttcctaatgtttttactgtatgttatatgggacagtcctgttaaagattgtgcaacccagctatattgagctaactgttctctctgatgaaaacaaaagtaatcttgttgaagttccatgcactcccgtgagaaaggacgctttagaaaagaatcttgtaaaaaaaaaaaagtccactgtactatttcttttttatttgtattacctcagcatagccacacatattagcaaacaattctttccttgaactcctagaatgaaaatagatcaatactttggctaaaatatgcaaattttctatctcattctgtggaaaagaaggctttaagcacacaagcatgaaacagccttccagtctctagagggcaggaggcagggaggtggggagaatggaggggaaggtctctgaatcaaggctctgttcttgggttgcagaaatcattcaagtggttgcatggcccaaagacagttcacaaattgccatccaaggataaaaggacaaatttcataggcaggcttctcccaggaaaatacacaggccttgaaagagtaaatgtgttttctccccctctgtcaaatagccttcaaataaaagtactttcaattgcatttactgcaattacacagtgacaagcagagtggtgaaaatagcagtggcatttgtcagcctctgagggccttcgtcatttatgcaaacctctaaacgagcatgcacaagtaaagtgttctgacaactaagatttgcataggatagaaaaaagatgttagaattcagagaaactgaagctcactgtacaaagatgtgcttaggttaacaggcctcagctctgataatgaaacccattggctaattcaccattttgcttagaaaggccagaggaaatggttttatttcagaaaaaataaattgaagtgccgttacctctccccacagtgggaggacaaaatctctttgtatgatcatgagttactttatttgaaaaatgaaggaatttttaaaagttaatcattaagttatccttctgacacaaaatgacatgattctttactaagatttttgttctttgctaaaattgtggaggggttatgaatttttaaaaataaacttgatcttagaagatttggattttttagcaaagacagaatacccaactaatgctgataaaaaggtacactcatcaagaaatctaaaaagatctgcttattttaaagtcagattaaacctcgtagcatcatttggagtcatatagtcatccatatttttagttgaaatgccctaattcctagcacagttcagttggcttcagtcagcctgcaagttattgaagaagatgggcatgtgggttttgttacttagagcaggacatgattaagaatgagaatataggctttttaacttgtaagagcagcagtgacttcttaattggctttttgtcctcagtgcttactggctgttttaacggaaaacaaatccttatgctttcgatcaattgagtttcctagataccgatttgatgtgaaatggaatgtctggaaaatcactggattcaaaactaaaatttgaaccaactatgtgttgctggatgtactttaatgaaaagcaagcgtggtggttcgtcctatatgaacgtatttcataccctttcttcccgtcttttttttttttttttgagagggagtcttgctctgtcgcccaggctggagtgcgatggcacgatctcggctcactgcaagctccgcctcccgggttcatgccattctcctgtctcagcctcagcctcccgaggagctgggactacaggcgcccgacaccacaccaggctaatttttttgtatttttagtagagacgggttttcaccgtgttagccaggatggtctcgatttcctgacctcgtgatctgcccgcctcggcctcccaaagtgctgggattgcaggtgtgagccaccgtgcccgtcccctctgtctctttttttaattagtcctagatgtctttgagaaaattcttccagttttccttctttgggttctgctgtggcattgagaattgaccaccaatacagacttatggagaaaaatgtgctcttgctaatacttgtctgggtgtgaagtgttagttcacaaatttatggcatgaattagtcaaatgtgccaactccattttccacacagatacatctcagatgacagtgttacagtgttcataaatgcggcagcaaagatcagtgagcaaatcggtaatccaacaaaaattatatataatagccctctctctgggtagcacctgcagcccatcactttgggcttctggcatctcttcatcaaaaccttcactcctgttgctgtcagttgcatgtaccttccctgctagctacacaaatgtcccagtttgtacatcttatagatgtttttctttaattataatgtgcctatctaaaatgtgaacagtggtatgcaatcgaccgtcaataaaaacaagagtcaaactgggggcacatcctcccagtctttacaatgccacaaattaattgaaagtggttagtgactgtttagagttcagtcagtgtctggatcatgtcaaaagaaagttaagtgttttaagcattccagtaaaaacttctgtggtattccaaccactactgaagttctgtagttggggtgtgtgtgcgtgtgtgcatgcatgcgtgtgtgcgtttgtgcgtttgtgcgtgtgcatgtgcgtgtgcgtgtgcgtgtgtgtgtgcgtgtgtgtgtgcgtgcatgtgtgtgtgtgtgtgtgttcttcgaaaaaatcaggagtctatttaggatgcattttcaaagtcctcctccaggaagtttaactcagttccctgcacagaggaattgctcaaaagattcttaccaagtaactgttataagaaaaagaaactccatttttacatgaagaacttttctttgaaaacttccttacaacattgaaaaaatgccgctagacctattttagagtacttaaaaatcctcatcagcctcaggcccgccccttcacttgctttgtagtaagtagtgtatggggttccccaggataaagcacaacccagattccacttgctgcatccaaatgaatggtgtcttacgtagcacccctgagctaggcaggaccagaagaaacaggagagtggcttttagcctattgtcactattagaaactatgcagtgcggtaggagaaaaccctgttttaaggcattaacagtctctgctcaggcacttatcccaggtattgccgtattttcatacaaaacttatcccagcctagcttttgcatgctgcccaaatgcaaaatggttttcttgaaaaatgtttgtgttaaattaaaatctcctagagggagaaacagtttgtgggcagaactcgcttcagtaatatcctgtggttattttgagtgtttggcattgttatcaacgctccatagataagaattgttctatttcacaagaggccatgttgcagattacaactagctcatgaacacaaaagtcaaggctgaattacatttatatagctatagtaaatcttacatctactttaaaattgaggatgtgtgggacagcttctgcaaacatctggtaccttctaagattttatagactatgagaaccagagagagatttctaaaagatgttgccaatgaggagaggcaaaggttgatgagacaaaggcagggattctgtattatttcatactactttttatccctaagtgttagagaatgcttctaacatcaagtataaaagtgagacctgagtgtttttgtcccaattatgcaacctaatatttaggctaccccagttagcaaagaccctaataattcaactcactatattgggtaagctaggcatatacattttttgcccttagggaatttaacatagttaaaataattataacaaactatgacaaagtgttaggataacagaagcatggggtgctaagcctttactcagctgggggacttaacttagtcagcggggagtcagagaagccctactttgttaagtgtagaataaaatagcaaataagattgtattgaattggcattgtcaaacataattgatgttaaatagccacagcatatataattgttacaccaaagccctcagacagtttgtttcccgtatcactctcaataggtctagcatgatttgtcagtggttcttaaatgctcgtttgttttatttttgacattttctatgatcaagtctcacctgcccactactactgtcttgaactgatgagatttgtgttatttttcatcagcaaaaagttgagttatcttgatttagatgccctccaaagggtgttgtgggggaagccagcaaagccgctagtatttttaaatttaagccttgggcactcatagaccagacacaccagtgatatcaaactttctgggcttcttcttttcaaacttgccaattattaagttgccaggcagcccaaagactgaaaactgtcataagagtatcaaacatgaaacccaaggtgggcactgcatctgtggcaggccgagagaccctgaagtgggcactattcactgattctgtcacatattcattagtccaacacatgtttactaagtgcctactgtggactttgttttggtttaggcatgggaatggaatagagaacagataaggcccctgttagagaacagaatagagaacagtacccagtatatgttctttgaatcgaataatggacccaactgtacagagaaatggaagggaatattctaagaggctgttctattttactttgtaagtcttttcttttaatggaggtataactaattcagtaatttaaaaatcacatatccctgttgttaatggactcatgagtgcagggatggcagaaacaaatcagataatgtacctgattctttcattgtgacagctgctatcaagttgtaaattagagccagccacaaggaagctgtgttaggtcagtccaatgactaatgtcatgtaataaatggctacttggtgcacaaatgactttcttggaacctacaagagttgtcaattctcatggtaatttgtgcattcgtaattttgtgtttgggaaaatgttgctagataagccttatttgatattagaaaataaacatttattgtttctactgaggaaactcagattttcttttgtaaaatgtacaggactgtgttatgttgcattttaggagataaaataggcagaaggaacgatttcaagcatttgcgtaagatactgttctttcaaagaccttctcaggcataaaagtccataatataattctgacaagaaactcttttagttacaaataattccatagtaaatatgatatgacactggctgatattcctgaaataccatgttacaaaaacctctagaatctaaacatagaaaatgatttcctttaaaccaaagaaaaagaaaaacccaagagctgtatatagcagcaaactttcaaggcttcttcatctctactttatgtaatacaagagcctatttaataatacagtctagaaacgcaaccctgaaattgaggaacaaaagccaaagcaattattttaaaatctgttctgttagctagaggactcgcatttgcccttgagcattcgtgaaagcaccaggaaagacttttttaaaaaaacaaagaacactgttttctgtcaggtgaaatctaacaccatccaaccctctgtctttcttttacagtcattgactcaatatttctcatttcttgtgggcatttatcatatgttgtgttctcatgtaatgctggcaggatgcataagccgtactaactacttgctgagagaaagaaagaaagaaggaaggaaggaaggaaggaaggaaggaaggaaggaaggaaggaaggaaagaaagaaagaaaagagttggctggcacccaacagcctgtcgctggctacatttgctatcaattacctaagtttagaaaacggtttactctgaactctgcatatgtgaaagtgtttttatgtgatacaatagggttaatgccttaaggttggtggcataatgtgtgggtattcagcagatatagagacaggcatttcttaacctctgaacacttactaatgttgatcttgaggcaacaactcaagggattcacagaagcacaatttctattttgaatcaagcaattttcccatggatcaaaggaggcaacatacatcagacctaaaattgctggatacaataggcaagtcgtcattctaggggatgtgtgtgtgggtgtgtgtatttcctttacgcccaattccaacttttgttcatccatttatttctagttcctgtacactcaacttctatgcaattaataatagtaattgttccatttcttatttactgattactgtaaatgatactgtgtaatcgagattttcaagatgagatttatggtacaaaataatattggcacaaagcaatggtctgaaatgaggcatacctattgtgcaactaaaattcattaggaagcaaaatatttcatgtataataggaagtttactaaatatagatataaatatatattaaaatatatataatatgataggaagtttactaaagtacgacttatgccttatcaagctttttaatttctatgagaaacaacaacagaagaatttagttgaccaagagaaagcagagcacattaaaactattcaaggtagttagagaatttgcctttgaatttggaattttgcgttttgattttagtttactcttcaatgtattttctataggtagtttaatttatttatatataaaacgtacttgtttttagtaattgacatttgactttaataacatgttacaattttcactgtcatgttttcaagttcaagctatgacacaggtgcctgacttttgtcatgccaaaagaaaatatttgatgattctttacagtggaattaaatctattccagaaggccagaaacccaggcaaaaatcttaacactctgcacattagcccaatgacattcttagctattcaaattttaggagataaaaggaacatgtgatagaagaaattattgtgatgtagaactagaaagtaaggaacatagagctaagtaactggatcgttaaagaaaacatcaaaccacatagctattcacaaatagcaaagttgtaacaagtcccacggccaccataaccagagtccttcacgtggtgaccaatataatagaataaaggaaggcggtttacctcctgaggcatttcgattactttaaaagtctcaagattagcagctaaagtgaaaagccttattttaacccaaataatgaattaacacatctttgtgcaatgtggcaacattttattaaaatattttaatcatgaaagtgttaaatgatggcacttagacttcttttctgacatagtatttactttgaatatgtgtgtgtgtggatatatatatatttcgattgctctgaaacctcctttaattcatagttatctcaaaagtagaactgctaatcatgtctttatatttgagtcatttttgaaatgagttttctttttcctcagggttgtttctttaacaattataaaagagactgctgtaatctcttcatctggctgtctttgtgacttgtttattgtgaacaactctctaaggaaccaggggtggaaaccaggttagaagagacggtctcagtgacttattttagtggttaaatagatcttttccttttgttactctaaagagggagtgggtataagtattaatggaagtaatttaagcttttgggaagcttcatggtgtatgaaaacttatggttgtaactctttaaaaatatcgtgtccatagatacttggtcagatatccaggagagaatttaaattaaaatagagcatgaaatatgccttgtccttcaaataacagctcatatataaatcccacatgaaaaagatatgtcctcgatttttttctttgcatagatttaaataatttgctacgctaagaatttcctttattataacctctgaagaagtgaaaattagaaagagaaatgaaaagtaagtagttgaatatatggcattaccccaagcagggatatatctgtatgcatcacatttttattctttaagaggcaggaatcttctagaaacataacagcgataattagatgccaaataaggctgtcaatattcaccactaaaatctcaaggctcgggaaattagctgatttgaaaaagggcctaataattctactgggtgaaatgagtaaatcagcagatgtgagaaagttttagaagtaacaatggctacccatttggtcgcaagagctggtagagttttcagactgaatgaatcccggcagtgaccctctcctacctcagcgctacatttatctttcggattgtttcacaccagcttgaagagattagttatctcataggaagcaaaatctctcttttctacctgagttcattgacttcaggaggagggtattctcaaaatccaccacaatcgttcaactaaacagctctttgtagcccttggtattatcactggcacatgtgtatcctggttctttaaattcagtgcctctagttattgttagatcagtttcgtctttaaaatagttgagtgttccaaactcttctgagttgaacatacatagaaatgtattccatagtccaaagcctactgttatgactcaaccagacgagagaactaaaatcatcaatagtcctaagaggacttcaggaataattttgcaattattacagagcacttggaggatgaggatcaggcataggagcttacttataaaaggcttctgcactaaatgaaacacatatgtccattcattagccagccttgcagtatttttcaattaaatccctgtggctgaatttaaaatgttcggcaagttcttggtgacccagtttaacatgtgcctaataccacactttattaattaaagatccagatatgcgcttcccgagtttgtcccggagaaaatgtttaaatgtgtcttgctactcacttgcaaccataatatctaaattataaaattaagcaagagttataagaaattctattcttctatttctatggttctagatctcattaggaaaacattatataaataaaaaaatacctaatagtatttattgagcacttactttataccagacaatattgtgattactttaaacttttaaccctaaaacaaccttattaagtagttaatattatgatctccattttgcagatgggaaaactgaaaccagagaatttcagtgacctgttcaaggtcatacaacttgtaagttgcagttccaggttttggcttcagtaccagggttattaaccacggtaccaattaactcctgctgagcatttaggaagtaactgttaatctgtgactacaaggattgataagctatattggaagaaattgagaatctgatattgccagcactgtctaatagaattttctgtgatgatggaaatgttctatgtctgtgctaccagcatagcagccactagccacatgtggtggttgaatgcttgacatatgtctagtaagactgagcaactcaatttttcattttatttaattttaattaatgtaattaattaatgtaattaatgtagttgcatgtggctgttgaacacttacaatgtggctagtgtgccttagaaactaaattttttatttacttattttttccagttttattgaggtagaaataaatgacaaataaaatttgtatatatttaaggtgtacaatgtgatgagttgatatacatatacattgtgaagtaattaccacaatcaagctattttaattaaatttcaatcaccatatgtagctactggctactgtattggacaggcaggcttagaccattaaaacatctataatttgcttgacatggctcaacctctgaatatgtttcattttcctaaaaaaaatttcactggatggtttctttttgcttagacctagactaggcacatacatggtaaacacaccaaaaataaaaaccacataacctggacctgagatctgagaaattatcattttccaaagagatgagatgtgtgctttcaaagtgggctttggttaaatgtagaagacataggtaagagcaccagtccttgagtcactgcatgagtttgaatcctgactccaccacttataacctgtgtgacttagggaacataatttaacctgcataaatctcagttttctcatccagcaactggagataatagtacgtacctcttagcattgtgaggattaaactagataatttatgtaaatcaccaagggttaaggcacattcacagagcactgagggcagaagaaatgtgggctcctgtgcaggtgaataacctgtgaaggtatgaacagaaagtagaaaggaggaagcaagagagtaagcaagcaggtaggaaaacatcaagacaccagaaacatgtaagccaaacgcataataagggcaacctggaaaccagtggagaattatcaactaattgttaatcagtcagaactgaagtgacaagagtagaaatgcacttcatcaagcaagcttcttcttatccctgtttctggatttgccttagttcctgagatgcaagacccatcccagcagagatggccttacccctgctcaaatgaataagtgcttggtgacaccagggggggaaaaacagtggtaggaaggtaggaataagtatgatgtgctttggagcttgtgagaaaaccagcgcagctgaaatagacttacttgctgttgtgtacatggaggtaaggttgggcagaattggacagtggaagctttaaaagtcaggccaaatacttgaccttcttttgccttgtaggcaatgacaaggcacagggtttttttatccagggaatgtcaggatctaaatagtaatctggcagctaagtaaaagatggattcagatggatgagacttgtggtagtaagactagataggtcatctaagcatggcacaaaaggagaaagggaggcagcaataatggtagagttggacataaaaatttataggactccgggtctaaatagaggtgactgaaagaagagggcaaagcaaaaaatacatcagatatgactgagataagtgcctgagagaaagacagtgctgttagcaaacaggaagctagttcggggaatggcaaatatggatttcttctatctctttaggtcttgttggatttgagaaacagtgggaccaaaagtggaaacatccaattgaatactgaaaatagtagtgttctatgttcctgggacaaaagctgggatgtcacaaaccattggagggttttcacagcccagatgtggccaacgtaatcaactctgacagattgtacctggaattccccatcttgggctccatacagatggcctgcatttttcttccctgtgaaatcatactgcctttacccctaaatattaaacattcaacagcctgctaatcactgtgtactctcagaatgagcctttgtctatatgctccaacctctttaattaaatgcagctagaatgttaacagtgcaaatatgagaatgcttaacataatgatttaacggccatgcctcaatcgctctccaaaatatgtttttagactcagaaaccctttaataattatatttatcatacatattgacatttcataattgcagtcagttcaagaggaaattgattttctattggttatgactttttgcaattctcattgcacgaaatctagaattacgttcttctggccattaccaagttctagattttaagctgaagcatgaaagttgttaattttacaaaaaccttccccaaaaggcattcatttccttcactggcaagaatatcacaaagcagccccttgcttcattgcatgtcctgtggcatgattgtcaccaacgaaaacacaatatgtaaggaccaaggtaattattcattggtttctggacattaagtcccccaaggaacaacacaaatatacatgatgcagcttctgcaatgaaacattcgagataccagtgacgttttttgaatcccaaattgccaagttactgatttaagaatgccctagagtataaataatttccccaagcctccctagtgacttgtgtcgaatgccttctgcttagcccattaaaggtgaaagccatgaaatattatttgatttgtaacacaagaaaatgccctaaaaccacctatccctctttggaaagctgccagaacaaagtgagaggaaaggtcaagcctgagaacgatgatttcaggttgcagcatgtggccagatgaaaggctgagcctataggctgcattcagtcttccagtttcttcatagaggatttatatttatttttcctaactcacataggagtcttgggttttgagatcaaaatttcaaatactttaatagtggccatgcaatattaaaaaaatttaacaatgaattgtgttgaatggttactacgtgtccttactacatttcctttgaattcgatttggagaagctagtttcaggattcatttgatttacatgtggaattgatagatattaaaatccatttcttctaagtgcctcacaattgaaaaacattattttaattctgttgtgccatgcattgattcctatccattttgatctgtgatcactagacatcagattgcttgtgaattgccagtgaaggtatgaacatcacaaacctgctaaatcaacctttaaaatgtaagaaaagtttaatttagagttacatccggacatttataagatgcagacattgatagcttggaagcaaaatgataaagtatatgcctcattctgcaaatcagttacaagatggaagtcaaattattccatctgaaacctcttaattcagcagaggaatagccacttgagagctatgatggcagtttatggaagtgtctgtgatccttcttgataaatctgtatccatttacacagagaagtcatagtaatctgtactaattgagagagcaaggatacaaacatcaaattattgccttctagaaggcattaggggacttatttttaaatttaagcttgactttttattggctacctattatctgccaggtaataccacgtgtgatctttttatgcttccagaaataagaatgagctttaattagtatgtcatttttgcttaaagcatttctctgtttaatttagaaatcttaacattctcctgaacatacacaatcttttctggacgatcacttaaaatgaaacttttagccaagcctttatctgaatgaataaaatttcaaattagaagattcttacttaccaggggtttagtatatatgcattaaacttgacatataagctttatatcccagggactttggtaaagaagtagctttaccaattgttattctttattctcgatcttcctaaagtcaaattattttttagcatttgtttcaaaatgattttcaacttacaaaaaagttgcaaaagtagtacaaaatttacatatacctatcactcaccttattctaatgttaacaacatacatacgtaaccatatgatatggtttggatttgtgtccccacccaaatctcatgttcaattataatccccagtgttgaaggtggggcctggttggagatgattggatcatgttgacagtttctcatgaatggtttaacaccatcaccgttgctactgtcgtcatgatagtgagtgaatgagtgagtgagttatcctgagatttggttgtttaaaagtatgtggcacctcccccttccctctcttcctcctactctagccatgtaaaatatgcctgctttccctttgccttccaccatgattgtaagtttcctgaggcctccccagaagcagaagccaccatacttcctgtacaccctgcagaactgtgagccgattaaacctcatttctttatgaattatggtatttctttatagcaatgtaagaacttcctaatacaccatactacaacaataagaccaagaaattgatataatactattaactaaattacatacctcattttaatatcactagtttatcccctatctttttcatgtgtcagaatccaatccaggattccatgtgcctgtagatgtcatgtctccttagtcttctccaatctgtgacactttctccactttccttatctcttatgaccttgacactattgataaacactgatcagttacttttgtagaatatttctcgatttgggttcttctgatattttctagtgtctgctggtatttttcactgtagagttactgtattttatcccattattggtgatatgttttttagggaaagtatttgaagtctatgctaatatcctgtttctcctcaacctttcacctctgatattagcatccatcaaaggattttgcctgtagcagctattactgtagtatttgcatactggtgattttatatttccttttttccctctttatatattaattggaattcttcccccgaaaaagtggatcttttttctctcccaacttcttatctgtttagttatgtatttatatcggtatgagctcatggtcattcgttatattctatgggtataatccaataatgtcattatttattttgttgctcaaattgttccaggtttgtacattgggagctccttacttttgggtcctatatccttctgacatggtccccatcatttttgaagcaatttctcatttttaccattacaagatataccaggatcattttgtatttttcctgcatcagtcctaaaacctacctgttctccggggagcactagttcctttattggagaatggtattagaaaccaaggtctgggcactagacgtgctcgatgctactggagggtcattgctatgaagccctgtctccaaaatacactaggaaatatgtgtatgtatactacttcatacatactgacaatttatatttattatttatttatcaaatttatgactaacattgattttgaagattttcaacttacaaaaaagtttcaaaaatagtaccaaatttacacatacctatcattcacctgatcctaatgttaacaacatacatacataatcatactacaataataaaaccaggaaattaacattgctataatactattaactaaactatatacttcattttgtgtgtatattttgtgtgtatatgtatatgtatatatctgtctgtgagttcatactgatgccagctgaacaccacaaagttcattctagccttctctttccttatttgcaacatctttctccaacaatgagaaatccggttttctttatctgcaatatattaacatatttgttaaagacagaatgtatataagttggagttgctaacccatactcctttaagaaatatattgaccagcgagagcacagtatttctgtagagtttattttgcctttaggtttgtggtatccagtcaaaatagcttttcaaattacttaggttagttatgttcttagttacttaggttagtcatcttcttgaatgttgttatattcattggtaatagaattaggtttccttggtactgttaggattccgttttaagttctcctacatcttggtttattttaattatttctttattttggagtaggatatgaagcattactgtagttctaagtctcaaaactatacaaaagttatgtgtttagctatgtccccccacctttatccatactaacttagggccataatccccttctttctatccttttgccacccactctttgcaggttgatcaatctctttagtttgtggtttatctttcctgtacttcttttgcacgtataagtagatatgtgtgtatttgattatatttccttttttcttacaagaagggtagcatactgtagatattcttttatacttttctgttttcacttaaatttatgcctagtgttccactattggaatgctaatcaagtgggagttatttctatcctacagctcaaggtcatcgccaaggtctgcttgcaaaagttcaaaaaaattgcagcctcaggcataaatgggttaattgtagaagttattccagatcagttcataaagatcttccacattactaatagctgtgtagtacttcattgttgaatgcaccatggttaattagtattgtttccaatattttgctataacaaatatgctataatgattgacttaatgaatgtgtatttttgtgttgttaaggatgtatcttcagaacagattcctagaattgggattttagagtcaaaagataagtacatatgtggttttgttaagtgttatcaaattttcctctggaaggcttgtatcaatctgcattcccaccagctacttataagaatccctatttccccagaatctcataagacaaggtgatgtcagatttttagattttttcagataagaaatggtatcaagatctttttagtttaatttttccacctattcattttgatattatttaactgaacaaattaacacctttttttaacgtgccgtatcatataaaggatttttttaaaactaggatattcttgctaatataactaagaaaacttcataatgggctaaatataagagtgagatatatatttgtgaatagcctatgttaccacagcagataagtataggtacgtttatttttaaataatattttttaatattagggaaacattttcattgtttcctaaagtttcatgatgtatctggactccattacaaatgtcttcctgtcatagaattctgagaaataagtaggagcatatgaagaggtctgtaataacagcaattatggaaaagtaatttactgattgtataaatggaacagatttcaaatcgagtagatagaccataaaaagcaagtaggatattgaaaataaatattttgggagctaggaaattgctcattaaattcacataccaaatgtcaatattttgctaacgtttatataatttagtttcttagtatctaaaaccatacttttttttatttaaaaaaattcaaatagttgctaagatgatcaagtgtttgcagacattcttcctcttgtccacctggcagtatgaaacactgacatagaaaaacctttgttttgtgatcagtgaattaaaatacagcaagacaaagtgacttgcagaattatttctacattgagaaaaaggtagaacccattagggaatgaaccttggtgaaaatatttaaaacaggtaaggaactggctataaggaaaggacacagactttggttttaggcaaaaataagatgtggctgtaactcagccacttgttagcaatatagaaaccagaggcttccagcattcatggattttcaaaaaaaaaaaaaaaatgccctaccatgacacacactctctaccattgccatacccacatctactcaagcaaaaccttctgttagccctgtacgtttcagaagagaatgtccataatattagttaatgatattcttaacaataaattcttttcatgcattattctattgaaccaccaaaacagtcctaaaggaaaggtgtgattattgtccccattttacagaagaggaaactgagtctcagagagttcgagtaagtggcagagccaagaaacaatgctagatttggctcacacaaagtccatgctttaacccagagactatactccccagcagctctaccctccactcagcggactgccaacaaaaaaataggtttactgtgaaacagagactggagtaactgatctccatgtcccacccacagcaataaccatgaacttgctttttactggttcttgatttttttagaattacatgtataaaatgttgcacacaggccactcattctttcaacttggttctaaaatgtttccctaagtgatagtgctgaagcctgggccacattgctttgaacgtttgtagaattgcttttgcagaatatactctgaagtgttaccagcagtcaacactctgaggtcttacaagaagacctcactattgaacttgagctcactattgaacttattgtgtggacatgcctcagagaggagaaagaacttcactgtaccacccaggattccctttaaagggctcagaacagagccgggaaaatctagttcccaagcaactaatctgactaaatgtaatggaaaatgtaattttcataaagtcactttcccctcattgaccaatatgactgtcagagtggctcacttttatttcttataacatgaaattattattataccttatccctggagtcatctcattttccacttttctgcatttctcttatatttatgttgttttcctgcgtttgtgtgtctatatgtcatttaagttcagttttcaatgaggttacatttaaataaacctcctccacatgcccttgggcaagttgcttaagatttctgaatcttgtctcattagttaaaaggtacctgcctttcttagttgttaggactagaagtagtgtgtgtaaaatgtacaatataagcttgcaatgaatactaactatagttcgccactactgcgaagttggaggattatactccttaaaaataagtttaaaggtaaggaaagaactttaaatctatagtgttttttaggaattctgagttatattatcattactctatttgaatagaacgaatcattgcaaaagtctaatcaggaagccaagtactagtttctctacttcagtgtaccaaacaggtcccctttagtatgtcactgaatatttttaaatgtattggtattcttggataatgttaaaggatagtaaaatcaggaaaacagcactaataatttctaaaacccacaaatttccaaatgacaaccaattaaatattactaagacatttgaatatgctgctctttccaatgctctgagacgggatgagtgggagaaagggggatctcagcctttactcaatgccggtttgctgaatacactgagtagagaataaattcatgatctcaaaatcatcagtgacaccctttttctttcagcatccatctgttttcattcccagaaagggtcaagaaatcagttaaagttgcattccctgatctttctcctacaaaaaacaagaagtatggaagaaaaaaaaagatcaaggatcttaatgatccagttaaagcaaataatgtacagtggtttctggaatcatgcatgttgaaatatctccactcggatttgcaaattactctgggcacatgccaaagtagaaactacaaatattcattgtaataaagaaaaacggttttcaaggtgaaaatggtctttgccaaacagatttaaccagtctaacttaaaagcctctttaaattaccaaaaccagagcagtaaaatatcaacactacacatttatataacgttttgtttagtgacatttcttcattgaattctcaactgctgtggaaactaaccaagcctgtgaatttaagtgtttggccaaatctcacagcatctgactccagattcgcagttgatagataatcctcaaatctagttaatgcatttctgaaatagacatttatttcacagatttatttcacacacaaagggaagcaacacttgagaaatatttaacattttttttctctgggaaaagttggcaattaaaaaaaaaataactcatggtaaaaattccaggaagaaatagcaaagttaattttggttagagtcatctacaggaagaaaagaaagatacaagagctctgaggaaaacatatagactatgaatgagtgggaaaatgagatgatgcctagccttttcaaaccttcaggcataagaatacatgaaggacccatgacaaggaaaacagatagtattgagtgcaggaatgaagggttataaatatatttttgccgtcttgggaacagccataaggataaaatgataatgtcaaaaatagcagttgattaagaaatggcattgattttcccatactactagaggcacagaaataagaaaccaggataaatgaagttagtgttggatgacatagtaaaagcctgacttgcaagtaaaaaaaattaaaaaaagagagagaaatagttgaggatgagcagtgggcgccatttgcttccttgctgtgaaatattcacccatcagcttcaacgataattcattaatttattgaagcttcattagccatttcctttacacctagcactggattagccgctgtggggttcagaaaaaaaaaacgaagagacagaaatcctacattcggggacctcagaacttagtaggggacaagaaaaacattgtcattttggtctggtcgcaggaggcaatgtctaggtgtgcagcagattgcaggggagggcagatggtagtagggagatttgattcccttctgacttaattctcactgcttttttgtatcaccttcccactgtggaccccatggccctaacattgccctggaacggtacagcttcttgttcagtgtttatctgaacctacttctggatggcatttcctcctgtgtcttcatgttctctgctccccttcggccattgtatctatgaagaaggcattgtcaccatgtgccatggctcacccctgtaatcccagcactttgggaggctgaggcaggaggatcacttgaacccaggaatttgagaatttgagaccagcctggtcaacatagcaagaccctatctctatgaaaacaatttaaaaatcagctaagcgtgacagcctgcatctgtaatctcagctacttggaggctgaagtgggaggatccttagactcagggagctgaggctgcagtaagacgactgcatcactgcactgcagcctaggtgacagagggagatcttatctcaaaaaaaaaaaaaaagaggcattgtccctgtggtcactatctcctccctcctccccaaccccccactgatcctagcagtgttctccacatcagggactgactgattcatagttatgagcaatgatttactgattgaagagtggcatctatggattgaggacattgaagatacactgtggtaataacaaataatttgcctcagatacctgggacctggttgagcaaataagactgtgaaatcagaagacatgagatctgctttctaagacctcctcactgttcctcaaaccctccaggcatcatcacacctcagggccctcacacttgctgttccctgctcctgcactgctcttgccgcagaaatatatgtggcacctccagtcattccattgagactttcactcaaaatgcaccttcttagtgactctttcccctgttacttgatataaaattttcatcatcctccccaccaccatttattaaggagctcctctctttaatttatcacagtgtactttacctatctgtttgtttgggtattgatgtggtttggctgggtcaccacccaaaattcatcttcaactatagttcccataatccccacatgttgtgggagggaccaggtagagataattgaatcacgggtacagttcccccatactgttcttatggtagtgaataagtctcatgagatctgatggttttataaggagtttccctgttcgattggttctctctcattctctcttgtctgctgccatgtaagatgtgcctttcaccttcaccatgattgtgagggctccccagccacgtagaactgtgagtccattaaacctctttttctttataaataacccagtctcgggtaggtctttatcagcatcatgaaaacaaatacaggtattttttctccatctcttgaactaggggtttggtctgttttgttttgccatattctcagcagcaattcctggaacgtaatagatgctgtgtaaatatttgttgaataaattactgaataacagagtgctgttaacttctgctttcttctctgtattgtggatttaataacacttcctctgcctatctcaccaatttttgtgaaaatccaatgaaattgtgagagcgtgggtgtgttttgaaaactctatcgtgcttcccatgatactaatagtagcagtactgtccttgttatacattactcaacatcattataatcttccaatgtccttccaattgacatcctagaaggcttccaattgttccactgtgctgttgtagaatataccaccatcatgagactgtcaccagcaaaagctagcctgctaagcaggcacagagaatgtgcaccaatagacgttattgctagactcagacttctgggtgacctcctggcaccagcgctaaggtgccaggatggccttcagagagcaacatgatttttctactctccttatctctttagggagataggacaggagaagtagcagaaatttgccaatcctcttactgagaggggaaaacaggcttcctgacagctcttattacgttattacagttcagcctggtttctgggtccctatgccagtgaagccactccttcagtgcctaccagtaagaggcaatttgcaactagcaccataaatggcatttgtaatctagctagtagtgtcgtaaatgcatcctattggtcatgagctgaaccagggcaatcaaatgtccctgctagataatccactttgggaatgtgattagcattgtcttcattgacagatggcaaaagatactgacttccatcacatatataagttctgaccctaacaagtggtatataaacctaatttctcaaacttttttcaaggacttagagctctgtaatggaatattactagattgattgctgtgccttaataattagaaagtcttcataagctgcttacccttgataaataggattgttgaaacctccttgcttctggtgggctaataaggttgaagtgtcaagttttcaaatgcattataatcttagcacaacaggattcttcaaacctatccatcatctgccctcaaaatccactacagtcacatcttactttaaacaggctatcttgcacactcaactttttttaaagttaaggtgctgctttaacagcttggcaggctgttttgcatcacaagcttccacatgcatctaaggcatatactcttgttgctttttgaattttctctctggcaattactcagcttggtttgtgtttcccaagatgcagagcactttacgagagtatgtatttgtttccaaattccgtattgctggacgtgttcaaaacgtatccattaagtataatagcatatataatggaaagtgtaaagagatattcttaacgaaagagtacataataattgcacaaaattaaaggactcttcttaaaggatataattgtttctttcattaaaaaaaggataacaatcttgcacagattctgtggcactttcaacatggcttcaaggagatttttgtcttactctttagtttcactgcatagaatttgggttagaagtgatacaaactgcagaaacacctttctagtgaattttagaaattttaagaacatttatatttcttattaaagatagtaaagcatcattaaatatatgaaagtgttttgattcaacaatattcagtaaatatctagagtgcctgctagatatgctaccacataaggatgtgggaataccacagagtttctccatgtaaggtagtggaaataaaaacataaaaaagacatggcctctgttacacagagttcccagtctggtggggagaaagacgcataaacagttaaataaagcatcatgttaatcaggctgtagtctggctacatatgttgaaaatgctatagcaaaacagatgagtgtgattaatgttacctagataagggcaaagaagtctttttataggaggtagtatttgaactgggtcttaaaatataaaaggaaattgatcagggatttgggtcaggtcatgcattataagcagagaggacagcaagagcaaagaaatggtgcaatgaaggtactttgtctaaaaaatggtctaactaaaccatagcatgtagaggtgggttggcagggaaggaaaaggggtgaaaatgcctaacggtatcattattgaaagtttggttggggctaggttatgaactgcctcatatgctatgctgtggagttgatatatttatgctatggagattcaacttcatgttgtaggacgagggaaccatttattgtatttcaaactgatgcatctcctttaaaactcctctagagatttcaactcttctatactcctctcaatgttatatccctcagtttatgccttacatcgtttaacaattaagtctgtaccgatttgtacacggtgtttttgtttcatttgtttcatttttccccttagtgtcctcttccaaacttaattttaagcttcttgggggcctgccttagccaggcaattaattatgtgtcccttaatctcaatcaaactaaggtcaggagccccttattaaaggtcctctgttgaagctatgccccttgggactctggctcattgaactctcaggaagtcccttaggaaagctcccctttctgtactgcctttgcccaccctcaccaccttggggccactactctgggactctattctctctcaagtggcctcttacaaatacaaccatcctaggcagctgtcacatcacctcccgttttctcaagctcagcttctaccaaatatgcatgtcagaaagggttttagaggagctaaaatcagtgacttcatttttgaagagaatgactgtcatgggtaattgacagaattactgcatcttagccatagaagcattggaaattgtgcagaagctaaatggtttttgccactcaatatagttaaactctggaatgactttcgggggatacgtgatgaaagtagcgtgtttttctttaaccctggctactgaactggaattatggagggtcactggcattttttcaaagctctgtaggcaatttggataaacaaccagagctaaaactctggattagagagttagaccgacttttgaagtgtaacagggactagggttgtcaccttccacatgaaatcatgagcttttgggggctaaaagcccaaaggtagtaattgttaaaattatattttaaaatttttacctaattcttttaggtattacccaataaattcacaatagagtgtgaaggaagaaatagaagctgcagtgaaccatggtagttccttaaatctgaccccctgtccgattaactgagaacaatcacacttgtcccaacataattatagccacctccctttcactttcaaaagtattcctgtttgggcaacaaatgataagctcatcccatctatatatgtaactccaggtctgtaaacacccattttctgggtagttgatacttagggaaacaattagatatttcttttccacgatgattagaaggaaagaaaaacaaaatagtttcctaagagttaaattagtaaatcagtacagataatattcttacttcagagatatagatacttatattcagaaaagctacctagtttaaccaggtattttagtacatttatttttaaaagatattagctgaaatggatggtggagctgaaaaaaaagagaggggcttcaaaaaagcaaatttggacaggcatgtattggtggaaaaggtgctgaatgagaggaatatgaacactctgctaataattaaaaggattaaaagtcctagaagtcacctttcttagtttcttctaatgctttgttcaccagatggcattctgagtccggatataagctgttcaggtcctatgatcaaagaagaggggactctaaaccgaggaagtaaatcttgctagctctggaaaagaatacccgccccgccattcctaatttaaaacttgactttttggttagtgcatcagcccaggtggttgtggttagggccagtgtcacggaggatggctgattgtcactcgcaaagcccagcctctgtgccagcagagctgagatgtgaacctgaacagtggtaaattcatttagatcagtggagtcgcccggagggcctgttaaaccacaaagcgctgtgctccgctgccagggtttctaattcagtaggtctggggtggggaatgtgtgtttctaacaagtccccaagtgctgctgatgctgctgatactgggccacactttggataaccactgatccaaataatcccaccttttgacacctcctggcggccagctgctggcctccttagagcctcaaggtcagcctttccttctatttgaaaactcaacaatcatcttacctaccttcaagcccacctttgagaaaagagagttcagaagaggtcgtctaatccacgtggctcacaaagccaattatgccattatttgtttgcactttataaggatgcatttaccaagtgggttaggagacctgtgggaaattcactgaatttcttatattaatctgtcagtgtaaatcatgggggagtgatttcgactttaaagcaagtacttcttgtatgctctgtattagagagcttagagagctgtggactgatctgagtctcaaacccgaattaatcttattctctgcacacctgcactcacacacacatccacacctaaaaaaatccccattccaaatacacaaaacgtatttgaaaaatgactagaagtaataattaccatgtgtctcagaaggtttgtatgactagattcatatgccagctttattctcgtcctgtgtttggatattgtcgtctgacagggaaggaagctggtcttcagattgttgactgttagccccacacctaggtgagagaaaagcaggggctcagcgaagaccctgagggagctgagaatcagccctggtgaaagtgtgagggtctgtcttttagttaaacacagggtgaagcagttatatactttaaatgtatgttacaattctacaattgcaagaatgacaagaataatattgcaaactgtggtcactagcaaagaaaggaggagaaagaaaaggtaatcatctaggatagcactggccaaaaatcctactcaccaaagtgatttgcttagagcaaatcactacagaaaggacaacaaatttaaaatttaaatgtaaatctactattataataaaatgaaacgtgattattttaccagatttttaggtcttctgacctaaggctgtttagagtacttgaaaagaatagtttatagttcaaagagaaatgtataatttaactgaataaactgtaagtaaaccaaattaatgggtacactttttagcaaagaacctttatcacttggagtcttagcagtaattgttggatgtagtcaaataaagtttttgcaacctggaatttactgattctccaataagcccaactcagtagatttaactagttttgaatcatggatccctttgggaagtctttgaaagacaagtgcccttttcctaaaaaaaacaaaaagtaaaaaaatagccatagctacacagatacagaattttgagaatatggcgggtgtccctggatgttttgaaacccactgatgaggttccacttgaggacctgtccagaattacaagtggggaggctgatcttgaaggtagctgtcctgacttctgtctgatcatagcaccaccacctaacaggactctgactcagccaaggcccagcccctcttagcttcctcatctgctaaaaggaagagctggaccagaggactggtttggtccctactgtatctccaagtgtgtgatttgtcagtcatctgtgataaatcctgaaggctggttcttttccttttacttgtttcttctttcccacagccatttctagagttttggacacacatgtcttgtaacactctctaacccctttttttattaatttaggaacaatctctcccctttctattattccccccacttcaccaccttctttttctttaaggtctaacttctgatattaatcatttaaaaggaagagggaaaatatttttgaatgagtacccagtcctataaactatattagtgagttactcaaggattaattaaactgaataaataattaagaaattatgcaagcaaattcaatacacgtggagaatgtcactttgaaagcatgttcaggaatgatcatcttcctcttcccttacagactaggccttggaaagcaatagttggtccctgctgagtcaactccgagcctctgggtaggactgggagctagagaatgaagtcagtgtctgagaatctggaagatgagcgtcagattttaacagtataatcttgttaagatacacaaatctcttataattaccctcatgagtagtagatgtatatttaattactgaaaaattcagtagagatactaatgatcaataatggaaaaatccattagtccaacgataatttctcccataacactgaaatccaatctgaggggtcatgtagttaaaacataaagcatgtcttccaaatcagcaattcttttcactttcatccaatgacattattcatgataagacagaatcatcaaaagaggaatggctgtaagcctgttctggatgtcattaacattacctgaaatttcagtaatgagaaaagggtgcttatagttatcttatcattttgttgcatttttctatcatgaccactcatatttacatccatggcatggtttattgaaacaaagctattatattgagttgtaagggttttttaaaatctattcccttttgcctttgcacttaacatattcagaatgtgtgtttgccatttgaaaaataaactcaatgttacatagtgaatgaaatttagaggttgattatgttcaacttgttagctctatgattaatagagaagaattggaagaaagtatatcatatttgggaaataagagtgaaataccagcctactgttgcttacaagtgtaatcttatcatatgcagattgtttaaaatcactttttcaaattagttctattcgggagtgaaaatgctcagattattgaaaccttaattttatctgaagataattatccaatgttcattgagactattatcacagtcacgaaatatttgaaaatctgtgtttgctgttgcagtgctaactaggattatgttttcccatttcattagtttgtttaaaatggtaagtagcataaggtgaaagaattgaataaaacgaagggaataaaaatctctatttcttttaactatgctttattgttctccattattgggaaataaaagagaggaaataccttcaagaaaggacatttatgcactggaaaccaccgttgtgaaatatgtaccatcattatactgttttacacatctgtactttactgagggggtttaaataagtgcttgaatttgtgaccttcaaaagaaacagacttattggatgaaagagagttgacagaaaccaagtgcttctaagagagcacatggtcttaatcaaaaaaagcccagcagaaattaaacaggacagctgataaaagacagatcatttagatgtatagatttaaaaaggaaacatgctgtattcaaactcactatagattcatcttaagaataaattaatttcataactgtactcattatctgaaacatgcccccagagattctggtcattaccccaaaaccctgtaagggaagtttaatttatatcataagcatattcaaaggaatgtcttagtaagagtcccactaattcttaaagagctgggaaataaacctagactactattacagaaaacctttgcctttacggaagtaagatcataatgctcaggacttccccaaaattccatttaccttgttttagaaaatcagcaatagtactcaattgttatatatatttatttgattttataagcttgagaatggaaagttgggacatacatatttacggtacggaaatcaagatgatttctggccttctattttttccatctgccaatggagagacctagcccagtgccaatgttcacttacctttcaattgcttatttgctagctaaggattattcgtgcattcatgcattcatttattcattcaacaaatataacttggtgtgcttgaactgacctaagctaatttggctgttaagcaattgtcagggtcttttggtagctcccagaggttattttggtgtttattaagacaagtcccacaccatagccccctaggtggttacaatcaaagccaagcccagaccaagtttggacgaactacatttactagcaaataggaataaaaccatcaaagcctgtttttataagcctggggcagttcctctctgccctcggaagatttcagtggtttcttatgtgaatggctcactccaggcatagagagcaggaactggtgaaagcagactagctactgtcattgaatgatgaggttccttcccatgcatcgccttttattttgaatgttagggcaagagtttggtaggtgaagccacacatccaaattctgataagttagaagcagatacgttaggttccaataagttagaataaatgtagacaagtccctgaatgcttgctactcaacaatttcttcatcattctttcaatcatgatggtattatccaaagtttatgttctaagtgtttttagaattttaagcacaagggttagctagcattcttggctcaactctagtgtttacttgattaaaggttacaaaatgaaaaccaaaaaaagagctttacattttatttatagagtttttttttttaagaaggcaaaatctcttactcagcttaactttgaaggcttagctcaggattaggcattaacatgttgttcatgttgttcacttactcacacaaatacacttgcatccaggaaagcatttttctttttttttttttcagtaatcagacgctgttatttaggcaaaaataacaattgctgggtgtggactactatgtattgttcccaagcttgtgcatctcttgaaggagtgcctacatggaaggaaatgtttttctctcactttccctttctgcttctcctatctttcctcagcgtttaccctcctgcagcccctcatccttgtcttcttggctgagccacagaagtgctacttgtaacacccacagccagcctggaggtgccaacagggagcaggataaagaggttcaaggattggaatgggtttaaaacccatgaacacgaacgtgttctggtttctccttagtttcttagtctatttggtttgctgtaacaaaaatgccatttctgggtatcttatacacaacagatatttatttttcacagttctggaggccagtaagtccaagatcaaggtgctagatttgttgtcttgtgaaggcccgctgcttgctttatataaagatggacatctttttgctatgccctcacatagtggaagggaaagcaagttctctgtggcctctttcatgaaagagtgctaatcccattcatgagggctcctccttcatgacctaatcctcccaaaggccccacctcctaataccatcactttggggtttcattttcaatatttgaattttggggatacataaacatccagtctgtggcagcctctttccctgctcccagctgctaaagatctgccatccttcaggccagacacaatacccatgcatctctactcttagttctctgaccacctcttctcaaatatcatctcctctctttggttttcaaatttattatacagaaaaaacaatttcagcctactaatgataattttaaaaaatgtggagatggaaagaacacccttaggtctcccaacactgtgattttaacctaacaaataacactcaaatgtacctagttaaaattgcaatctgccctgtctccaatcgctggtaccatgctcctctgcttcttttatccatagtacatatcatccccaaacagtctatatgatttacttattctttcttttgaatctttattatctcccacccctgctgaaatataagctccatgagtgggaggatctttgttgtgttccctgataaaccccaggtgcctaaaacagtgactggcaggcacatagtaggtgttcaggaaatacacgctcaattgaattaaagagaattcctaaattagtttcaaatactctcttaattgttcatttcacttgccacttaggccatttaaggcctgagaaattgcagtgggctctaagaaaccaccataccctaaaaggatgataaagtatgtactttagtagtagttagtttcactacaaacattccattgtgttcgagcttccagtagaactcaaaagccaacaagaaaggtgcaaaaataaatcccaagttgcatctgaagactatctttcataattaaggttttagaggtcatcactcaatcaagtataatcctgcattaatattaaagcctaatatttaggggtaataatagagtcaagtgtcttcctgggagtgcattaataccatacaaacttttttaatttgccaaaccgtctgattaaaattattaagtagctctcttttgcaaggtgctgttgaaagtaattgtacatgcaacactcacggagtattttttcatcttgtaaaagggtaagttgctaaactttgattaaaaatcagacacagaactagatatatctgacattgtcacatatactattgagcgactttaatcaaattcagcattattatctttttatttgcttttactctgcctgcaggtacaataaagtgaaaatatgtaagcaatggagcatatttatattactagtctgtgtgccaggtgggttgtaaaataaatgtaattgttttcaaagattgaaccagattagcatggattaacacattcattttggaatccatggcaggaagtattctaaacatgccttcaaacagcccttgttactctgtttatatcccatcttagtactacaaaatcactgccccataaaacagggagcattttaactgtttatttttatatgaaagaaacacaatttattaaacaagacaagaaagcagttttctgccatattgaaggccagatttgcagtgatttgcactctgcctttcagcagatgaacaaaagtgacagacatggaagccagagttgtggctgcaataaatattcataactgctcctgcccaaggagcaaagggaggggtctgaatttgcagcacatggttagcagaggatgaatcaggactagactgtccaacacacacaggcatggaagccctgggcaatgcaaggctgaaattcctcaccgagaaggagcactgtgttactgggtgattttgcagaatcttgactcatgggaggtgaaatctttcagatatgccctgctgatgccattatccctcctctctaaccttaaaataaacctgcttgagaaagtgtattgttgatgtatgacatccatcggggagagtcagccctgggggaaaaaaaaaaaacaaaaatgtagtttctgatgcacttcaagacccaaggtctactacaagaaacctacccaattttgaaagaaatcagtctttggtgaattatgctcagtgaagctaaaagaaatgtgtactgtagagtttctctggatgatgctgggtactggcaaatctcgattctcttactccagtcctaaggatctctttattttacattgaaagatgctgtaattcatttctatatttaatgcagggatcttgcctactgtgaaatttagtgtcactcatgcaagaaatctctatcaaatttcccaaacaactggtgagtgaagaaactaatatttttttttcgtttgttttgtccactaggaaacttacagtagcaaaatttgtgtcccagattatttagtaactatgtgagatcttaccctctacatttctgttttttttgttttgttttgttttgttttttctttttgagacggagtcttactctgtcacccaggctggagtgcagtggcacgatcttggctcactgcaacctctgcctccggtttcaagcaattctcccgcctcagcctcttgagtagctgtgactacaggcatgtgccaccatgcctggctaatttctgtatttttagtagagaccaggtttcaccatgttagccaagctggtctcgaactcctgaccttgagtgatccacccgcctcgacctcccaaagttctgtgattacaggcatgaaccactgcgcctggccttaccctctacatttctatgtcctatttcctctccgttttcatcctaatatcgtaccattgtttatttagcttgatttttaaatctttattatgtacatatttttaaataaggctaaattgtttatggaagacacacattcttcaacacatatattgactaatgaaactgtaaatcatatgaaaaactggctaaaattgaggaagtttgcattattaagcagaggatatttaagcttcttctgttggtcagaatcatagatatttgaacatcactcagtaccttacatatatagagagtgagagagataccaaacatttctgaaatctttaaccggatgaataccctacagtgatggactaatatctaagtaatttagtggggtgaaatactaccaattttacaagagaaataatgcatggggatgtttttcttccagccgctaggcacggggtcaggtgtcattctcctgggcgttgggtcactatgtgaggtttggcccactggtggccgacctgtttgttttcagtggtgtaattggtcactccagagatgaatacttagaaagcattagattttagaccttcactgactcttccagcttgccagaacaattgtgagtgagacatctcttcaagaatgaaatcatttccccctgcccagctgccatgagacactcatatgttcaacaaatgtaaaacatgcttgactctgcctgaggaagtagattttgcagtgccagactttgtttgggaatccctttgtgatccaaacagagaattcttcaacaaagtatttggatgttgctgcaagggagggctgttatgttttactatgtagctatgcttagctgtggtgtagaatgctagggagtgaaaacaacagattctattgcctgagactgctaacataggaattttttttaaatctgattatgaaacattattctcaggataaatcactttgttagtgctttgttctgtgcttggttttgtttgtttgtatttttgtctacattgagttttctcacagtgtcctgtggagaggaccatgaagtaatatattcaaaaacagataaaatagcctaagtttgtcctctctcaaagcccgagccttcctagctcatctttcatgctaggagaactgattattcacatcaggaaaacactgattcagtactacaagcaaagaggggtgactctgaaattgttttctccagagttgttagctagactaatacgaaatatggataaaggaaacttcacatttcagcattacattcagtttgtttatatcattatctcatttgcctctaattctttcaaaaaaaagatgccgccaccagtttttttggagctttcatggttggaagcattttcttaagggttagacttaacaccatgcaccaggaagagctgagtatattagctggataatgtgcatcataaagcatatgccaccacccttgtcttggtcagaggggagtgagctgtcaagttagtatggttagtacgtagatgagaatcaacacaccctggtcttagtctcagctttcactcctactgtgttacctcagctgcataactgagcttctctgggacacgtttatgacatatgtaaatgaggaggtggtactaaattatctccaaaatgtttctaagctcaagctggctattatattcacatttcagttcgtctatctaaaacatacttaccttgattaattagcctgttagaggaatgtaataaaaattatgagctttttcttctcatttaatccccattttcctctatcaccatttgtccatcccattttcatttcaacacacttgaaaaaggcactaccctcccatctgggataccagctccgtagctcgaatggggtgcagcatggggactggcccaggaagtgttttaattttagacagagaaagaaaacctgtattgaataaagcccccagttgcccaatatgtgtcttaacagggaaacttgttcaagatgaccaggactcatcttgaatttccaaaatggccacactcatgtttatttcagagccataaagcaaagtccccaaagcctgtctgcctgcctcaccagaacctttgaatgcagtcattctctgcttgttttttagaactcacacttagcattggattaaaacactcaaatctagggcattaaaatcaccccttttcagcatatgcatcttgcaagatttatcttctcttgcctgaatccctgacacaaaccaaattgtggattatcttaaaatagacattgtcataatttattaatcatcctttaaacctcccaagtactcttggtatcttctcaaatgctctcattctgctatgtattcttcttttaaatgaatctttacaagtaagtattgtttacttctcatttaccttgtaatatttaaacatggttgtgagacttcacagaaaaaggatcagggaattttagcattttcataaacacctaagtaaatgtggcttaagtgacaccaatctttagaaatatgacaacttttgatctttatacccattttttttttgtgatgtgtcacctcagtagtaaatcctcacacggctttgtagatgatacacttgtaaaacgcatggcatatgctttgcctgttaatctttcctctgccaatttgcaatggaaaaggaataatcatcagccaacttttacagtaaggaaaccaaggcagtgtgatcagtcccaggctaacaagtcaaagggcaatggagttaaaaatgaatgctaggcactcagtgctcactctatgatgagagtatgctgcagagccctgagatgaaatccataggcatggttaactgacctttaggaagtttgatggctcagtgggaggtcttgcatggtattcctgtattcatttcaaagaacagctgaaatgtcattattacatgggacagaaataatgcaaaattaaatgcattttctgcaactgacaatattaaatagtgctgtgattttactgttctcatattttctaacaccgctctataaattccttaacattcatgtacagaatatgataggtagaacctctgaattttgactatctagcaaaggttagtgcttcacttgactcagaaaaccaaaattatagtcctggttccaatgtttaccaggcccctagccttgggcaaatgacctaatcttattacaccccaccatctttctctgtataattaagtaatgatgtgtagcatcttgagatctgattaatttattcattcagtatctactgagtgcccattagaagacaggcactgttaggaatgagaatgagctaggctgagtatccttcagtcttccagacagcctgaattactcactcaagtaacacttccatctctgtgaatcagcaaagagttaaacaaagttgaatgcttgagatatttcattaggtcttttgaagcatagttccctgttatttcttaacctttttatttgctcttaatcttatttcctacacatgatcgagtttggtttctcagatggtgctcagtgaattaaaatagacagtataaattaattttgtgaataaaattttatgagacactacatcaaatacttcagtaaaatcaagatatattttatacccattgtagatattcatggtctaatcttgtaattatgttttttaaaattggatttgtacagccttattatccaattattcaccccatgctgttcataggtacagctatattccttaatgttagttcattgtatttactagaaagaataatgtcagaagtaattttcatgattgttctactttctctactgtaaatatataactcatgtacactttttcaatattatttctttagatgaaaaaaagagactatcacatatacagtttttccccactacagaagattgggtgttagtaagccatcattttatacattttgtatcattttgtacatcaatgtacttacatttagcattcaactgctaataaaaggaacatttttaagtgttactcaatctaaagataacgttgtcctcactaagtcagttctccatgctctatggagattgtgagacccagagaagaagcctaaggtgcatatgaccaagtcagtattttctcataaaaagttttgagtgtctctcctatgcttggcattgttaactctgagaatccacaggtgaatatgacacatccctttccgcaaggaacacacaactttatttaactaccaaccactttccctttataaggtaggtataaaagctaagtatctgaatataagtattaattctctttcagagaaagctccctgagagagatgcttgatacttttaattcagttccacttggcaaccttgcatggaatacaactgggtagttttaatattttctatgaatatgtgttggtgcatctttgcgatcaccaaaacattacattttttaactttcaaggtatttttgaactgttatgtaaattaaggcataagcacttttaggtaataagtaagtttaggtcactagaccttctttgcgactaatgaggaatacactacataattgtcagattcttcttaattgaaaaatacctactcaaattccaaagttatcagggactgaactcaatattagggtaaatatggaatatataataactgattatgtatcagattgaagcttgaataacttattcatacatcataaaattgtggattagaagtttaactcagtcctttgttttactgctgaggaaaaggagatctacagaagcaaagatatttgatcaagatacgtgaaagaattgaagctagaatccacatctcccattccacatctgatattctttttattatgccgtattctgctacaaaaattaaggatggtcatgaaacataggcctctctctgtctgtctgtctctctctctctctctctctctctgtgtctatgtatagagatgcaatatggggtgtgcttaatattcactggagtccatgagagatagatagatagattatagatagatagatagatagatagatagatagatagatagatagacagacagacagacagatagacaggaaagagggagaaaagagatatttgtgtttgtatccatatattctggcaatcattagaatatgaagcaaataatatgtgtgtggctaaaaaatgtgagtagagagtatgtttatatgtttgcaacagcagatatgaatcagtaccaccttagtggtcaaatggatagggtggaagcagaactcatacaatcctctggttttctagccttagcaaaagataaggatactaatgaatatgcttaaatgtagagaacaaagatgatctaagttcacctcagattcaccattgtgttcaattttatgtaggaaagatggactcctcagtggtggcacttcatgaattatttttaaaagatgtacattgataaacaaaattaaataaggtgctgttattttttgaagctctggatatgtctgtattggttggttttcatgctgctaataaagacatactcgagactgggcaatgtacaaaagaaagaggtttaatggacttatagttccacatggctggggaggccttacagtcatggtggaaggcaaggaggagcaagttacctctttcatggatggcagcaggcaaagagagagagtttgtgtagggaaactccagtttttaaaaccatcagatcttgtgagacttattcactatcacaagaacaccatgggaaaaacccgcctccatgattgaattatctcccaccaggttcctcccatgacatgtggaaaatgtgggagttaaaattcaagatgagatttgggtggggacacagccaaaccatatcattccacccctggctcctctcaactcttatgtcctcacatttcaaaaccaaccgtgccttcccaacagtcccccaaagtcttaacttatttcagcattaattcaaaagtccacagtccaaagtctcttttgagacaaggcaagttcctcctgcctgtgagcctgtaaaatcaaaagcaagttagttacttcctagatacaatgggagtacaggtattgggtaaatacggccattgcaaatgggagaaattggccaaaatgaaagggctacaggccccttgaagtctgaaatccagcagagaagtcaaatcttaaagctccaaaatgatctcctttgactctatgtctcacatccaggtcacactgatggaagaggtgggctcccatggtcttgggcagctccacccctgtggttttgcagggtacggcctccctcctggctcccttcacgggctagcattgactgcctacagcttttccaggtgcacagtgcaagctatcagtggatctaccattctggggtctggaggacagtggcccttttctcactgctccactaggcagtgtcccagtagggactctgtgtgggggctccaaacccacatttcccttctgcactgccctagcagaggttctccatgagggacccacccctgcagcaaacttctgcctgggcatccaggtgtttccatacatcttctgaaatctaggtggaagttcccaaacccccattattgacttctgtgtacttgcaggctcaacaccacatggaagctgtcaaggcttggggcttacacactctgaagccatagccagagctgtaccttggtcccttttagtcatggctggtgcagctgggacacaggagaccaagtccctaggcttcacacaacatggggaccctggacctggcccataaaaccatttttttctcctaaacctttgggcctgtgatgggaggggctgcagcaaagttctctgacataccctagagatattttccctattgtcttggtgattaacattcgcctcctcattacttatgcaaatttctggagctagcttgaatttctcctcagaaaatgggattttcttttttagcacattgtcagactgtaaatttctcgaacttttgtactgtttcccttttaaaatggaatgcctttaacagtacccaaatcacctcttgaatgctttgctgcttagatatttcttctgccagatacgctaagtcttctctctcaagttcaaagttccacagatctatagggcaggggcaaaatgctgccagtctttttgctaaaacataacaaaagtcacctttgctctagttcccaacaagtttctcatctccatctgagaccacctcagcctggatttcattgtccatatcattatcagcattttggtcaaagacgttcaacaaatctctagggagttccaaactttcccacgtttttctgtcttcttctcagccctccaaactgttccaacctcttcctgttacccagttccaaagttgcttccacatttttgggtatctttttagcagtgccccactctactgctaccaatttactgtattactttgttttcaggctgctagtgaagacatatccgagactgggcaatttacaaaagaaagagatttaatgcacttatagttccacatggctgcagaggcctcacaatcatggtggaaggcaaggaggagcaagttacatcttacaaggatggcggcaggcaaagagagagagagcttgtgtagggaaactccagtttttgaaaccatcaagtcttgtgagacttattcactatcatgagaacagcacaggaaagacccacctccatgactgaattacctcccaccaggttcctcctgtgacatgtaggaattgtcggagttacagttcaagatgagaattgggtggggacacagccaaaccatatcaatgtctaaatgcagagaactcagagatatacagtctttatcctttgtcactttgttttttgctgcttaaaaattgtattccactagatggagaacatgttaattaaaatattgattgtaattgtccttttgagatggaaatgggtctgggaactatgctacgtgaggtaccatggaagcatttaaatatattttccccaaagagcagactagaaagagaaactatgagataattcagtgttgaatacttaaagtctatcctttctagagttactctatgagaacattacagcgagacatattttgaatcaacacaaggaatagttttctaaccttttaagacttgtctgaaagtagtctgttgctaatgagacagggctctctactactaaaagtttctaatggaggtgacaccttttctgggtgattctgcaggaattctttaaagcagatggcctctagtgcgtctcaacaatgagtctataactctgctaagacatcactgagcaattataccaacaagaatacaaaggaaatctaaaaacagaattggtgtttggtttaattgatccagtagaataattgtggcttcccagagtgctgtgttgagaaggatcctgaggtcacctctgggctcattatgattgagcattgtaattgattaatgatgctacacagggaaagaagtgaaggaataatttcattctgatacacatgcctggcatgtgccatcttgaccttaaaaggtaaagagaaaagtcttctctccattttccagcatttgattattcattatattcctttgttctttatgcacctaagcatatttggttaactcagttttgaaatttcaatgatgaatagtctttcgtgtagagggtttttaaaattaactgaaaattatacatttataacttagaataaagcatgtggtgtatattatagtctcttttaggatgacatgatttgattaaagattataatgaacaatcagaggatttaactaatccaaattggccatttaaattattgaaaatctatctgtcttcatgttttgggaagctttgtgtctgacttccacatgccctttgttctttttgaagtttgcctggcttaaagaaaattattcaatacagagctcaattacaaatgtgctttgacaatcaggaggctgtatctgtggttttatctggaacttcaacagaggtgataaagaagttccatggcctggaatataaattcatgcatctacaaaacagtaatgcctttccttagtgtaaaacttcagagaagacaaaatttctgagtgcttctggttcagaaaagcagcaatacttacagaattgtttttttcttactcagatcttcttgtcttaaaaaatatgcagtgaagttcatgtaaattttttgttgtgcagccacaataaaaagttacaaataaaaaagtggtagctaacagtattttgccttttgccaaatatacaagtgtcacaggacacccaaagtctaatgaccttgagaaaagtataaggcttgaattttcatacagatagactttcctaaatgactttttgccataattacacacagttaagcatttattcagcatcaagcacaactaatgtcttttcctaccatttatttccccttctaaacaagtttattttagtcatgctgtttagtgaattattttcctctgaagacgtgtagacaaactaatcaactaaagaaaacctaaaaactgaggagtcactgatttgagttttttaaaaagttaccatctaattgtgcaactgatagtttacatgtatctattttgaacattttatatataacctatgcacaattatcctaaaataaatatttaatgaagatggaaaaccataacacaaatgtttcaaaacataacgtcttttgcttacaatttttcctactctttgggtggcatgataaagccccttgtttttttgtttgcctgtttgtttgtttttgagacagagtctcactctgtcttccaggctggagtgcagtggcatgatctcaactcactgagcctctgcctcccgggttcaagcaattcttctgcgtcagcctgccaagtagctgggactacaggcacgtgctgccacgtccggctaatttttgtattcttagtagagacggggtttcaccatgttggcaagaatggtcttgatctcctgacctcgtgatctgcccgcctcggcctcccaaagtgctgggattagaggcgtgagccaccacacccggccgccccttgtatatagacttattctctaccttttaaagcactagaaaagcaacaatgaatattgcaaaggcaccagttcctgttctcaagatatttgtggtctgcaggaacaagacaaacgagtcaaatagcaatgacagggcaaagtggcatgtgcttaatgtactttggggtccataggatgttgtctaatccagactagaggggtgatgcccacggccttgcaggagaatggcacttggacaatatgtgggagcaagatgaaaggtgaataaggtcaggagagtggaaggcatgcaagagaaagaaagaacatgtgcaagagtcctgaattgaaagaatactgggccccattcaagaaattgcagatagaggaaaaaaagattatctttatgttagagagaggcagagagtcatgtctacacctaatcattttccaactcacacacaaactctccagacagccctctccctccttgacatctgcattgaatggccaaaaataagagtgccagccctgcactaaaagaagtagtttagtaatgattctgaagtaaagcagtggtttgattctgatccaggaataccatcgttattactctctcctaaagcattcacagatgaaagcagtgcagtcatgaaatgtgcaagcttctttacataagcttcttttgtaaaaaatggttcctttgatcccatctcacaatctacttaaaataaaatactttcaagattttgcagtgacagagctcagcacaaaaatggagctaccataatgccagcaagaatataaaaatttttaaggggctgttggatatgtttccatttgcctgtactcagctctaggggtagtactggacataagcataaataatttgccattttaatgtcctccctctgcagcaggaggagatctttcccaacatgaacctcgggttatagaaaagagtcattgtggataaaggtgtcagattacacggagattctgctgatgagacctgtttcacaggtccaagtatcaggtggttctgtgcattcatcctgtggtctttctctcctggaccgctaggagaccaaaggaccctctaggataagcctttaaataatcttgaattttaaaaaattaaaacaatagtaataataaccttgaatttttcactagagctttgtttaactttaacaacaacaacaaaaaatgacataaatggtgcttgggaaaatgagatcacagtcaaccatccaaactgcactatgtcccatctctttgacacttgggaaatggcactattagcaaaaataagtacgataatatcgtttaaaaatgaaggtgaagccatgagttactatttaagcaaaatctttgcatctggcagagtttctgttgttttaggaatcagtgtgtattagagaaccatagattagctgtgcatattttctcagaagtacaaatcccttcagtccaatagtaaatactgagcataaaaacatcatactttatttgacaaaaatcttcaatagcctccatgcattttttcagaatagcaatcatcatgggaaagtagagattaaataattcatattcaatagctcagtaaaaaaaaatacttttcaaaataggggcaaatacgtttgctcattcctctgtttcaagagcatatgtggtgtaaaattttcagaagactattatgtgcagcatagacaaggttatgttttaaacatgacaatgaaggtttaaagatgattttcaacagatttcagaaatcacattgtatttaaactacttgaaccccttctgctaacttacagctctaagaaattcctccccttcaggatgcctcttctccatgttgtaccacttgaattttatcacccttgagtatttgttcttacactagcaaatatgttttgtgtacccatgacttcagatagaaaagtcaccaacagttgtcctttgatgcacagtgttgaagacggaagcagagcagacaattaccccaaatcacctggctttcagcacctcaacaccagctgcctccctaatattttggaagcaattaggtagaggtctcttggaatttggtcaccaaaatgactacatttctgccttgtaggaagatgatctacataaccatgactgaaacaaaagttttatctcctcatcatttatgtattctttccttagttaaatgttgattagatcacagtgagtctggtgtaacatatgaatatggtacagtcaattaacatgagggaaaatagacattttataacctctttccagaactgaggtagttatataaattttttaactgggcaacaaataaagtggctggcctatcagatgtttttactcctagaccttaaatttttttttatactcattatgattataaatttgtataaacccctaagttacaacacatgggaaaaatatctttgtatttatcatgtgatagtagctatacacaatcatctgcattaatggtgtgtgaagtcataaccaatttatgaatgtaataatacagtaagctttaaaacatagagtcttcaaactttagcatggtgtgtgtatgtgtatgtgcgtgtgcacgtgtatcagctttactgagataatactgatatataaaacactgcacgtttaatgaacacattacccttgaagagtttggacatatgaatacccccatgataccataacccaatcaaggaaataaacatatttatcaccccccaaaatttccttgtgtccctttgtgttttattttttgcagctttttgtgtgcaggtgtgtgtgtgtgtgcgcgctaagaatattttacatgagatctacccacttaataaattttaagtgcacattaccatactgttaattataggcgatatattgtacagcagctcttaagaacttactcattatgcaaaactgaaactttaaacccattgaagaacaactccccaatttcttcttaccatagaccttggcaaccgccattcattctattctctgcttctatgagtttgactatttcaggatacctcctataagtggaatgatgcaatcagtatttgtccttctatgcctggcttatttcacttagcataatgtcttcaaggtttatgacaaggtttatttttatgacaggatttcctactttctaatgctgaataatattccattgactgtatatactacatctctttatctatccatcagtccatggacatttgggttgttatcttggctaatgtgactactgctataatacacatgagaatgcagatacctctttgcaatcttgttttatcaattcttttggacatgtacctggaattggtgttgctgaattatatgttagttccatttaaatattttgaggaacctccttactgcttttcatagtagctgtaatattttacattcccaccaacagagtgcaggggttccagtttctccacatcctacccaacacttattatctttgttttttttttttaaataatgatcatcctagcaggtgtgaggtgataatttactgtgctttcattaaatttccctgatgactagtgatgttgagcattattttatttacctgtttaccatttatatgtcttctttggagaaatgtccattaatgtcctttgcccatttttaaataaggttatttgtctttttgctattgagatgtggttgttccttatatacattggatattatctatctatctatcttactatctatatcatataaaaggtttgcaactgttttctcccattatgtaggttgtctcttcactctgctcactgttttctttgctgcacaggaacttttagtttgatgtagttccactccatttttgctcttgtttcatgtgctttgggtttgatatccaaaaaattattgctaatgccaatgtcaagaagcttttcctgtgtgttttctcctagttgttttagagtttcaggtcttatgtttaagtgtttaatcaattttgggtgggattttatatatggtataagatacagtcccaatttcattctttttaatgtgaatgtccagttttcccaacaccacttgaagagactatcttttctccactgtgtatttttggtacctttttttgaagataagttaatcatatacatgtggttttatttctggaatctctattctgttccattgatctatatgtctgtctttatgccagtgtcatactgtttgaattactgtagctttctaatacattttgaagttaggaagtgtgatgcctccagctttgttctttttcctcaagatcactctggtgcttctgttttttttttttttttttgtggctttatatgaattttaggatttttattccatttatgacattgggattttaacggggataacgctgaatctgttgatcagtttgggtactatggacattagaacagtaacagtattaagtttgctaatcaatgaacacgggatatttttccatttatttgggtctttaatttctttcatcaacattttgcagttctcagtgtacaaggttttcacctctttggttgatttattcctgagtattttatttttttgatgctattgttaatgggattacttcttaatgtttcttcagatagctcattgttaatgtatagaaacatgaccgattttttaatgttgattttgtattctgcaactttactgaatttgtttatctcaacagttttttagtggagactttagagttttctagatataaaatcatgtcatttgcatatagagacaatttaagtttttcctttccaattggaagccttttatttttttttcttgtttaattgcactggctaagatttctagtactgcgtttaagataagtgataagagcattcctgccttgttcctgatctcagaggaaaagctttcagcttctcatctttcagtatgatgttagctataggcttgttatatatggcctttattatgttgaagtacatttcttctatacccagtttattgagcatttttcattataaaagggcattaaattttgtcaaatgccttttctgcatttatggagatgataatatgctttctatccttcattcccttaatgtagtatttcatatttattgttttgtgtatattggaccatccttgcatcccagggataaatcccacttgatcatgctacatgatctttttaatgtgctattgaatttggttaggtagtatttcactgaggatttttatcatctatgtttattagggacccaaaagacatatatagaacattctacccaacagtggcagaatacacattctttctaagtgcatgcggaacattcttcaagatggatcacatgttaggctacaaagcaagtcttaacaaatttgagaagattgaaatcatgtcaagtatcttttctgaacacaatggtataaaagtagaaatcagtgacaggaggcagattggaaaattcacaaatatgtggaaatttaataatatatttttgagcgaccaatgggaccaagaagaaatcaaaaggcaaatccaaaaatatcttgaaactgtgaaaataatagtacaacagagcaaaacatatgggatgcaacaaaattagtactgaaagagaagtttatagcaataaacacatacattaaaaaggagaatgatctcaaaaaacctaattttctacctcaagaacctagaaaaagaacaaactaagcccaaagttagcagaaggaaggacacaataaagattagcgtagaaataaacaaaatagaggttggaagaataatctaacaacaaaactaagagttggttttttgcaaagataaaattgacaaactaagaaaaggcagactaagataaaaagagagaagcagcaaataaaattaaaaatgaaagaagagacattaaaaattgatgctgcagacatactaaggatcattgcactactgtgaacaattacacaccaacaaatgggatgtcctagaaagaaaatgaataaatttctggatacatacaacctaccgacactgaaacatgaactaaaagaaactctaaacagaacaccaacaagtaacaagactgacacagtaataaaaaacctctcaacaaagagaagttcatgaccagatggcctcattggtgaattctactaaacatttaaggaagaattaatgccagtccttctcaaacccttttaaaaaattggaagagaaaggaatctttctaaactcattttatgagcccagcattaccctgataccaaagccaaacaaaaacactacaagaaaaaaaaattttaggtaagtatatttttataccttacccatatccatggattctgttatctgcaaattcaaccaactggggattgaaaatacttttaaaaaataagaaatgacaagaaaaataatacaaataaaaaacagtacagtataacatctatttatgtaacatttacattgtaatgtagagatgatttaaagtatggggaggacaggcatagattgcatgcaaatatatatgaaggatttgagaaatggcggatttttatatttcacggatcctggaaccagtcccccaaggataccgaggaaggactgtacctataaaattttcccagaacattttgctataaggctacattagatagaactgccaattaaattctgcgatcctttccatttcagaagtaaacacagtgatatttcagagatttttaataagatagtttgaagtgtgagataaatataaagacagggccatgctgttatttagcagtactaatagatccatattgaaggtgtttttcatatccatcaatgtttgtagagtcattggggtctctgcagatgatgtatttgagttcgttgaggacagttatttcacccatggtgagcttaatgcaaaaatgtttctgcgaggttgctttacactttaatatttctaactaataggacatttcaagtgtatgtcccatggttgtacatatgtgtgaacctatattcctcctgacagcctacatttcaaaaattgtgaataacacaggcactacttcctcagagttccataaccattgtaaaatctgtctccatcattgctcctcacattgctgtgcaattatttctttgtgtctgtttcctacatcagacttttaagctacctggatgacagtgtctagtagtatttatctttacttccccagcttgtatcacattgcctgacacataagagtgctgcaacaaatatttgctaattaaataaattacatggttgacacatttggtatccagactgttgagagagcacaatgtcctgatggtttttgttattttaatgagtcataagaaatgccataaatgataccatgtgttctacactttccctctttctgggacaacataatgcaattatttacaagaatcccaaagagatttcatttctcatagaaaagaaaaccagagaccagtcatttgagattcatcatcccaggattcaattttagaagagcccaattccccaacccccatgtgaaactttttaagaaaagacagactgccttagtgtctggaaatttaaggtttgtgaatctcagctcctagactgactaaaacatttatttcttttgtgacttcaccttgtcagtgaaatttaaaagctgagaatttgaagaaaaagctgataagtaattttaattatatttgggtaaaaattgcattattagaatacataacacagagagatctactccaagctattaatctggaaaaatcatttaaagacattaggattattattcattaccttagataaacaaaataaataaataccagtggcaataggaagaatgataatcaggttaatattttttttcattctaagggtatgtttaactacttgggcaactataaaaaatgtcatagactgggtagcttaaacaacagacatttatttctcacagttctggaggctggcaaattcaagattaaggtgccagctgacttaattcctggtgagggctcttcctgacttgcaaatggccaccctgctgtgtcctcacatgaggaagagagagcaacttctctctctgttcttacaaagccactaatcccaccatgatggcctccttatgacctcttctaaccttaatttctttcccaaaacttgatctccaaccacaatcatattggtgggtcgagcttcaagatatgaattttggaaggatacaaatcagttcataccaaaggggaagtatttcaccattttagttttgtttagctcatcaatgccaaagatgttcttttagagtcttctgatgaacctcattgatagcagctagcaatgtaacagaatgtttaggacagtaacaagttctaagggaagaaaagaccatgggtgtctgtggtagctgctggggaaaagtgttaacctggaagattctgggcacagtccctcaagcaataggcttatcaccaggtattgctactaatgctggctagctctaaaagactcattaagaaattaaagaaatacctccaacttcataatatttgtatcagccaaccattcaattcatttctaaaactgttgtattgtgtttatcaaaccatgtttccagcagtattactaccaccatttaattgtcaatgatcctaaactatttttttaccaattctctggaactcaaagacatattatctcttcagttactctcccactggtttgtcatgaacactgaaattcccatatttaatgtctctctttaccacaaaggagtataacaacaatggctttgttaacttgttaagagaatgtattgaacgactactatccataaaatattactactcagaattacaagaaatggacacaggagagagaagtttaaatgggaaaaggagctgaaggagagttcagatttaagtggcacctcattgcaagcaggagttctacaaaagcactccatatgtaggcaaagttgacattggaaaggaagaagctggaagtcctggaaaacaatgtggctagaaggaattactcaggttgcaaagcccaattatatatatttaactatcttgctaagtccaggcactgtacagtaaatggctcccaattataccgcacagatcctgtctaccttttgaatctccttcccaactactccatgtctatgccttctactactttccttttttttttttttgagacacagtccccctctgtcacccaggctggagtgcagtggcatgatctcggctcactacaacctccacctcccggattcaagcaatttttctgtctcagcctcccaagtagctgggactacaggcatccaccaccacgcctagctaatttttgtatttttagtagagacggggtttcaccatattggtcaggctgttcttgaactcctgacctcagatgatccacctgcctcggcctcccaaagtgctgggactataggcatgagccactgcgcccggtctactttccctttttaaaattctcttacaaaaaaagatgagactaatgagacttgcatatccttactctcctacaaccaacatgtcttcatgtcctcaaattcacactttactctccaagccctctgtgtctactcaaaaccacaattaagacttcctacctgggttccttccaccacctcttcatagtttccctatttcaggccccagacacacttccctgaaaatactgtgcgctcatgttttcaatccaaacttatttctttccactctcccaaacattaacattacaaggtggccagtttcctcgctatcccttgtgagtcccctttagaaaggagaaggtcttccccttttcctctctagagatcttatcctctctaaacttaaccaacgcttcagatagtgacatctcaagtgttgttagagaattcaaagacataacttcaccacccaccttccgcagggcccagcattccagtggccctcagtcagctctcccctcttctgccctactacatgccttttctcacattttacactcactgactgtgttgcttgtgaattatttcctagcatcttccattttcctagtttatttgatatttagaagtagaggatgtatcctccgtgaaacttcccccagatcctcagcaaatcctgcaacgtttcatctgtagacccatcctgtaaacagtcacggacatgcagtttatcatcaattcgtctctagtaattctatgaattctgggccagtctgtccacccagaatgtagtattctaaatgctggatcctgtatttcttctagaacttagcacagagtagaatgcttagtattggccatggcatatctgttcacgaattgactcatgatctgtcagagattttcacctaggtccctgctggaatgtcccctgctcagaggtacttctctgacctatcactctgcacctttatcctgctcaaggtttttttgttttcttttgttttgttttttgagacggagtctcgctgtgttgcccaggctggagtgcagtggtgcaatctcgggtcactgcaagctctgcctccctggtacttgccattctcctgcctcaccctcctgagtagctgggactacaggcgcccgccaccacacccgtctaattttttgtattttaaatagagatggggtttcaccgtgttagccaggatggtctcgatctcctgaccttgtgatgcgcccaccttggcctcccaaagtgctgggattacaggcatgagccactgcacccggccaggtttttcttttttaatagcacttatctctactttgctatatgttaatttgtttattttttattctctgtcccattcccataaaaatgcaagtttcataaggtcaggcactttgtctttatcactgctatagccctggagaccagaggagtgcctagcacttgatagacattgagcaggtgttgaaagaatgagtgaatctattcaagatccagttttctgatagacaataaacaattgtgattttgactcaagtcctagttcaagcacataagtgtagatgttatatatcattaagattaataaaggactagtattaataaacacttatgtgacagctttaataggaagacaggatatccctgcattacaagggaagttttaatgagtaactgagtcctgtcctcttacttttctgataaaacacaggacccagatatgaatgtctttctaccaatctttgtctactgacatgagaataaacagagcacagggctatataatgcttgtcagttacctaaaacaagaatgtaacgagagaaagtggaataaggaataacttaaaccattttatccaaacgaaaatggctttcccattcattaccaatgacttgaacctcatattactatgtactggctatagtccttccatctcctgggaagctaagatttataaagtgtgcttcttaacaaaattatttcatgccagtatttagttatcattgttaatgaaaatatgtgtagcacttttcgaaatgttctgtggacatttttatttactgcacataaatccagagaaacaatgatctgttattgccacttcttcctttagagagttgcatccaaggccaaaaactgaatcattattagaaaacctgctgaacccaaattctttctctatgtgcttctcccttctacacagtgtttcagttccttgcctagtaatgcaacttcattatatatattctatttgagaaaggaggaaatggataggaaaacttttacttagccatgattcatgatagaaatcaattgaaattcatatgaaccattatcacaagaatatgaatttatatccccaggtggacagttatgaaagtgggatttatatgcaaatgaattcaaatgtcagttaaatgctccatattagggtaagcactatttgtgataaaaaaaaaacttaatacacaatacatggaggcaatttgtttgttttgcgtgtcctgagttgaaaggggaattctcttttccagatcttgggaatctattttcccttcttaagttgataaagtttaagtctagagagtttagttaacttgctcaagatcacaaagcttatttggtagcagaagaaaagctggaaatcaaatattacactttttgtgcagtgctgagtcacttgaagatgctatgttgaaaatcaatcttgaaggataggtaacaccacaaagaggcagaggagttggaaatctcatggcaggattataggcagtgaggagaatggtttggcccaggtgaagtgagagtttatgtcaaaagtaaaattggaaagagataactatatcatggatcttatactttatctagtgagcaatggtataattcatgtataaaaagagtttgtggctgggcacggtggctcacacctgtaatcccagcactttgggaggccgaggcaggcagatcacaaggtcaggagttcgagaccagcctggccaacgtggtgaaaccctgtctctactaaaaatacaaaaattagccaagcgtggtggtgtgtgcctgtaatcccagctactcaggaggctgaggcaggagagttccttgaacccaggaggcggaggttgcagtgagccgagatcacgccactgcactccagcctgggtgacagagcgagattctgtctcaaaaaaaaaaaaaaaaaaaaaaagggaagaaaaagaaaaaagaaaagaaaaataatttgtttgtcttggccttgtttttgcttttgagcaggaaacatcatgagcaaagcagtgttttggatgacccaacttgcattgccagtttttgctgagtaagacaaggtataacaaggaaggcgagagatgggttaggagactacctgcagcagcctctttcgggatataataagagtctatgtacacataatagtatcttgcatttttatgaccttatttttttcaaacaacttaacttcttacaaatacgattatatttaatcctcacaagcctgtgaaaaaggcaggagtaatcacagccactgtatgagacacagaaagcagcagcctcaagaaaataggtaacttgttcccactgctaatctggagtagttgaactgagagttacatctttaacgtatgtctgaaaatccagtgcccttcttactatatatgttgctctacattctcttaaataattatataatggaaatatttatgtaaaaaatatacactgagttttcattagttacccatctgtttgacttcaatttatataatatatagtcaacttactccttaactctcaaagagtaacttctcctaatgggttattgaagaagagaatatcccttctgttctgtaaagacactgaatattcatgttcttttctctttttttctttttttcttcccttttgattttattctttttttgtttctaggttagagattcaaatagaactttctctgcttccgtgaatttttaaaattggtttatacatttgacaaagctacttacatgcatattttattggaaaaaaaggtttagaaaagaggattacataaagattctcacactgcatgcagccaacagcatttgtgaagcactttttttcagagctctgtcttgagtgctagagtaggtgacaaaatggctcaagtaagagtgaaatgggttcaccttccccggaaacaggctgagagagcctgtggctaaaatgagatcggatgagtggaatgaaatactatctggaccttccaggattgcacaccccagccatagcaccccaaggactggggagaggcagatcacattcaaattaattttgtacatgactaaaaaaaaaaaaatctgtagaaatgtgcatggtttcctaagtaaatatgggtcttagaaattataagtggaagcacatgacttagtgaatagagttctagaaaccaagaacagaagtcttgttcttagttctttcaccacttcccaacacagcattaatgatgtggctctgtttcctcaagttgaatatggcagatcctcaggctatcttaagagacatgattgattgtaaatcagataactgtattttaacactgattgtataaaatgtaaaaacaccactagaaaaccaaaaatctcgattttttaataatctttttaaaaagctttttcaggataaaagaaggaaaaggaactatttttaataaaacacagtttttctcgtgaacaattctaaataaaacgacatgtgtctttatttggcagactatcttattagtggttcagaagtaaaactggtagttgccttgccttaaaaactggccactttagttttttcaggaagcttaacgttatgtgaggcgctgtggaaaattagagaaactatgacttttaattattaactagacaaagaggtaagatttggttaaggaaaagttctctcagtggtgctttatgaaatattgtgaagaaagctccaatcccacattatttcatagatttaaatgggatatttgatggtgttcatacatgctccctgttggggaaagccgatgaatgagcagatctaagaaattctgcctttcatatttggagatatgccaagaatcagagggcggagacctgcaagccattataagcatcaaagcttatgtgagctgggaaacagaccagaatcaggacatgtaaaacaaggccagggtgattaagtcacctctaaggtgtaaaatgaaagctacgccttaaaacaggagcaaatcagaaccaagaatctagttcttagccaatgcaaagtagagaacagaagcactaccacaccaattcaagtatcattgtttgatcagctacttgaaacaaaggaatacaaactgatgtttattaagatcccaatatgtttcaggcactgttacctcatccacagaatctcatcaagtgtggacggcaatcctaacaggctattgataaagataatgactgctcaagagagatttagtaacctgccaaaagtcatttagttaacaaaccataaaatcagatcctgtatgacttcagagctagtggttcttcattacctactgcccttcaatggggaaaagtgaatgaatgagacatgttccacagttctagatttaattatgtaacgacatcatagtcatctttgagcttagcttgctttggagtccagcactactttgagtcatggatcctgtgaacctgagagcctgataagatcttttgtatcctttggagaagcactgagcagcaatcatttctttgtggacatgggtaccagcctacagaattccactgtgtagagtatattggtctccattcttctctggcttttgaaccttttaaaactactgctatgagcattttcctaatgctggcagacctcttgctgaggcacagatgtttataagttcctctgtgagttcttttgctgtactaggacaggatcaatttcataaccgttcagaaatccaaataccagaggctagcaggaacctaagtctgtatttcccctaggagctctagttcaatattcactaattcaatgttgattgtgactttacacaacacaacaatgacaatgaaagataattgacttacataattcagagcctgatacatggtaaatgctaggaaaagggaaactataatgcttataaggaattataataatttaattattcttgcatagtctttgcatggacatattaagttttaaggatgttcatagaaacatccttaaggagaaaaagtggagccaggcatggtggctcacacccgtaatatcctagcattttgggaggccaaggcaggaggatcacttgaggccaagagtttgagaacagcctggacaacttagcaagaccctgtctctatattaaaaagaaaaagagagggaagggaagggaagggcaggggaggggaagggaggggaggggaggggagaggagaggaggggagggaagggaatttaacgttattagctactatagcctcttctctccattagcagcagccaaacaaaaaccaggcctgattgaatcaggatttcatgttgaatatcactatcagtgctgtcttcttgtaatttcaatatggttttagactccaacagagtatagcaggatgttggaaaataaaatctggggacaaaaatccagaaagctctactcattgactttacacaattatgtgatggtctcagtgatcttgggacttgattaggtattaagcatttttaactgcctgggggtcactgatataaaatctctatctgacatataattgattttgtcgtaattgatgagattatcgggcatattcgttcttgccagtgaagtcaagaactggaagcacactaggttcaggcttaatcggttttatgcagctgtgcttgagtacttaataaaggacatgaaagttggcaccaagaagattctctgagaaattcctccaattcaattgatttagagcatgattaaaagccctttgtacagtaatccaggagctgctgtatgctaatgactgtgctcttaaagcccgtgagtaagaagatgtgaaaatgatcaccaaacctcttgcagactctgcactgtgattgggctgataagcctgagagagagatggattaggtcagagcccctaccaaggaaaccttcaatctagccaaagactttcaatgacatcgcagaagagagagagatgtctgtgattttgatcatgcaaggctgctcataaccttttggctgtgcaattttcagcctgggaaatcagatagaaaggattcttacatcctttaggaggctggcagccttggtatcaacactgtggcttctggcttgaaagcaggggctcttctgagatacctggacaaagcctatgtaatgcacatattttcttcctaaagcacatcacagctttcttgagcttaggaacactacatagcactttaccctgtatttgggtgaaattgccaaaaaaaaatgcacacaaatgtgagaaacatggcactaactgtgaaaaggacacttgttaacattatgagagctgaaacaagaaggtagaacttcactttgttcaacttaagctaggaatgtgtccattgggtgactcagatttttttctccaatctacgccggtgcatgtccctgaataactgcaagtattgagttggggattacaaataaattttagcaagcaggcaaatttgcaaacacagaacctttaaatgagattgactgtgttgaaaaaaatagagaccacacgttaggtatacctcaagaccagcacccataaccatatagccaaaactaagtcatcctgattttcctgaaatgctaactttattcataaatgaaacaaaatgtaagctatatgtgttagtccattttcatactgctatgaaaaaatacccaagactgggtaatttataaagaaaaaggtttaatggactcacagttccacatggctgggaaggcttcataatcatggcagaaggcaaaggaggagcaaaggcatgtcttacatagtggcaggcaagagaatgtgtgcaggggaactgccctttataaaaccatcagatctcgtgagacttactgtcatgagaacagcatgggaaaaccggcccctgtgatttaattacctcccaccggatccctcccatgacatgtggggattatgggagctacatttcaagatgagatttgggtggagagacagccaaaccatatcattatcatttctattagcatgagacagtgaaatgaaatcaatcagctatagacaagtcatcttaaacagctctccttgccttcaaaagaatgttaatatataatagctcatcatgaaaaaggtcaaaatactctctccttcatgctttataaactgggctgtcactgctgtgagtggggcttcttaccacctatagtttcaggtctcctgatttgcaaactgttcttttgtataaacttgtacagttttaaaatttgatctaattttattttataataactgtttttaacaaacattacttaatacttacatcaacttcacaaaatggatattattatgatgatctccattttatggataagtctgggtgggtgaggaaattgatcaagcccacataacaagtggaagaaccaagattaagaccccagctgtctgtctctatttagcacacaattactctatcactgtcacccctcacctgccaatatattgtaatgtttgaaatgattagatcatgtggcattagatgtggaaaattagaactgttcatggctattaataggacctcaaaattgaaagtgaaagccaattcatgttgcttgggagattctccgcattttagaggcttcatagtcacaaaatgtcagtcaatgggtgctaatgtgtttctatcatttcatcaagattcatctattcactgcaatgtagctagaacccattttttgcaatgctatgaaatactgaacaagaataaatatagaaatgttttatcaaagataatatttttggtttcaagttgactgagaaagtaataatatcatctacttaccagtttacgaaaatggtaaaaatgtaaacagagaaattcaaactagaaaagccactccaggggcccttggattcttgccatttctgtaccgggatataaacttgcaacttggaacttcagttttatttaactgaaacaaacaaagaaaactgagaggattctgatcttgttatttctcttcttaaatgactttagctaacttgtgggaatgggctatgctttccactaatctgattctacttttgcaaagaaatcaataaagtatttcaaaattataacaaagataatatgttgattcacttttgggtaacaaagcaggcagatatctgtggagttctgcaagaaaccacacaacaaactttgtattagaaatataatcagatgtagccagcccaagtcgacaagcaattaattttgctacttagacctctggagtcagtgatccatgaattggtattcactaggtggttatttaaatctaatctttaaaacttggtgcagtccctacccattaaaatatgaaagatgatgatgaccagaagatatgggtgtctgggatcatcagttttaactggaattatagagtcactaaaatgaaaagaacataagagtcataaccccttttaattcctttcctcactatggtaactggtgaagaaaaactcacagaactcgagatcaaattctgtgtgtgtgtgtttgtgtgtgtgtgtgtgtgtgtgtgtattttaaaggcagcccaagcttattttatttattttccagctttattgagatataattgaaaaaaattatatatatttgcggtgtaaaatgtgatattttgagatgcatatacaatgtgaaatgattttcatgattaaggcaattcacacatccatcacctcacatagttacctgtgtgtgtgtttgcggggtggggcggggggcgggattggtgagaacatttaagatatactgtcttagcagatttcaagtatacgatagattattaactataatcactgtgctctatattgtagctccagaaattattcatctagcataactgaaactttgtaccatttgactaacatctccccattttccccacccacttgcccctgccaaccaccattccattctctgcttctatgagtttgactttttaagattcccatataagtgagatcatgcagtatttgtctctctgtgcttggcttacttcacttaatgtactctaaattcatttatattgttgcaaataacagaatttcattctcttttaatgctacatagtattccattgtgtatatataccacattttctttatccgttcatctgttgatggatacttagattgattccgtctcttgggtattgtgaatggtgctttaatgaacatggggagtacagatattttttggagatactgatatttcctttagatatagacctagaaccgggattgctaaaccatatggtagttctatttttaagttttggggaacctccacactgttttctacagtggctatactattttgcatttctaccaacactgtagaagagtttccttttctccacatcctcaccaacctcatcttttgtctttctgataatagccattctggcaggtatgaggtgatatctcatgcctattttgatttgtatttccctgatgattagtgatgttgaacatgttttatataccttttgaccatttgtatgtcttcttttgagaaatgtccattttttgcccatttttaattggattatttgttttctggctgagttgtttaagttccttatatatttgggataggaatcccttattagataaatggtttacaaatattttatccatttcttatattgccttttcactcaattgattattatcttaactgcagaaagtctttagtgtgatgtactcccatttgtctatttttgcttttgtttcctcatcttttggtgtcatattcaagaaatcattgccaatatcaatgtcaaaaaatttttttcctctttttccttttaatagttttatagtttcaggtcttacatttaagtatttaattcatttttgaattaattttttatattgtgtgagataatggtccaaactgcatatggatatctagtttttctagcagcatttattgaagatactttccttttcgcattgtgtattcttggcatggtttttgaaggttaattgaccttaaaagtgtggatttgcttctggctcttattctgttctgttggtttacgtatctatttttgtggtagtgccatgctgttttgattaccgtaactcagtagtatattttgaaatccggtagtgtaatgcctccagctttgttcttgctcaagattgctttagctatagtgagtcttttgtgttttcatataaattttaggattgtcttttctatttctgtataaaaatgtcattggagttttgatagggattgcattgaatctgtagatcactttgggtagtagggacattgtaacatatatttttaattataagtgattctaaagaatgaacacttgctttcaggatgcagaagttatgtgaatttattgtttgatgacctgatggcagaagttgtaaagtgaaaccatctggatctgatcagcacatctaatcctagggagagctcactgagtattcagtgtacatgcagagttcctacgaagtttaagatgatgctagcacaggaaaaaaacacaagaaaattggccctgcaatctaaatgtattcatttgaaaatgcaatatttcaattagatttgaaagagagtcctattactgctgaaaaatacttaaggaaaataaattcagcaacaggactctgcctttttcgaaatgaattgtttagcttagtgctaagtttatatgagggtatgagtcaaatttacagggacactggatttagtcacagagattgagggtgttactttattatgtctaaaaaaaaatgaaacagctgaagtctttcttcctacttagaatcttcatagagtaattgtacagctttaacaggctgtacaggagagcaatagtgctagataaacaaatgataggtctctaatagtttgaaagcttaatcaggtagctttaaacaaaagtgtattcatatctgggtatcagtgaaggaaggtctgtaatggaaattactggcacctcttgcttctcctattagcccagcagttccacaaatccttataaatataaaggtataatattacatataaaacctacacatggtttgcttcaaactggtaagtcacgaaagaaagatgcagacatgtcttcccattggtgatgccatttcccactgcctgttatcaggaatgttttccatccatttttttccaagtttgcctcaatatatgaacactgctttataaaaggaaaattacagtaagatgtacttgtatttcttattagctcagctttatgattgtattgtaattattggtttagtttttaagaaattgtgaaccaggaagttcataagataatcagagctctgtgtcactcatacagattactttttccttcatttaattttcacttaaatattttatatgtatgctttctagtgtaatcatttaataaagactcatagaatgcttactatgtaaatttgctaaatttagcaaataaaatacaggacacacagtcaaatttaaatttcagttaaacaataaatatgtttttagtatgtcgtaaatattgcaatattaaataattcttcattggctatatgaaatataaatttaacttggcatcctcctttctgtctggcaatcatattatctacaggaaaaggatcatcctaggagctcagaaggatacaaataaaaatttcgtttctgtactaccttgaaagaaatatgtctatagattaagataggaagtaataataattccccaaggtatatataggtaaaatcgaaggacccaaagagaaataagtatttggaaaggaatgtatttaaatccgtgagtttttaaaattttgctaacatatgctatataaaaaagagtagtaggaagtaaaggtgaggttgggaattataccaggcccagagatttaaaactgatgctctggataagtgtcttttgatagaaaaataatgggaagcagtaatgcaaatcacagatgtaatttataattctctagtagccacattaagaaatgtaaaagaagtaagttaaattaattgtaataatatgttttattcaactcaacgtatccaaaatattatcatttccacatgtaatcaatataaaaattgttgatgcagtaattctttttaaaataactattcaaaatctgctgtgcattttacactttcagggtatttgaatttggaccagccacatttcaagtgatcagtagtcacgtgtggctactgactgacttgttgaatggcacagctcttgagagtaaggatctgctcatagtttgttaacgaaagagtcatgggatcagagtggagcttcagatttgcgatagtattacatgagatagatggagggggagaaattgggcagggagagaacatttaataggctattccagtaatgcattaaattgaaagaaaagtcgacctattatggtaaatagaaaaggggatcagggaacgtacagatggggatgatgtttactaatgcttattatatacactattttactctcaggcctgtgtggacagaagtagaaaacagaggaggcattgcttctgatcactaagaatgccacccaaatggagaaagccacacagcagtcaaaagatattcaaaatgcatatattaatatgtaggggaaataagcaaaagttttgctggaaaggattcttcctaaaatttttcactttttcccagtttctggagctaaacacagaaagattagttttaatagaacagaaatgtcttaaacttggtttggtactgacaacctaaaacacagaattctactttaaaatacagaattctattttatgggaatttgtaaactgagaaaaacaatttttagtattacaggagcagagaagggactacattactgaacctgccgtggaatcagaaatttaaatatgtttcaggacgctttttttttttttgctggaaaaatatttccatgcgagttgttgggaaaataagattctagctacaatgcttcatacacataccttttaatgaatgaatcctgcccttagccgggctcctgtgtataaaccaatatatttgagaggctctttattgtttcagagtctttctcatccattatcacatatgatttttttcccaataactcctgagacacagcattgttgcctacattttttagatgagaaatgagactgagaggaggagtaacttgtcttaaatcacagagctcacggtccaggtgagaaataaaaatcccagacatttgtatccaagtcttaatctttggtagtacaccataatagatgggaagactaataaattgggaattagccatgtctctagttataggcaaacagaatattcacctatatatagccatgtctctagttacaagcaaacagaaatctaggtgaatattctgaggtaaatggtctcaccagttcacttccttctggttttttctcctacacactcacacttgttcatcttcatgtctaacatttaagaattcatctgctcttggctgcttaaatctatgaatggaacatgtggacatgtaaagccatcaactcagaaaaatgtagttctcacagtgattcatttgataaatatgttaatacctattatgataaataggttaacacctattatgataaataggttaatacctattatgcacttagcacagtgcccaacacacagtaagtgctcaagtttatctagtatcattaacatttgaggtaaaggaaatgccaaattatgtaattaatgtgtgtgaaagtagtttaaaaacaataaaacaatgtacaaataaagatattattataatgaggcaattgggcagggcgcggtggctcaggcctgtaatcccagcactttgggaggccgaggcgggtggatcacgaggtcaggagatcgagaccatcctggctaacacggtgaaaccccgtctctactaaaaacaaaaacaaaaaaattagctgggcgtggtggcgggcgcctgtaatcccagctaccgaggaggctgaggcaggagaatggcgtgaacccgggaggcggagcttgcagtgagcggagatcgcgccactgcgctccagcctgggccacagagcaagactctgtctcaaaaaaaaaaaaaaaaaaaaaagaggcaagtgattatttaatagacatagagtttcaaatttgcagtatgaaaagttctggagatctgtctcacaacaatgtgaatatacttaacactactgaactgttcactttaaaatagttaagatggtaaattttatcttacgtgtttttgtatcacattaaagagaaatgcaacacagttggggaataaattattagggatttggttataaatcatgttattgattaacatattatcagttatcctttcccccagtagccatcaaatttgcactaaattctcttgctctgttcttccacagtcattttaatttgggataatcaagtgtcacagacctattgactactacaaccattctatttgtagtcattaaaaatattgaaaagaaaatagaatcatcgctctgtaaatagaaaaccacaccaggaaattgctctcattcaaaaaacactgctaatatgagaaacaactaaaagcactgacacaagttctcaggctctgagaaaaaatgtaagtagatgagagctcatggtccaagtcagaaataaaaaccccaggcatttgtatgaactcatgaaaatcagacatgctgcttattaagaaatgtaatatggaaactcttcattgctatttaattctatttttaatgcatttcataggattcttgtttcatagctttggccgtatgaggccatgtagtttaatatagactggaaaagagtcagatgctttacctataggatgacaagtagttagacatttcagatacaaatcattaattaatggatatttgacccatgtagaccaatactgttactttccttagcctatctagacaattgtaaaacaatgtatgcagagaaagaagcaatgtaaattgctaggtacatagtttctttaatattaataaattttaagaatatttgtcaaaatcaatatcatccttttcttttgctatctaccagagctcttgtaagatgaaatgcagacaagagcatgccagggacccagcttgttgggaagcttctgattctccattaaataggtccatttaatgtggaccataggacttcacattggtctcctttaatatgttggattgtttctttagtgtatgcccctgagcctgaggagtttataaatgatcttctgaataggaaaaaatgggagattcaactttcgtatgctgtagtctgatttcctaagaggcaggtatttaattttgctgaagtgtcctgatccacattatttgactaaatgagaaagcaaaatatttgacgggacaataagagtattatatatatattatttcttgacattttgcactgatttgggattacatctgcaattttttgctcaatatagtcagtatgtatattgtgtggggctacacccatagaaataaatttatatacccatgatcctaagagaagtctgaagccgttagcagtctacatgaatgcatgatgactgcagtaacatatatttatcccacaagtgaggagagaattgattactctagagaactaaagccataactaattcacagagactctttcttatgatgaggataaatattctgtgtcattctgacccataaaatatactgtttttatagcagactcattgtaataattcatcttaaatgtcttatggacatattttcctatgatttccaaataggaatcattggacgttcttgttttcaaaataagtttagggattaaaaataataagtagctttaagtaacattgttatacttgcttcagaaataaagagatataatgttgtgtacattatatgttcccttcttgatatttatcaaaaataacttattggtgcacattcacgggtattttgcatattcacagttattcatgggtattttttgcatattatggcttgcttcagaaactgaaggtgtatataggagactctatttgcaaatgaacaaataggcaataagctaatcccccagtgtgacattttacttcaggtaaaaattacttcctatttcttctcatctactgctgcgccaatttgaaactagttttttattaaaaggtaaaggtatttgcttacttttataaatgcattgacacttttttgagtctattataaaagtttgctattttatctttttttattggaaggctgatggaagataggagtacactgaggatcttgggaccgggctcttatgaaagggttagaacaaaccattttgcttttggttgatgtaaattatcaggtggcttagaacatatttgtgtcttgtatattatgtttaatgttggcaagaaggaaagattaaagtatgattttaaatggcatgagttagaaatgttggtgttgatattttcttagacttgtggacttcacttaattcttagccagcattagaattaatagaaactgcagatacttgagggtagagggtgggaggagggagaggagcaggaaagatagctattggctactgtgcttaatacctaggtgatgaaatagtctgtacatgagtacatgggtttacctatgtaataaaccttcacatgtacccctgaacctaaaataattgttaataagaaactgcagatattcgttgatataatgttccatatttacagatgaagacaatcagactcaaataggttaagctgcccaaagtcacagagataattcaacataaatgaagaagaaagctaagcaaatagagtttttattctttttgtttatttgagggaaatggggtagcaaaggaaaaaatcaaagtagctgtatgaaatttttgaatacgtagaatttcttcacatttcagtgtttaatacattactctaaaggggcaaacatactattttcctttatctaaatgaagccaagattgttataatgtccagaaatataaagaaaaggactggaaagatagatattaggttctgcatggctagatttggggtcacttcaacaaagactggctttttaatagtatcagcccacatctcccagtcctagaaccttgcagagcttcctgtggtttcgcctttggagttcagtgtttggatggtcaccttcaggctagtactttctagggatctgaacttattgagctgagtcacttggtttggtccaaatggtcacttgcaaggccggttaaaatctatgtttccatctatctctgaattagtgggtgatagaaagtagcctgggtgaattctttaattcttttacttattgactgttgactcttattggcctttttctgtatatagcaataatgctaatgataataatttctttggaaatacgtgaaccattcttagtcctcagagtatttctacaagaccatttatgttgattctcaccataacagtttgagagtgtaaacgaagatatactgggggatattacagtcaataggttgaaagaattacaagaggtcattcatttattaagcagctgctaagcactggtcattgcgtcaggcaaactggttaatgttgaagccaggacagaacctacagtctgtgatctgggtctcacttctctcagcccttctctcccttttctcttgcttctctttctttctgcccatgcagtgcagcagctttccctagggcctatttaccaggcttctgttttaaactatacattatttgttctcagttcaaggttagcagatcttgtccacatccctgtgggagaacctaataagctcaggtgaagcgcagctcaacattgggaacaacagtaaatgtttgcaccattaaaggtactgaattgttccatgttatcaacagcagcctttcagtcatactcatctgaaaaatgaagcctctctgaaaatcaccacttgaacttatgtccatggactgtgatcacctgtagccctatctgtaagccatctgaagtccagtgtctgtgttgtatgtgatttcatctcagtagagtgcagtttagcaccttattttgtcatgtatagaactctaatatattaaacaaataataaaagtggaactccctcataaatgatttagatattctccttatatgaaaggtcttatagtaacagataatttgttcaacagcaactgtgttttgaataatgcagggaaagaatgcttcctccattttgaactgatgatgaatatatctgtgagtgaaaaagcaataataaaaggtggatcctggattcttctctatgccatctctaaaatgtaaatgtttgttgattaaatgcatcttatttgggaaccaaaaaaaaaaaccaagcaaatattggttttcatgagtcatgtgctcatattccaaatgcagaatagaaagtttatggaaagactcaaatattgctgtttacctttattatgcaaaacactgtgagttgttttttcttcatttgttaatgcaaaaacactgatttaaaaaaatgagacaatggaatgagcaattatcaaatggtttttgcaaaatgcatttaaaatctactttttaaaaatgattcatttgaagcatattaaaaggtacacataataaatatattattataccattatataataattataccattatactagtggcttcatgctacgcttactatatgaactggcagcagggaataaaaatttatcttggtgcttcttatctttttcttttctggtaattttaagtcactttctgttgttattctttaataaatagtctaggtaagcagccaggactctcccaaagctgtgtttaggtaggaagaatacatgttactgacaaaagtgtcaagtgagttagttaaacaagtcttggacatttccatcccctattctataatcctcccctgggtgcctagccctgtaaccttatgtggctctccaggggcctacttttaagaccttcccccaaacccactcttccaatgcaaactttccttcccaaggctttctgtggtccattaaccaacatgggcctgttttctgaccctttttttttttttaatttcatcctggacctagctaaaaactaagccttgttaataagccagtgatgagttcctgcattatgcatcctcagtaagacataaatgtacattataggaaacagccttatgatttttatcttatttatacttgctttgtgtgtctatttaggaaaaaaagataatataagatggtacgatattcccagtataacactatgtatttcaggtgacagaaagtagagttatgttttcctttttaaatgaaaatagaatattaaaatgagagtcagaggacctgagccctactctcagctctgccactaacaggctttgtaatctcatacaacttaattagttatgtatctcccacaagatttttaatttctttttttgttattattatactttaagttctagggtacatgtgcacaacgtgcaggtttgttacatatgtatacatgtgccatgttggtgtgctgcacccattaactcgtcatttacattaggtatttctcctaatgctatccctacccactcccaccatcccacaacaggccccggtgtgtgatgttcccctccctgtgtctaagtgttctcattgttcaattcccacctatgagtgagaacatgtggtgtttggttttctgtccttgcaatagtttgctgagaatgatggtttccagcttcatccatgtccctacaaaggacatgaactcatccttttttatggctgcatagtattccatggtgtatatgtgccacattttcttaatccagtcaatcattgatgggcatttgggttgtttccaagtcttttctattgtgaatagccccgcagtacaaatacatgtgcacgtgtctttatagcaccatgatttataatcctttgggtatatacccagtaatgggatcactgggtcaaatggtatttctagttctagatccttgaggaattgccacactgtcttccacaatagttgaactagtttacactcccaccaacagtgtaaaagtgttcctatttctccacatcctctccagcacctgttgtttcctgactttgaatgatcaccattctaactggtgtaagatggtatctcattgtggttttgatttgcatttctctgatgagcagtgatgatgagcattttttcatgtgtctgttggctgcataaatgtcttcttttgagaagtgtctgttcatatcctttgcccactttgtgatggggttgtttgatttttttcttgtaaatttaagttctttgtagattctggatattagccctttgtcagatgggtagattgcaaaaattttctcccattctctaggttgcctgttcactccaatggtagtttcttttgctgtggagaagctctttagtttaactagatcccatttgtctattttggcttttgttgccgttgcttttggtgttttagtcatgaagtccttgtccatgcctatgtcctgaatggtattgcctaggttttcttctaggctttttatggttttaggtctaacagttaagtctttaatccatcttgaattaatttttgtacaaggtgtaaggaagggatccagtttcagctttctacatatggctagccagttttcccagcaccatttattaaatagggaattgtttccccatttcttgtttttgtcaggtttgtcgaaattcagatggttgtagatgtgtggtattatttctgagggctctgttctgttccattggtctatatctctgttttggtaccagtaccatgctgttttggttactgtagccttgataaactaggtattgattggacatatctcaaaataataacagctatatatgacaaacccacagccaatatcatactgaatgggcaaaaactggaagcattccctttgaaaactggcacaagacagggatgccctctctcaccactcctattcaacatagtgttggaagttctggccagggcaattaggcaggagaaagaaataaagggtatcaattaggaaaagaggaagtcaaattgtccctgtttgcagatgacgtgattgtatatctagaaaaccccatcgtctcagcccaaaatcttaagctgataaacaacttcagcaaagtctcaggatacaaaatcaatgtagaaaaatcacaagcattcttatacaccaacaacagacaaacagagagccaaatcatgagtgaactcccattcacaattgcttcaaagagaataaaatacctaggaatccagcttacaagggatgtgaaggacctcttcaaggagaactacaaacggctgctcaacaaaataaaagaggacacaaacaaatggaagaacattccatgctcatgggtaggaagaatcaatatcatgaaaatggccatactgcccaaggtaatttatagattcaatgccatccccatcaagctatcaatgactttcttcacagaattggaaaaaactactttaaagttcatatggaaccaaaaaagagcccgcattgccaacacaatcctaagcaaaaagaacaaagctggaggcatcacgctacctgacttctagatttttaatttcttaagggtagaactgaagcacataatcccagtactgtgggaggccgaggcaagaggatcacttgagccctggagttcaagaccagcctaggcaacatagcaagaccccgtatctacaaaaaataaatttaaaaattatctggatgtagtttgttgcacctgcagtcccagcaactcaggagtctgagatgggaggattgcctgagcccaagagtttgaggctgcagtgagccatgatagagccactgtgctccagcctgaacaatagagcaaatagagcaaaatatcctgtttcaaataaaaggatagaattgatgttcattcatatttatctccaacagtgattagcataataccatttacataatagatcttcaatatacagatatctcccatgattttcaggcaaatggagaattaaggtggaccttaggagagaagtcaaagccaaaaatgtaaatttttgtgttatcagcatagaggtataacctcaggacctttgaaatggacaggctgaaggaaggtgagagagagcatatgggaagtgaaaacattaaattcaggaactttggagccacaaaagtttagggcgtggttggaagaagaaaagaaaattaattagattttaaagcacaacaattaaatagaaagcaaaccaagatagtacaatatgtggagggcaagagaggagatcatttggaatggtgaatctttaccgggacagttttgccccctaggaacattcagcaatgtctggaaacagaaacacaacccagtgggtgttaatgcccactgtaggtaggggccagggatgctgctaagcatcctacattgaaaagggtagctcccacgaccaagagttatccagctatcctacattggaaagggtagctcccacgaccaagagttatccagctatcctacattggaaagggtagctcccacgaccaagagttatccagctatcctacattggaaagggtagctcccacgaccaagagttatccagctatcctacattggaaagggtagctcccacgaccaagagttatccagctatcctacattggaaagggtagctcccacgaccaagagttatccagctatcctacattggaaagggtagctcccacgaccaagagttatccagctgaagatgtcaatactgccaagtgtgagaaatcacaatgtgtaaggtcatggtcaacagtgttagatgccctaagaatctgagaaaaggttacattatttggtaattagtggtgacttttttgaaaaagtttctctacattatgaaaggataacgttggtgaaagtgggtagcgagacagagtttacaagacatgatgatttctgagaagttggaaagtaaggtggaagggttattttgtttctaagaatcaaagagacttgaccctgtttccatattaagaagagttaagagagtgagggaagtgagggaggatgggaaggagagagggagggaaagagattaaaagtgtgaaaaagagacgagcaatgcatattatttccttataataataaggaaagtaaaggttaagagtgcagaaaagagttggagaagatcgttttgaggatgaaaaaggaagggataggtaaatgaatggaattttaaaatgcagagatactggagaagttcacaaaagatgacctttctcagtgaagtagtaaagtataaatggccgagattaaaagaggagagattggcaactagaaaacaaattgatagcagtcttcctggaagatggataaggaataggctggtgatgactgaaagttttatggaatgatgttgaaaactcagctgactttggaaagcataagtagtgggttcagtcatcacatttaaagtggttcctctagaaatgcctagtagacaaaagaaaaggaaagcaaacacagatgttcagccggactaagggtgaggagttggcaagacccaactgtggtatcagatcaagggcatgaaaggagcaaaaaaagacgcagttgaaagggtgcaccgtgttttggggccgggtcatgaggactctcagctcagaggaagggaagctggtaaactggggaacggagggactgaagaagtgaaaatattgcagagggcaaatagctgatccaattttaggtgatgaggagaataaagttgtttcactgtggggaaccttctgcagtaaagcggcataaaagttgccagaaaggaaaaaaatgtcatttttccggagtctctgtttttaaagttaggaactgtccttgccttcaggcatcttaaagggaaaatattctgtgagttatttctacatttgctggcctgtgttgatcattttcttcagatattcacaactctataatatgtaggcaatccattctttttgggctcaaatatagacttagtccagaatctatacttcactctactccttactagataaataacctcaggcaagacatttcaccaacctttttctttttctatttctttctcttttttttttttttttccacctgcaagatgggactcatgagttctagcttccgaggctgtcctgaggataaatcatgtacaactataaaatatgttaggtttaaaattagcaagaaaaaaacaaacaatcccatcaaaaaacaggttaaggacatgaatagacaattctcaaaagaagatacacaaatgaccagcaaacatgtgaaaaaatgctcaacatcactaacgatcagggaaatgcaaatcaaaaccacaatgtgataccaccttactcctgcaagaatggccataataaaaaaaattttaaaaaatagatgttggcatggatgcagtgaaaagggaacaatgtacactgcttgtgggaatgtaaactagtacagccactatggaaaacagtgtggacattccttaaataactaaaagtagaactaccatttgatccagcaatctcacttctgggtatctacccagaagaaaataagtcattatttacaaaagatacttaaacatgcatgtttatagtagcacaattcgcaactgcaaaaatgtggaaccagcccaaattcccatgaatcaacaagtggatgaagaaactgtggtatatatgtataatggaatactactcagccataaaaaaggaatgaattaatagcattcacagcaacctggatgagattggagactattatcctaagtgaagaaactcaggaatggaaaaccaaacattgtatgttctcactcataaataggagccaaactatgaggattcaagggcataagaatggactttggggactcagggaaaaagggtgggaaggggacgagggttaaaagattaccaattacgttcttgtatgctgcttaggtgacgggtgcaccgaaatctcacaaatcaccactaaggaacttactcatgtaaccaaatgccacctattccccaaaaacctatggaaataagaaatttttaaaaaatacattaggtaccaggtgcagtggctgacgcttttaatcccagcactttgggaggccaaggcgggtggatcaactgaggtcaggagttcaagaccagcctggccaacatggtgaaaccctgtctctactaaaaatataaaaaattagctgggcatggtggtccatgcctgtaatcccagccactcaggaggctgagacagaagaatcactcgaacctgggaggtggaggttgcagtgagccaagatggcagcattgcactccagcctgagcaacaagagcgagactccgtctcaaaaaaaaaaacaaaaaaaaaaagtttttttaataatttaaaagattcatatttttctattctcatctgtattagtggcctcactggtggccaatcttctgcctgacttaccacctgttattcttcaaccagcagaaaatcctattctgcccgagttttatttttcaaataagatcacctttattatgtttcccctttctttaaactacagtgtttctcctctaaacatcaaatgtaaaagctttacatccccttgggaaaattgcttaactatgtgaaattctgatttcccctcacatggccttgcaggatgtttgcaataagcagagatcgtttgcataaagggcctagcgttatgactgtcatgaatgagtgcccagtggatgggtgctatggcagcagagattttacaaggatgacagaattcttgtaacaatccccaaacctcatttccccaagcataactttattggattcttggtaatctatcacttgttattattatcatggagactaatcataaactgatttatggtttcaatcagtttttttctggtcctcactagatggtatatttcttaagacagaaactaggtttaaattctaaactatatttcaagactattttagtctacaatgaagattcaatgactacttatcctaaagtatggcatgacagacagcatcataccacctagatattaatgagaagaaaaacaaacgtcttaagtagttgtcgaattcagtaagcaaaaacgctactatttctggaaacagggtctgctattcagttacaggagtcttttcgaatgtagtcagtatggtacctacaaaccatgatttgtgtgtattatggacaaaaattcatcataattctaatagaatgattttaaagccaagtcagcttggagtatttatacagcttgtatttacttttgctaaaataattgaatttgtaacaattataaggctgcccagatctctttagtgatgagtattgattattacactcagaagctttccctcattaaaaataaagtgttctagtcattgtggctccatcaacagaccttagtgtcattgttacagtaatcatgtgcttgatggatatattgggacctctttaaagcttcagttgtaacataatgatttgcaaagctttcaaaagttaattatcttgagtgtcccagataaaaacaaatgtttcatcaccctggactaaaaaaaaaaaaaaaaaaagaaaagaaaaaaagctgtagtgataggcaagggtcaccataggaagagcatctgcagaagtcttaatgacttcttgtctgtgattcagagtccagtgggatacgagcgtagaaaattattcagatatttggggtgacaaatatctgagtaaatgtgaaatcattgtcaaggagtagtggaagatgagatcaagaagggccaggttatagaaaaccatgacttccaggagaggcatgtagaattatggagtactcagtagagaacacagatggttcctaaacaggggactaataccttaatttagaaaaacctatctgcctattatagtaagtgaagtagagtagagggtggaggactgtgtgaggttgaaaatggggccgaagggagatcttgaggcaagtagaacagtaggagaaagatttgatagatgcctggcaaaaattcataagggagtgatcctttaagacagaatggaggaggggttagaaaataacagaggagatttttgaggtgtatgtggctatgttaggtgagtgatcaaatgtaaggcagggaaggctggagtcaaagaaaacattgaggcttgaagtttgggtaatgtttaaataattaatggaattagttaaattaaaaataaatcatttaatagtaactgatgttataaaagatttagatgtgtagaagtgaaaatactagcagaaaaaccaaatagaaatattcatcagtgttaagctatatattattcgacagtacatttctctttgtgaaaatgtacaagaatttttgtttatttatttttaccatggaattactggctcataaaatatgacattttcaattttatttgatagtgctgacttgttctctggagcagttgtacaaatataagtttcccttagctctttatgagttttacttctccaatgcttgttgtgttacttacattttgaacattgcgctaacagcatctaattagatagcatttccctgattgctgataaaaatgagcatctttttcatatgtttaatagtaattcagagtccctgttctctaaatatcctattcatattctttgcccattttttctattatattttgttttttctcgttgttattgtaggtgttctttatagaatatgatgctactcttttgcaagtatgtttttcccatctgtctcttttaatttcacatatgttcctctgtttctgaaatgtaaatctgattatattgcctaggtaagggagggagagcattaggacaaacacctaatgcaagcaaggcttaaaacctagatgatgggctgacacgtgcagcaaaccaccatggcacatgtattactatgtaacaaacctgcacgttcagcacatgtattccagaacttaaagtaaatataataataataataataataataataataataataataaacttcttaatttaaaaaaactctatttactcatggacattttatcctacaagattcacctgatatgtcagtgctcctgtgaattattctctgatttcttatgtgaaagatctgtctttcctttcttcttccttatgtactttgtactccataatatagaatcattatagcacttctgacaattgatcgtattggtttatttacatgacagtctagattgtaaactccttgatggttttcttcaccttagtactcccagaagctggcccagggtccaggatagaatgggtattcagtaattgctttttgatgtgaattccctttgaaaaaggaagataccatttacacttacttctgagagattttcacctttttgaagccgtggaccctgtctctctcactcatactcatattccactatgatgtcaatcctcacataagagatgctgaattaacataaccatgatctccagctaatcaacacacttgaaccactgtttttctttactcttcccaagaaaagtaaacatcgtaaagaaaataattttcatctatacatctttaaaattgtcattaaaaggtaaatatattcactagacatttgctgtaacttttagaaaaaactaaaatgtcgattacagactttggtattgccatgttttttaatgaagatgattaaaataactttggtaaataactccaaagtaatttagtaagtttctactcaaaatgtatttgagattcaaatatatgcctagagggctaccaattcacaaaaatatattgttatttcatttgctaaagtacagttcttcaaattcttaacaatctaccgccttccttgtaatgtgctagggtgacctaatttgttggcagcctccgctaggatgtggtagtgaggttgatctctggaattcgcacacacactcattaaccagatgcagatggtcaaataacagctatcagattgactcactttgaactccttaaaacttatgttacacactttgggtccaagttccctttccacagcatcatcttaatacctaaaggacagtgacagcctggaaaattgcatattcttttcttttagaatttgcttccaagctttcttatctttgctttgctgcatatttttaaggtgttatttttttgttaagcatcagtgctatcttaagtatgactggcacatcttttatgtggctctgtagcatcacggatgatactttttggagctgacactcttcttattaaaagtgccattttattttctttttatttttgtctgtagatacagattgccgaaagaaaggaattttctttttccttttttttcagttaaactactgctacctaatacctaatttttattgatgatagcacatgcaaaaatggacgttaatgctctgctagctcctcctggctgtggtgattggagttgggcctgttaattagttacccacactcacagaggatttgattagatacttaattctctttggcaactcttagagcctgtcataaaatgttttttgaaagaaagtgtgctcttttcacataatttcattaagaactttttctcaggccttggaatacattggcaatctcaaataaagttcaaagaacaccattctgatggagcaggtcacttttctaattttaacctaagatctttataaactccacgtgacagacttttcagccataaaatgttacccattgtctgtgttctatgaataaaaagcacaagtgggaatgctacagttcacatttgtgagctgctgagtcttgagtttttatttttaaatggaccctcaggagccaaaaaaaagttaagttaatcatactctcagttcctagctcattattatcatccattcctgcaagtcttgtttcatttccttcttcttacccagtactcctatttcccagcaacccccattcactctaatgactttgatgaatgtccttaaatatgtgtgcaccttgtacaatatgcagcattgtgaagtttccatgttttcaaggataataagctttccagtgtcaataaccttgtttactattacttgaacaaactgcagctttagctaatgcataaaatatgtaaatgaaggagccataggatgttagggaaaatattcaaatccagccaactaggaagtgatttcttgtttgtgaggtatttagaccgtgctaggtggcctttattaaacagtgactataggccgggcatagtatctcacgcctgcaatcccagcactttgggagcctgaggtgagaggatcacttgaagacaggagttcttgaccagcctggccaacattgtgaaaccctgtctctactaaaaaatacaaaaagtagccagatgtggtggcacatgtctgtagtcccagctacttggaaggctgaggcacgagaatcacttgaacctgggagacagaggttgcagtgagatctcgccactgcactccagcctgagtgacagaacaagactctgtctaaaaaaaaaaaaaaaaaaaagcccagtgactattacccattcacccattcatagaactaaggtttttaccttagctttatcaaaaaaaaaaaaaaaaaaaaaaaaaaaagcaagatggtgttcttattcccattttctaaattaaaaaaaaaattctaagaaaggtaaagtgaccagccaaatggcacacacctaaattttggttctgggattaaatctacatgtgtagtcttctctctcaaaaatggaatgtttcttgtctttggaaactccaaggacaaaaagatgtcttaaagagattgggaaagatttgcttgaggaaggatcatatggccttggctttgaagaatagatctaatttggtcagactggtaggagaaaggctcattgtaaggaagcaggcgggggtatattcaacaggaaacagttttccttggctgagctgcagagatgaccattagaaagtgggaaaggcagactgaacctaaatcattaggcatgatctattaggctgggaagtttggttctgtctaaaaaatacagaattttatcttgtaggataggttaggatagtgggtggggttgggagtaaatttattcctcaggtgtacgtatagaagtttaagctatgacatacaatgactaaccagctatattaccattgaagcttacatattcctatctggtttcaaattttacacaaccaaggtgaaaaagataagaccaagaaccaaaataatcagaagagaaaatattaaaaatgatagttactgaggtcttgttagaagccaagcttaatgctttccatgtattgtctcaagtaatcttcataataattctaaatggtagtactgtttttttttccattttgcaggtttagaaaacgagacataaaagtaagatggctgactcagagtcaaaaagctagttcatggccaccggccatgagaatcagtgtgtgtctgattctcaaccattaaactctattgtctccaataagtaaatggttaaatgtgtgataagagccaactagtttaaactcaaggcagtgttgggaatattttatctgatttcaactgagaaaatagaaagtgtacaagtgctctccaaggaaaccaggccataggtttatagaatgaaatcataactttgaaggatgtacttcatcctctccaagtacttaggcagatagacctgtacattttaatacagtcatgtggctgcaaatgtcctccagggggccatttagctatctcctttttgcacctaaaggttttgtaaagatttgaaacgcactggtaatgaggtttatgtcagaggcaaggggttggtgggggggtgtcaaagctttagtattatgtaggttcaactgttacaagggagatggtcccagctgaattttttaagcaaggggaaataaatctcttcaaacaaagggactgctttttctttcattcaacctgatttctctgcctctgggctagtctttcattttacgtagtcacagagaacagactcattgacccttcctcaggtcccaaaccagctagtcatgaccagaatttggtgatctgtaatccaggtagaagagatgtgaggattttgtttacgtgtacactggtagctcatagaaacctgtgtattctaaaggagaaattcctggcccagtaactggaattcctaagttctcaacacaaacctacgaacatttctatgtggatgcttgatgaaggatatttataccatttctactttcttaaactgtaaaaattagacattttagctttatacagtttgtgtagtcctatttataaatcacattatagtaaataagaatattttttcagtttacaaaaatagcttaatatttatagaagtcctacggtgattcttttcactctctgaattagttaattttacgtatcaagatttcttaatgaggggcctgtattgccccatacctatttcatagaaatattgtaaggactcaaggtttagaaacccctaattttctgagattgatatgaaaatataggataattataaataataagtatcagcattaagtgctttagtaatttagttataatttagtaatttagttataaattagacattttaacaaattgtgtttactggggagagaagacaaatagttaactaaatagttcctggatgctgggaacttcatgtatcttaactcctttaatctatacagcacccccatttaccatatcagtgcacatgaatgaaatgcctactacattctggaagttgcgcttgatattggtgttacggtggtgaacgagacagatacagcctccaaactcagaaagctaaagaaccagagaaaattaaaagaagtcccaattgtcatatgtaaaggtgcacaaagggttggaaggggacaggggaccttacatattaacatttcattctgagcccctgaacacattgagcttagaattcacatgcataaaaggtgggcaggcttttatggttaataaatatgaccatgtatggctgtccaaagcccttggtttctttcctgtcatattatcctgcctccttacaataattgatcatttcccagaagataactttccattttaagcattgaaacaagtatgccttgaataagcaagtgttcacattagcgcttacgtttgtattctacgatggagaatgaactcatggtctttcctatttccatcttccctgatgatgattctgtggctacagttgcctagacactgccttcaaggatatttgagtgaagatgacagcaattaaaaggagtaatggttttcaaaagcagttgttctaacaagctgctgcccaggttaggtgagcatgttaacatcaacttctttgtcaaccttcaaggcactgtcataatgagttgatctcttattattattattattttaatgaaaatgagacataacagagtttggggttcttttcccccccaaatacagtactatgtttctgaagcccatgagattacttgagcattggagtatttcaattacccttgcagtgcactaaggagcagcgacgttaatatcttgttaattccataacaatcattgttccttacttggtatccaacatagctgcacaagcattctgcctaataataagactgctttcttcccctaaatgatttataatgcacaggaaaatcactcattatggactccacctcactgactctgcttttagcaccagacacatagtgtggcttggtcagagaaacccagggcttaattataattccaaaggtgttgtatcctgaataataattctatgtcattaacaaatggaaatcccaggcaattatttgagtaggtgaataacatcaagggtagatgttataaccaacttttattattcctgaagaagaaatgtcactcggaatttggcttctatcattggtcttaattaccatttacaatatagggcttagagaacaattacctaaatcacacatgctcataaagaatcatgggaagaggaagaagaggtggtcaaggcaaatcaagtcatcctgtttattggactccttcatttgttggctcagaacatatttaccaaacacttgctctatgccaggttcagtgttaggacctgcagacaagaagagaacaaagtaagtggtagagaaaggaaagaacacttaaacttcagcaggcaccatggaccaacggtcaattctcagttctgcctataggatgccccattttaggccagcttcccatttattgcaattactcattggggcaaatgaataacacaaatacatctggtttttcataggtgaagatgatttctgaatatagatttggaggttattggcatatgagtaggagcatgcttggaaaattattttcctgaggacatgtaatttggaaacattgaaaactttttgaaatgaaggttgtaatgtttgagatatgtttctgctttaacatatccaaaatgatttctaaagtccatgtaaaaggaagattttaatgtaaaattgcctattattagattattaaaattattgaatatggaagaaatatgaagaagaatggtgactgatgtggtttgtctgtgtccccacccaaatctcatcttgaattgtagttctcataatccccaagtgtcataggagggacccagtgggagataatggaatcataggggcagtttccacatgctgctgttctcgtgatagtgagtgagttctcacaagatctgatgattttataaagggcttttccccctttgcttggcagttctctctcctgctgccatatgaaaatggatatgtttgcttccccttctgccattattttaagtttcctgaggtctccccagccgtacagaactatgaatcaattaaacctcattcctttataaattacccagtctcgggaagttctttatagcagcatgagaatggactaatacagagacgatcaggagagtcttagatattgacagatcttcacttttgccaatcccaaatcatttcatgtgaacatatggcgtttctccttctctttttctatttgccctgcattattcttttcttgtttctcatgtcttgtgtccctgttcaggaaaactcatactttctcttttagtcaaggtttctattgctttttgaagtttattctcccttctttagctatagccacctttcttgaactagtttaagttcctgccttgatttccttcagtgatgagaaaatttcctgtctctaagggagttcaacagagtcaggctcccatatgttgttctagcagaaagagaaacctactatatgccaaagaaacacttcctgtgctttacttctgcttcagagagtgtctctgggcataagcaggctcctcgactaaacctccagtaagaagtgtccatcagcatcacagccataactcaaatctagatattcaaattcctggcctgtatatacattatgtatgtgtgtgtgtgtgtgtgtgtgtgtgtgtacacttgcatatatgtatgtgtatatatatatacatttaaaattacaatatatgtgtgtgcatatatgtataaaatcagaattcttgttaatatcctcatatattcactcatttattcaataatattactgagcacctactatatgcaagccactattccaggtcgttggtatctaatgcacaaaacaaagcctgagctgtgttggagcttacattctggagaaaaaaaagggacaacaatgaagtaaaaagtaaaagatgcagtatgtcagttggtgataagtgctctgaagaaaaataaagcagagaagggagcctaggagagccaaaggaggggtaggggatgtttgctcctttaaatggcgtggtcagggaaagcttcactgacaaggtgacctttgagcagacaactgaaggcggtgaaggagcaatagggcaggggttgtgggggaatagcattacaggcaggagaaacagcaggtgcaaagcctggagacaggactgtatttggctttgtccagacccaggtaagaatcgtttctccaaattacacaacttggctgagggcagtgggcaggagaagcaccatacacagaaaacactgtgaccagtgccccctggagttgtgcaatgagtctgcccttgcaaggacaccagtgtggcttgagtagagggaagcgagccagatctcagagtgccttgtagacctgtgtaaggactttgttttactcagcagtatgctagtaaatgtttaacaatcagctcttgggggaatgaaggggaagagatttgactttgatttgtagcatttgtcaattgctatagtggaaacagtcacaccagggctgagactaagcaggacgttgctgaatgtggagctgggaagggaagtgcagcggtaccaacgctcatatagtatttcttacatatagataaaatagatgtaaatagctgcaagagcatagatgatatagtaaagcgtaataggaagggatgagttttgagaatgagttacctatgttttaaatataatgtatataattatatgtttatgtaatttaatttttaagaatggctgcgtttctcaagcttgcaaaatttgtcagctctcttgagctggtatgagctggcttcagcacaccactggatttcctcggagtgagggctcataagcagtagacatacaccaccagactgtagaaggatcgcagtgctgttctgaaaacaggtgataggtggtcaaaggcaggagcagggagaccagtgaggaggttttccaaaacctttaggattcagcagaaaacatttggacaaaccctgcacctgcccatggtttccctcccaagtagcttaagagcatgagagtatgatcctggccttagtcacttaccttaattcctctattcttaaaggccaggtttcttccggttaatgtttctgaaatcaggattaagttgggatgcatctagaaactgatcatgtacacttaatacatatggtttcttttttttttttcccctgaaaagctggtatgaaatcaatgtgggtttagcaactgatagcattttacaactgagaaaacattctgttttgctttgtgaaccacagaattgatcgtagtattgtttgtgcccccacaattgaatacaactgataaaggctttggaatataaatatagactttataaataaagcctgaggaaattgagagtgttttagtaggaaagacaaacactaagatgtggggaaaggtgtaggaggaatcaatgaatcaggtgttcaggagagccagtgagttcttctctgattaaataagatagacagccatctagggatgtgatttaaggagtgctacctccctttcccaacagccggcaaagacagattatattcccactagttcagttctctgggcttcaagcattgtctctgggtgatctctgttaaaatgtctgagagtgacccaggaggcaaggcacattcacagagggaccattaaaaagattaatgggagggaaacacccaaaggaaatgaggctagaaaatgttaatggagaatcaacgctgggtacagatctagtgcagagtctttcagagcctagtcatgactaaacctctttcaacaggtccctttgacttcagcaagcttacaccaccatgtgctgttggggtaccatacctctgccacaccactttcttccattgtaatgactgcttatcttcattcttgtgttcccagagtgggccctgtagaagcacaggaataaagacggttggcattagttttacacaaaacccacagattaattctacctttattgttttctctctagccaaggataattacttttgtatattatcctatcgcactttgcagtttttataatgtcacatccaaatctcagtttattaaataactcgaaacacaaaagtcattcaataaaaatgtttttcaagcagtaattatcccttaggaagaaaagtttcatttctataactggtaaaaataatttaacgtgaatataatggacattggatgattatcatctttgaaattaggatacacggcaatacttaacgatatattatctgttaagcgttatcaatttagatgagggctggaagccaacatgattgtgaacccaaataaaacatagacacagagatatttgtaactatccagttattaggttagtcatccagctgatttttttaaagattatcatcagtacttcctcttaatcttaaaatagagctgtacattgcacctctccagggtctgtggatttctattgaatcagcattgttcatgttcaagattcttcacactcagtaatacaggagtccttgggctactgtgctcctcctacccaaccactcattccatgcttcagcacaactgttctgatatgagtcatatctttatctactaggattcagcataagatttcatttggaaaaaagagtcttggtgctaccgttaaacaattttaaaactactggtctagtttatggggcaccctaaaagatagactatgtctgaatggaatagtgcttggaggggtaagaaataatgtgaaaggtccttcttgcaggattattatatataaataaaaaaaagttttctatttgtaagaggtataaaaatgaaagccacaattttttttaaaatatagagaatacacctgattttttggaaactactgtgtgccatgttttgtgttgggcactttgcaggcttttctcatttaatcctctatgaagtctcatttgacttcattttatggagcaggaaaattagatactcagattgttctgcctgcatctaaagtcaggtccagtctgactgcgtttcaaactcttggaacctctgacatttactcaatattttaaagtgtgtattataaataactgtctccctgaggtgtgttaggtttggctttgcccaaagttagtaattaggttggatgaccagtcctgcaactccagcctgttggccaactttcctatttgatctgagactcgttacagggcagttttggcatgggtaagaaaggagatgagaaatagatgaaaccacactgcaggattaaacctgaaatgttatttggtggaaaaagtattcccaggctaaactctagttctttcattcactactctgcacacgtcataaatcagccagaagagagctatttccatattttaaattgctgcaaaaatctctccaacttcctcattttgcagataaagcttcaacattatatgaagcagtgtatgttgaattttaatgcttacttcagaaatcatacttactcactttgtgtgtttttgacgctcttcttacatgcaaccatgacctaatttgtttgcagaacatgtttacttctgtagtggtttattattaaaatgtttctaagcttctgtcttagctatttagaaagctaaagaaagaatccctgttgcctttgaataatgtattggcccttgctaatatcttactgaaatagctcaaacccagtttaaaaaatcatttcataatattttagccattctcatatatgagttatattataaatgtcataaatcttttcaaaatgttaaaacttaaaaaaactgtgagacatagacaaaatactattagtaaatatttaagtatcaatatttgaaaacgttacagaaatatgctttaaaaatatctacaatgacaaaaatatatgagctagaaaatccttaaattaagtctgagctataaaatgtagagccatattaaatgtcactttgcattcaatttgaaggaaaaaattaagaaaccaaaacactttgttaaatacaaacacttccccaaaaaatgtttaactcttaatcatgttaatatatattttaatcctattatgaaacaggtatatcaaacatatatacttaagttactggatatgtaaacttaattcatataccttgttctttaatagtcatctcttgttgcataaggcatcttatatctctctctattcctagtcttggttactaagatatgatggtataaatatcatcatgagataacatcttatttatcatttttcagaaaccaagagttaaaaacttcccaaaatgccacaaatctttgagctcttaagcaactgtgtgtgtgtttgtatgcatgcacgcatatgtttgtatttgaaaagggagtgggggagggggtaagatagttataatgcatgttgtgatttattggatactaatcttgggaacacaagattacatttcaaaggtcagctttgcagtcatgaaaaacaaagattctgcatgtttgatgctaatgagccctgtttatccagtgtgtgaagtaagacaaatattagattaaatctaaatcacagaatgttcttattatagatagaagcctttctgggagcagatgtgctaatactaaatagaacactgctataaaatgttttcctgaattactgaagtaaataagatacactaatgaaaatggggagggggaatcatttataaaattaaaatcttgtaaaagcacaattagaagagtctactacctttaaaaatgtgactttatagccccgtatattcctttgaaaaataaagtccttcctaaaaccatgatttccaagtccatgggtttatttaggtattctttaagcacttcatttttacaacatgactcttgattgacatcccattacttacatgccattcaaattgttctcagtttcccatttcctactttttcctttcaattttgtgaattgtgtgcatcttggtcattgggctcatttattcattcaacaaatgtttccaaaaagcccatcatgcactaagtctaagctcagcttggcacctgtgatgcaaagataatcaagtcatgattcctgccttcagtgaactcatcatatgaaaacaaagaaagaagtgatgagtccatgtggacaaatcagagaagactttatggtcttggagaacaggactttctaggcagtaaagggggtgaaaaagcacacactgggggatagaggagaggtaaacattgacatttgggaggaggtatagagtaaaagggggaaacgggtcaagagaaggctggcgaggcagaaaggaggtacactgggaatgccctctcgctcacattcaagagtttgaacctcatttcacaaggatctcagagtccctgaaaggtttttaagaattcaatttgtagagacagagattgaaagcaaggacacaagtcagaatttctaactgtccctttaaagataatatgaataatataaagacacaacttgtcttcttccaaagcctatcatttttccatttctccccaaatggaatggcaagaaggaaccctagaggtggaactaactcatcaggagaaactgtactttgccaggcaatttgtgtgataaactgaaaaacaagcaagcaaacaaataaacagaaaaggtaaaaaataatttttttttaccaagccattcataaattaggaaagaatctctcctaacagtattttctgtattttttcacttaaccttaaatacaagagtggagctaagagccatccatgtgtctctgataagtaaattacttttacaagacactgtatctgtgctccttctatatgtgtgtaccattttttctatgtaaaagatagttatgtaaatttctattttatgaaccaataatagcaatgtataaacaagacaggtgtattttatgacaatgtcttgtatgaaacatatcatttgtatctcaaaaaaaggaacctgccttaacagaaattccttctctacaatctagatgctttaagtatcagaaatagctcgtcttatgatcctatgaaaggtgccatgtgcattttttttcccagactgaggtttctatctatatcatgatatgttcagttcagtgagaagcattcaatttatcaccaaatactactgcttttagggaaaaaggcttttaaaaatatagttattcattttgaaaaactctctctttctgaaaaccactagaaagtcaaataatcttatcttcctgatcgtgttcacagccttggaaatcctgggagcaaaccacccaggagagacctgcactgctggcccagccaggctgattctgaacactgactcatgttatgtctctcaggtgttgtcaaattttaaaggccaatttcttgcctttttttttttttaaatacaaaatagttaaatgaagtcagcaaagaaatgagcgtggagcactgctgtgtacccaccaatccttaaaagttacattataaactccagacctttcatacacataataaggttcattaaatacttgttgaaaaatatgcattttatgaaataagtaactaaaaaaccatttctgtgcaatattatatcttacacaatgaatatcagtaacatctcatgtaaatatatctccatgtaaatgaatatatacattattttatgtgtatggaaaattttaaacaattaaagaaaaatataaggagggcatcatgataacaaccaaggcgagattaagactactcaaataaagcaataccaactgggcaccagtggctcatgcctgtaatcccaacactttgggagaggcagaggcaggaggatcactttgaggcaagagttggagcccagcctgggcaacatagcaagatcccatctctacaaaaaaaaaattgaaaattagttgggtgcagtggcacttgcctgtattcccaactattcaggaggctgaggtgggagaatcacttgagcttaggagtttgaggctgcagtgagctctgatcatgcaactgtactccagcctgagtgacagagcaagaccctgccacaaaaatataaaaataaagcaatactaatatacttttatcatgcctgaggccgatttcaaatttatacttaacagtacaagcctttgtaaaaaagtgaatatgaaagtggcttttagtgactttctaccaggaaaaagttgaactgccaatttgttttcaaagagttgaggttctctaaaattaatttctggtttatcaaattatttccatgcatcctaggcatttaatgtcatcttctcatcaattaatagaagggtaaaaataggaggagaaataagtaacaggggtaataggaggagtacaaaaaaatcaaatattattacctgtttgcttcatttcttccttaatgtttttggacctgtacactttttctgtgtatattgataacataagaagttggctgagcttatttctctcttgaggtaatagtattcacagttaaatccttatttttctaaggaaagttgtgttgttctgaaaattgccttcaggcagccattagctagggactaaatatctatttacagtattttatagaaatgtttttggtatatagattaaaagtgaaaatctctaatattttattcacttttgatttttttaaatcctaaaattatattatctcttaagaaaaatatatatgtactagtcatttttcaatatggtaactttttttcctactctaaatctgggcctaggatgtcacaactgaactgaacattgaaaattcagaaactccaatatgtatcattccataatcaccctgtattgttcactcttaagagtggtttgaacctatgaaggagagtttgcatccatgtacatggttgatagagtttggatatttgtccctgcccaaatctcatgttgaattgtaatccccaatgctggaggtggggcttgttgggaggtgtttggatcatggggacagatccctcatggcttggtgctggtcttgtgatagtgagtttttgtgagacctggtcatttgaaagcacctcccctcccactctttctcttgctcctactttcgccatgtgatgtgccagctccgcctttgccttccactgtgattggaagcttcctgaggcctccccagaggcagatgtcactatgcttcctgtaaagcctgcagaactgtgagccaatcaaacctcttttctttataaattacccactctcaggtgtttctttacaacaatgcaagaactacctaatacagtggtaaaaatcccaaagccaagattcttgtacatctggaccagccctggtcattgccagttacaaatgggcagataatattttgctaaattattgctatttcaattgtaaaagcaagaagagtgccagggaactgctagtcagatggccacatgtggatgaggttgccacaggtgactggtttagtgttaccaggtcagaaaattggtgtcatttttaaattcgtttttagagtaaggtggaggaataatcatttctagctcctgaatgttcctatctgctatccaaggcatatcaaggtgtctagaaagccaaattaggaattagaaggtgcttaataaggaaaggcttaagcaaagggagttagattgccttgtagacaatgttatacagtccacagtcatgattatttctgctcccctacagggaatagtaatctattttatatcatgatgtattctttccaacacttattaatcagcacttaattctcaaatattagaatttatcttctcttagattttaaaatcagtgtgtttatttagaaggaaacactttagacttttgatgaaaatttaggaaagatttattttaccagtaacactcatcatcttttgggtgggtcattaactaacttagatgatggtctgtaaagtaggaaaatttttataatgactccacagacagctaagtaaataatgatcacttgcaagctgatttggttgtagttgtgtactttttaatagagagcacaatagatcactgtatctgtcaggataagctagttgtattgtgataatagacaacttcaaaatctcagtggcttgaaacaatgcagtttcttttctttctagcattacatgcctaatatgagtcaggtggggacgctacacttgtgtcctcactttggatcctaggtgacatagcagttgctgtgtggaattttaccagtcattctgactgcaggaaagacagagctctggctggtcttaacgggcaattaaatgctctggcttggaagtgacagagtgttacaactcgctggccaggacaatttacttggccctatctaaccacaagagagccagaaattgcaatgctgccatgtgaccagaaatgaagagaactggaaagatctggcaaacagcattgtgagcctcctaatcatttgtgtgcatttgccatcaccccttatgttagcatatctttattcagaaggtcggagaatcacaaatgtgtcaaacaatgtcagttactaccatgatcatttattttagatcccattcttcctccataactacttttttccacacccacgttactcaaatacaaaaaccagtatctctaagcatttttctgaaattcaccttaacttctttgaacctcaatttgtttcagtaacaacaacaaaaaaggctcagactacagtgtctctgataaattttaaaattttatgattacattgtgaagttattaaattgtggcatttatagtattcagttatgtaggtatttataatgtgtgtttagcacattttaaaaacatgctgtagttactcagtatttagaacaaacaatataaattgaaataatgagaaatctcagggttatcctaaaccaccacttgaatggaaacagtaatggacaaaccataagctgtgctggacaactactgcctgctctcagatcccttcctctcctttcctctactcgcctctctataagcagggaattacatttcccagggtcccttgttctttagcttctgggtcagttaagccaatcaaagggacttatggaagacctgtcccaagcaggagagaagctggaatattttttcctcctcactccatttcctttccaagtctccagcagtaacagcagcagtagcagcagtaacaactgtgtctaccctgtggttctgcctcccactcttctgtgacccaatcccccaccagagactttggcttgtgtttttgggtaatagctcctcctgttatcccataagccctagcagagcgagtggcttcctttggtaatgtctgggtcatcgttctaacttctgtttggtttctcaactcttctgtcccctgtgtaactatttccctgtattaaatactttctgtttgaaaaccactctgaacctggagtggtttctggttttctggctagatcttgactaatagaatagcccactatgaaactgaaagattccttgaaaggttatgttgactcaaaggccacataagcaattttctttttaaaatgaatgaggtcagtaggataaatggaaagtataatgaaccaggcagggtctgtatgttacacagaagatcatattacacaaatatgtttatattcataccattttgcagattgtttaaagtgtaagatataccttttttccatgtaaatatgaaagttctgtttcgtgatggaatcatattcattgcattgatggagcaagatatatttaatgctctcatactgattaatgtttaggatctgttggacttttgagtactataaataaaactcagatgaacacacatgcaatatttgaaggatttaaagtttatttttttcttttttcaacagaaggtacttctaaccattttactatccaaattaactttttctgtatcaaaactaaccctgtccaccaggcctcctagcttttttattttatcttagcttcctaagtcagtcaggcaattgataggatccaaaaggaacagttgttatattttatactcttaagtctctacagtgaagcaaagggaaataaatcataattcagaaagaaaagtacaagagtaagtaagtgttaataccatagcactgtgttagaacaaaaaatgtatttagtttgcttagtaaatgcaaaaacccagcctaaaccagcattctaagtgcagaagagaacttcaagattgtcaagaggaaaggagaatgggaccaaggcttccaatttttaattttgaaagtacagtaggaaacctctttggaaactctatttagctactattaatatgaagtcaagtaacacccaggcagctcatctcagagaatctcaaaagtgcaagactctctgacagttctttttctgcaaagaaaatgaccatgaagtcattctgctttattaagagtcctcataggagtagagaaaagttttaataagcttatagctactctgacagtggagtagtaaatactaagcattacttcataggaagaagtaagtataacaccttcacaggctgtttttataacatatggactgttaagtacttgagaaataatttgtttgtttttgcagctcatagtttaatgtaatgaagcactactgagttgaataactagacaagaaactccttagttatggggaattatattctgaattaatgaattgcaaattgtaagccaatccaactcctataaatattatgaggaaagaagtagcagtcttacctacacagattttcaaggcaaagttattctgtgatgagaaaaagatttacaacataattaagattcctaaaatataagtacttaagaagaaacttaccatatgtttaaaattatccaggactgcatttatgatctgtgataagtatatattttctggaatgccgaaaacctctttaaaggttttctgttttatttttatggctttattgtgcatttcgcctctagcaatttacaatgggctttaaaaattcaaaaaataaaataaatattttcattctgtgcctgtgatagttatttcactttacagagaaaatactaactcattggtaaaaatacaaataacttaaaatgacagatttaataaaccacattctgggaacattttgttaacacagctctatgatatgaaatacagagcttttttcaagtttgaatgtcaattaatttgagaaatgatggtcttgagaattgtcttcaatttctgtatacgggagatcattaagaaaatatgtaatcttaatgggtcatttcttttttccaaaaactgactttagagttcaaaaacagagatgacacgataaatagggaaagaggccgtgagtctgatgttaaaattcttgaaacctggcttcatcccataataattatataaccctggccaagttatgaacattgatgattctgtttcttcatctctcaaagacgtaaaataagatataacttgccttcttcaaatggtgggcctaaggatgagggtagctaatacaaatgaaagggttttaaaaataatttatgtggttagcaaaaatgctatacaagaaaagaaaaataaaggatttcatagtcaaatagtttaggaaatcttagattattgtgcacatgaggcagagagagaaataatgacagatttctcagacacttcagtaaagagagaatagattctgcctgttacctcgtttgaccttggaaccctccctggctccatttcctgtcacacatctggagaacactggtggagaaaggtgattccagagcgcacggaggccatgatggtttttcacgtagggtgttaaagagcgaggtacagaagactcaatggagcaaagctaccacagaattgatggcactaataacttcttgagggtgattctagctgagtgtttcctgcttgtttcttataaatgtatttggtacaggatcagtgtagttatatttccctgaagctatttcttacacacgatggcttcagcaggtttgaggccaaaatgccataggaatgcacatgccttcctcagattttgcctctccattttgaatgtatgcaagtcttgaaaatcctcgttattgggacccttctgacccctgaccacagccttgtggtctgacagacgctgtagcctcatggaacagggcattttctccacctgtggacttgttttctgtattcctaaagggaagaaaataaagaatcctcaagatctcttccttgttcaaaaatatgggccaaataatagtacaacattccctccccagcctcctgggtctttaatagttgccctcacctccctcatctaaattagtcattaaagactagagcattatctccaagaagcctatatgaaaggcacagcatttaactggcatgaaggccattttatctctctcctaggtattgattagtttctcagattagatcacggtcacggagtcagatgctgaaataggatccaccaaataccgcctcaggacccagcccatggatagacttcctaaagttaaaagacgatttcagagttagtctagcatttaataagtatagtagacagtatacattagaagacaattgcaaaaaataaaaaattataaggctccagatatattaatgttttgttttttaggttttatcagattttgatgttcctgtatggccattgtaaaatctactgacaacttgaaagcatgtctagcttctgaaatattattcctatggaatgttgattctcattctgggaagaagagcagtcttttctgtcattcactcagaagatagttattgagtatttacgatggtcaggtgctgcactaagaaaaaagatagaaacaagaattagacaacgactatatgactctgtctcgattcccatgtttgtgaaccagcaagtacatgcccaccatacaggtactgaccagtgacaaaaaaaaaaaaaaaaaaaaaaaaaccttaagtgcttttaaaacacatggctctaaataaaataaaattctaactcttaaaatataagatgtgaaatagcaaattataaaaagtacagccacaatataatgacttaaaaacttcccacttaaaaaataaaaaatcaaattaaaaaatcagaacaaacagggaatgtattcattttatattatacaagatatcttggcagaacttaataactgaagacctctgtttccctttgcaaaatgaaaatagagagcatagggtaaataagagcactgagaaattcagctttccaggtatgatttcaccatccagggctttactttttttcacattgtgggtatgtgcccttccatgaatataacttggaagtggagaggatgagaaagtgaatttagtatgcctaaaaagaacacaacagcatttttttttttttggtctcagctgaatgttcaactcattaaaagaacaagaaacatttcatggattactgatagcagtacctctgtcacagacaggaggccagatttgagccataaatggagccattgtgtgcaataacaaaggtgagatattcatcctcaaaactgatccacctcctgccaaagacaggtacacacaatgaatacacaaaaacagcctagtttttttcagagagccacactaaaaaacaagttattaggacattaatcatcagttgaaaacaacattccagaagaaaacagcaaaatcaacaaaaatatgtgtactgctgatatgcttgcaaagctcaacacaccctacaatgaggttaaacgctaatatttctgaaactaatctgtgatttctttttcattatcataaaggcagtgacaaattggaaatggttgaattcatattctcacctttgaatgctgaattactaaatttagttaaaggctgtgagcattagacagagccttaatgattgggcattatcaccacttcagcccatgaatggggagtaggggcctagaaaacctaattaatggcagtgccagaagataacacagacccctgctccaagttcagcattgtctcctttacactgtactattctgtctcttgaaccaaatagatcctaggaagggccacatttccagaatttggcaactgcctggaaatttagatcccccagaagaatgtgtccccctcatgctaaatgcctcagttttgcctattaaagtattttatttattctttagaacactttatgctcataaacgtgcccattagttttacaaattaccacattactcataaatgaggtgtcctcctaatatagcacataacttattgttgcattttattggaccatttataataaaattatggaatgtgttaaataacccttagagaaaaaacatattcatcatcttagcagagacctaagtattgcattttttctaaggtctttgtagggaatctatatgcagaatatcatactattcctctaagaggactttcgggtttctatttaaggtcactcctcccatccttttcactagatttcctataaaagtctaagtcacctgtaatgctcttattttcacaatctgaagacaaatgatttacttcttctaaatcacataagatctatttgttgtttaagttagcaattaaagttcagcagcaaagtctgaaatcacctcttctccttgtcacccactcgtaacagaaacattggcactaacacatgtgaccttcagaatagccgttgcctctcataaaatctaacagtgttttcttcagaaataaggactacgaagccacagacctcaagtccctttgagactcattgacatagtacttatctagctgaaaccaagggtgccctaatcacaggacacctacaaaatttcctttctttctttttagcatttacagacatgggctaccggagctgtattacagattagctttatctaatgtaagctagtatgcaaaaaaaaaaaaaaaagttaaggcagactgaattaattatatctgagatttgacttacacattagatgattaaatatgtgcatttgaaaaaaaagtccctgaaggtaatcttgttactttaaataattgtccagggccttttggctaaagtgactttccccatgtagcttgcttgtgttatcttaatttttcagtgtcttaattttgcattttctttatggctctactttcaatttaattcagaagcatttattgagagccaaatgggcagagaacagtgctagaacctgcaggggaatggaaagttgaaaagtcatgacccacccacccgtcagggttgtctctgtcatgtaggacataaatccacatggctaatgcatcagccattacaccaataactccagtccaaatccagattaccagtacctattttttattataaagggaatttatcgaatcactactgaattagcaagaatcaataaattaggaaaaagaagcccttgcttgcagcatagcatgaaactaagacaaacagctcatctccaacgcaaggtggttaagcactgagccaccactggccagggatgccacagaaacccaggaaaggagcttagggccctcagaaagagttgatttttgagttagatcctgaaaaattacaagttagctggacaaagaagttaagcagcttccaggcagaagaatagcacctctcagcctgcagatcttcctagttttttgactatcattgagaaatcaaatttcaaaaatcatttaggaaatggataaaaggtaaccaaattgtattgtcatttccaaataagcaattagtttcatgatttcttaaagcaaaggattaacaccagaatgtagaaaagggaataatcttagaataaaggacaattctttaacttgaataagtttagcatctttttttttttttttttcttcatttcacttcactggcaatccttttcatacctagtactaattactggaccgacttctgtgaactactgattggaaaatagagtctttgggggagctgcaagcagttcctagagaatacagtacaagagagtggcgataagaggccaggcatggcgataagaagggtgtgcatggactggatatgaaggaccttgaatgctgtgttaagaagtttgttcttttgctgggcgcggtggctcacgcctgtgatcccagcactttgggaggccgaggcaggcagatcacgaggtcaggagatcgagaccatcctggctaacatggtgaaaccctgtctctactaaaaatacaaaaaattagttgggtatggtggtgggtgcctgtagtcccagccactcgggaggctgaggcaggagaatggcgtgaacccgggaagcagagcttgcagtgagccaagatcttgccactgcactccagcctgggcgacagagcgagactccatctcaaaaaaagaaaaagaagaagtttgttctttttaattctaaatgcagtgtagagtgattgaaggaattttaaaagggaatgcaccatgagattgtgtttcagaatgattatcaggacaacagtttgggaaattaagaaaacactaactttgcagatagggagaaaataggaagagattaacagattcaaggcaagaaatggtagtggccatagtgggcgagtaaagatggtaggaagtatagacatttgagagatttcaggagtttacatcagtaagactcaatgactgattggatttgcgggcaaaggagaaaagacaagaataatggaagatatcctaaatttctgactttcacaataaaattaataggtggcagtgtctcaattatttctagttgatcaattgaaagagaactgaggagttagagaaatttgattttagatcgcttgtacatgacatatctgtaggacatcttggagataatatccagcaattgaatacatgattccagggtttggggaaaagatcttggctagagaaatacattcagaagccagtagaggggtgatcattaaagccaaaggagtggataagctgtgtggagacaatctattattgatgagaacagggcccagggtgaaattttgtccagctgggacatttagaaaataggcaggggatttgtgacaattgctgcaattgctataattctagcagagtgcaatgaggatatagagaggtgagagactctcaaagtgatagggtctgagctgagccttaaggagtgggatctggaacaggcaactaaaagcaagaaagactttccaggcagagacaagggaagatgcttattttttgttgttgttgttgttaacaattataaacatttattaagcaccaagaatatactgtgatggttgctatatgaaaacataattatcaatatagtatccctgccattgagcttacaatctaaaatgaaatacaatgctatgagcctacctaaaaacttccttaacttagaaatggctactttggcaaatgagcaaggcaaaatgacctattattcaggtgcagtgttttaacctaaaacagtagtgctaggggacttgttaagagcacagattgaaagaagggaggtggaggggccacatcagatttttaatctgataaacttaggataggctagaaattgcatgtctaataagtttctaggtgataatgatgcagttggtccctggacaacattttgagaaatactttcatttaaaaacaagaagcaaacaaaatcctcctttccatatttaagaggcattcttgagacctaattgtatagtgtttgctaaatatctacatgtacaggttgagcatcccaaatatgaaaatctgaaatatgaaatgctccaaaatctgaaacattttgagtaccaacataacattcaaaggaaaggcttattggagcattttggatttcgggttttcggattagggatgctcaaccattaagtataatgcaaatattccaaaatccagaaaagtccaaaatctgaaacacttctggttctaagcacttcagataagggatattcaaactgtatttgccctgtctatataaactttaataatcacctcacagcccttgtaccagattgctgaaccaaattgtttcatttatctttatatctcaaagaacttccattcctgtaatcgttccagtcgtctttatacttatgatgcttcataaattccacctcttatcatgttccaggaaaggcataaactttgacctgggtgggatggtttgctttgtcttctttgagacactttcaagtaccttcttcatcttttcagccacaaaagtttatcatcaacctcacatacacagttagttcagagctgatgttcttgtcaagatagtaaagctcatctgccatttttacgtttattgatcttaccatgtgaaattttactataagcttaagcctacttaaggtatcattattttttattttctggaagggctgaaaacttgcactacgggtagcacagccagacaccagcctgtaacaatgacaatagcgacaaggatggcagaagctctcctgtactgagtacctaacaggtacccaataatgtctgtcattaggggctgcagagatgaaagacatgttcctcattctgaattaagtctccgtctagggcaatgggcaggaaaccagataacttactatataccgggataaggaatgtgattatggtaagggaatagataggaggggcgcctgtcccatttagggaagagatccaggcagacagtttccaggagatgacactggagctgacttttgaagatatggtaggagttagctgggggaaaaaaaaaagcatgatgcatttgctggagagggtgatagacaggagataaggctgggatcagatgatgaaggacccgcaaaacctgtaaactagataaggctaaatccacattatgacatgactcatatgcagccaacaatggtattttgtttgggtgataggtaccctaaaagcccttacatacactatgcatgtaacaaaattattcttataccccatacatttatgcaaataaaaaatacacaacagttcagaaaggaactacaaagaacatacaggcataactatagtatttgtcctgtattaatatccagttcccccaccttaggaattggagacctgtcaggtaaatgaagctaaataaatatctccagattggggctccttggatctctcatttcttctgtcatcttgcttctgcctcatctgccaagtatcttgtagatctagcgcaaatccatctaaagacttgcctttattgtgatagctgaaatggatcctatcaaggtgatgggaagttagacagtaccccacctgtctgcaattgctcagacatttagctttaaccatggtcctcatcagtgctatttcctgtattctggctgctgcttttgctcattttctgttggacagagttaggtaatgctggtatatgatgaggttcattctcctctgatgatgttctgcaaacacagcttctactgactagcaagacccctgcctgtttccttagtcatatctgatcattccaccagctgtagcttcctggggctacagtttaacaacattgttttctgattgttgttaacattgacacatagtaagagctactgattttttctatggaaatgtttattttttatttgaccccttcccagaaccctcaggagaatgtaaaagagaatttatattttcattcattatatcatcatgagaaaattgtttttctttttttttttaataagcccattcaggtttatatttttcttttccttttatcaaattttctttgaatgttaagagtctattataccgaatagtatattacttcaaggaattcaggaaataaaagacaagccaagaagcaagtgcagtacaaacctttgagtgggacccctttgaatggtatttacataacataagatgtagtaccgcagggactggaagttcctctgtgttcattagtgtgttatgctactacaatttgcatttagttttaatttgaattagtaaatgtgaattctctcacaatacactaaactagtttgtgtttgacactgggggcctggataaccaaagttgcatatgccatgtttaaaatatgtttagaattggaaccagtagtaaattgttagtgaaagaaaaaattatgaaactcccatttgtcttccatgaattgtgttctgggaactgttggaagcattcacaagcaatggctcagttaatcctcacaaaaatagctgggaactgtaatgtccctgtcttacagatgaggaaacttaaattcagagaaattaagaatgatggagcagagcagggattgaaatttagacccgaaggcactgtcttcagcaattttattcagaaatgtggctcctttaactagatggctgtcttccaggtcattgtaaacctccagagggaaggatagaattaggcagaactccaagctggcatcgtggtttgaggctaccaggagcaactttcatttctttggattttgctttcataaatcagagccattttcaaatctgccagtgccacctttgcacattgtcaagggaaaggacaaataacaaagctagtaaaaaatctttcaaatgatataatataaatatatatttatattacggtaatatataaatagatgtaggcatgtgttaacaggaaaaataagcaaacaaaacaaaaacaaacaaacaaaagacctctttaagatatgtaaagaggcttattctgagccagtaggaatgaccatggcctgtggaaacacagtctgaagaggtcctgagaaattgtcaccaatgtgggtgagttacagtttggttttatgcatatcagggagacaggcgtgcaggcaaagatataaatcaatacatggaaggcatgcattggtatcgcccaaaaaggtaggatatcttgaagcgggggcttataggtggattcagagattctttaatttgcagttggttaaaggaggaaagctttgtctagaaatttggaatcagcaaaaaagaatgcttaatataaggaagtctgttaaccaatacactgagacagagtgacttgtaagggtgtgtgacttaacccttgtctggcatggcgttaggtcctgtttataactcggtctcttagtgtcatgaagagtccatttcgttagtctgatgatctctattttaatattaatgctggtcagttgtgcctaaactccaagaaggaggtatcatgaggcatgtcccacctccctttccatcaccaccaaggacttcgtttttcaggtttctctggggcccccttgaccaagaggggtccgttcagttggtggggagcttcacattttaagtttacaaatatctagttaataattgaaaaattaaagcagagaaaagtgacaataacttatcctctcaaacatgtaaaatggagaaaagaatcagaattttttttaacaatgatctgttcactaagactcagtttcattgagaatatgcactgaataaccaaaggaatagatgttcaatgcactcactgaataaaggggaagaaccaaacactctttctagcatgttgcccattctggtgcaggttttaaattgcagttggagaattctcgttagaaactatttatttccctttacttccctcccttgttggtgtgaccacatggatgaaaactgaccttttttttttccgtgtgtgtgtgtgtgattctgtatcctctttctgaaatcttattgaatatcctattgcctatactatcattcaaaattaagtgttctagaacatgttgctgttgctcttttatggtcaactctggtgggaatttagaatctgtccatgtgccatgtgaagacgcatttaaaagaatacacacctatatacacgtgtgtaattggctgttgagattttaaagaatatataaaacttattattttcttttggccttgtttagtgataagagagaaaatccacaagttcagagggagatttcgaagtgatgtatcaaaatagatgacatgatttaataggtaattttaatttaacaggaaagtcagatagcttatcaccatacacatacacacatcttttgatgactatgaaaatagtatacgttctagtaaaccttttggagggttctgaaaagtgtgattaaaactttatccataatctcacaattcagttaacaccacttaatactttaggattttccttttttaaaaacagttattctgctttaaacagctaacccaacttatatttaaatggagaagagaactttttagctaaatgtagctgaatggatttcaaaacaaaacaaagcaaaacagccttctttgagttattgaaaccgggtgttgtcttgcttttcctcccatacttagcttacagaatattatctatatataatatacatagatagatataaaatatagtatttccccagtcataacttgatgtatattcccaaaaaatgtatatataggagagagatagagaggaacattttggtcgtggacggctactttttttttttttctttttgagactgaggctctctctgtcaccaggctggagtgcagtggcacgatcgcggcttacagcaacctctgcctcctgggttcaagcaattctcccaccttagcctcccaagtagctgggactacaggcacgtgccaccacgcccagctaatttttgtatttttagtagagacgggttcaccatgttggtcaagatggtctcgatctcttgacctcatgatccgcctgcctcggcctcccaaagtgctgggattacagacgtgagccaccatgcccagccagatggctggctaccttttaatgaaaaaaaaaaagatatataaaaacaacaaaatataattaatatttctcattagtttattttcaagattaggtgagattgtctccctttgtagtactttgtaggaagtttagctgtgttatttttcgttggactttttattaccagcaaaaagagaaatggtttagtgtgagagaatcattcataggttttatttcagttttaattcagacttatttgaaggttttgacagagagtatttctatataggcagtgttatctttccaaagtatttgatttctagaatctagatttttaatatgatagtcaaaaatcatattaaattttttgtcactctttagaatcatgacattcttctcagatacctgattattaactttgtattatgaaatcagaaaatgcagaaagatgccatttatgtggttcccattccagcctgaaagagagtataaagggatagcagctgggcacagtggctcatgcctataatccctgcactttggaggccaaggtgggtggatcgtttgagcccacaagtttgaaatgagactgggcaacatggcaaaaccccatctttacaaaaaaatacaaaaattagccaggcgtgcacctgtagtcccagctacctgggaggctaagatgggagaattgcttgagcaattctgagcctgggaagtccaggctgcagttagccatgatcactccactacactccagcctgggtgacagtgagatcttctcaaaaattaataaataaataaaattatagcaattgaaagtaaggctaacttgatctggacatcagcgattgtcacgtggtttcaacacattatagctttataggcgcatattttgttttcactgaagcgaagttgttaaacgtttgattttgtcctaatggtgaaaagaagacgtttcctgaaggagacaggattgcattatcattacaaaagtatccagcctctgtcgcacactcttttttaatagcgctgttgtcctatttgcatatgtaagaaaaagactgagagtcacccagcagcaagcaagtacctgtaaccacagagggcagggtctgtaacatcagggttgaaatggagaccatattgttttttaataaaagagtgaacagtcattatctttttccaattcatgaccccaaaatatacgcagtgtggatttacttccatgaatggtccatgatggctgctgtccattcgtacaacctggcctctactctttgcctcttaggtgcttttaaaacacacacacacacacacacacacacacacacacacacaccagaaatggaacacccatttttcaagactaataattccaagcttatctgttcagttcttagttcctttgtaggaaaagatcattctttgggagtgtgtgtgtatgtgtgtgtgtgtgtgtgtgtgtgtgtataagacagagagagagagggatatctgtgtgcaaacactagtttaactaaaggatatacttttattttacaaagacttgtctaaaatacctgttcctgacatgcaaacaaaaatagataatttgttcttttattcctaaatctatttaatttggtgtaattcagagtgatctttgaggatagaaagataatgcccaactgaagttaatattcttactgcctggaataagaataaagaattttagcagttcttaaaatatggagcagagcattagaatacctgcttttatgaaaaattttatacatttaaatttatataatgaaaatctttaggaaccaggccctagttaaacaggggaatcaaatatttatattactaaagttattaacaaaactttggagaccttattgcttatgggcaaaagcacagagtttgaaatattgattagagagtaagttctttaggagtcctagattttattttttcttgcttactgcctagagcaatgcctagcacctagcaaacactcaacaaatatttattaaatgactggatggatgggtggatggatggatggatggatggatggatggatggacggatgatgaatggatggatggataaaatatattaaaatctatacttggccatttacctaacattctatataaagcaccttctacatggtaagactcattattgcatttgttgtcattattttttacattagtataatgttttgactttattgaaacttatcaatttagggtcaaattatatccttatccattaggccttttccaataggccaatggtaaagtgtccaaataattttattttagaataagtaggaatgtcagcagtcatatagcctagctacttcaatatattgatatttgtttgggaattaaaaaccaaagagattaactgatttgcttaaagtctcatatgtgtacccccagaatctaaaataaaagttgaaaaagaaaaaaaatggtagcatgagaagtgtaagctttgtatatatgagaagttatgtccagatgattctacattaagtaacttactcattaattcagtaaactgttatgacgtgttcccataaatgtgtgaacttttccaagtatgggggaattcaaagatgagcggaccctaagctctaggagatactgattaaaggagtcatacttataaataagtgaatatgtaatttaacagaagggaacatgtgttatggtgaatgtataaacaaaaggttgagtgaacatgaagcatgaagcaactaacccaatctggaggtttgggtagagaaaatcagtattaagctgcaactggacaggtgacaggaggatcaaatggacttctctgtgtctgcaatgaaagaagtctgagctaagattttatttagaacttattaaatgctcataaaaggatcagatgaataatttaaatgagcaagtaaccaatgacattcattcaaaactgcgtaaacttatgcaagaatgcatgttttctgatatttctgctttgtggaagctcgcagtgtgatccataatcatgtcacatgctattttcacctttgatactgtgagatccttgaaggtggagtcttcatgttatccacctttgtatcctgaacactcagcagggtgcctggtgcattgtagatgtgcaatatatgttgttctgaattgacttacacccaccaaccactatattaaaaatagaaaataaaagaaaaaaaaacaagttgtgtgacttcctctagacacagttgtaatttactatctaggacagtctcaccaatcaagtatttatctccagaccttgagaagataatttaccttcaacaattattattaataccttttaccaacttgggactatggcaaaattgaacttatgaaaaatgcctgtcttttttcatccttggaccaattatagcgttcaaaaacaatctttttcaggtttccagatagcagtgtttttcaaatctcaggttgcaaacattgaatcattttatcaataatgtgcaagatagagacatgtccaaggttactgaaccaggatcataaatcaactccttgatgacatacctcacaagatttaaaaagagagatcatataacactttgcagatggaaagtcccataccagttgttgtatatcaaaagtgataccaaaaggcaatttcttagaaatatattaattatgtgattgaccagatccgaaagcatttagataacttggggataaaatgagcgttgataattattttaacattacattctagcaatgcatgtttgaatttgctgaataaagaaataggtttatatatttccactgttaacagaaaagcaataaaatactgcaagggaatttttcatttgttcttgaaatctgcttctaatgttcatttcactcccactaaaggcaggttattaccttggatttcctaaaatcagtgtatgctttaaaagtgaatattgagaattgtgggtactactaaatttaaaatacagaatgaccaatgccagatgaccctgactaaaataaactagaaaattgaagtgattataaagatcatttgcaggtcaaaaaataatttccccctcttagcctcttaagtccttcattttcctatctcctgattctgtctttcctatctcaactctccttattttcttaattctttgcacatagaaagattttgcttttcctgtcacctctgttagatgcatatacgggtactccaaacaccttgcttgataatttcagcttggcatcatcattacaggatgttaggctctatagcctgggtcaaatctcagggctaccactcactagctgaatgagctttagcaagttatctcaatgctctaagcctccattttctcataaataaagtatgagttgtagcattgttttgaaggttgagtaagatgatgcatataccatgcttaccaaacttaaaataagcataaactgttgttgttatcatgattaaccaatgcctcttccttctggtttagtgtaaaaagtgtggcacactgaactgacactggaccaaagatcagatcacttaccctgaggccctggctctgtgaccctgggcaagtcatttattccagaactctggttgtctcatctgtaagctgggaggcatagacaacactacattaaagagcccttccacatgtgttctaagtgaatacatgctccacatttttactcataacattcttgtagatcactggaattgtactcatttatcataaaagttatataagatataggaaaaaaagtggacccatgaaacctggtcatgtggtcagagccaaagagaatccagtttgatgtaaagttattttactcaagtactctgtggcagggattctgctgaggtagagtatttgagcagagcaccttgagaccaatgtcacagaaaatattccagcaaataattaatggtgtgtgtatatatattgccagctaccctgctggagcccagcaatctctcagaggagattagtggtccttacccatgtgtccaaccatttcaatacttgcttttctcaatgatcattatcctgaaataaatccaaattaaattttatgaaccaggattgaaattatgtgccttcagtatcgagccttctaatagcagttatttttattgaagtattaaagcaattggcttgagtcatcttggaaacactgctttcatatttcaaatatggttaggaggctgtcagcacatattaccagggattggagatatttgcttattaaatgatttttaccaggaaaaactcattacaggaaacatcttgtttacaagggtgtcctgaggatagcaaatggaaagaaacatgttacattgaattatagaagtaaaataagttgattcagctaatagattcaatggaaatataagatattattttgcaagtcaaagacaactgcaatttaatttaactgacagatttctactgtaggatgtaaacattagatagaaatatttacttgaaactgtagcgaccattacatgttattttgacattctagtttaggcatctatatccagtgatttttcaaatgttattattattattattatttgttttgcccatacaaagagaaaataaagcagaagcactaatgatgtttgatggtgggaaggatagaggagaggttaagagaacaagttgtcaatgagattagttttgagtttactccctggctttgtgaactttgggtagggatttaacctcttagagtttcaatgacctcatctataaaatggagataaaatatatttaatgtttactgtgtagtcaatggagatgatatgtgagtgaaacttagcatgatgcctaacacacatacacacacacaaaaattgagtaaacagaaatttcactacttctaaccattcagtttatgctttcagatcttaggacttggactcggcttacagatcctggaatttgcaaaacacattccctttttcatggtctcttttctacatgcctgatttctcacattttttatggcagctgaaatagcattttagtcatctttgtgtgcctcccttcccaaatccatggacagtgtaagtactgaaaacatttgggtagatgaatggaagaaaacaaaatgaacaaagagagccccgaagtcccccaagaggacacaatggagataccgactgcaaagcaggcatctggaatgccagctcagatggcctgcttgtccccaggaaaagctgtgagaaaggatattattggcaccagaaaagtcttactaatgtcagtaaagacagaacttgggtccaaagcattctctcagtgtgatggtgttcacatatgccttgtgtgcctttagaacataacttaagtgcgatagtatgaactgctacagtccaaaccttgtagagcattgaacatccatgcagaacagttagaagaagagggacttctggtgaaacagagcccacaatgagggtcagaatgtcatgagtaagttatcatatttggaatcgtgatgtttcctaataagaggaccaagccctgtaagtctgagcctcgatttttactcagaatcctagagaaaaatgcttagtcagaggctaacaaggtcttagcctccttgacccacagagaagaaatacaggaagggttaatacatcccagttggccaaacctgcagaagcagtcaccccctcccagtgtaccttgtagtttgaccatggcacttcacacacttcgcacgttctatctcctgtttgacttttttgagggtgttttctgtccacactagactgaatctctgagactggaatggtatcttcaccatttttctggtgtcgcatcactcagcatgctgccctgttcccagtcacctcaggaaaaaaggtataggccaggataacaggaagcacatggagtttggagtcccaaacactctgtatcatgaacttccttcccaatcctcccaaccaagcccttcttggtgccccttatctcagagaacagtgccatctgcctctaagttgctcaagtattaaaggcggatgcatccaggtgccctcttcccttcctacacaaatccagccaatcacttccagtcaatcatgtttccttagcatctctggaactggtccacttaattctatttgcctaatttaccccaccatcatttcttgcctgtattattgcagcaaggactgatatccttttccccccttgtccttctagcccactcttcaatttgcagccagcgtgagcatttgctgtcacaaatctgaccatctttctctttagttagctttgaagtctcagctttttagtgtgtcttccaaaccccttcttgttctgactcctgctgaccttccagcttcatttctcacctcaacctacctccttccccagaagtactgggatattcttagctccttaaatgcaatatacttttcttatttgatgtcttttatcctctccacctgcaacatttttctttctctgctctctgtcctctttctttttctttttctcccttctgataggaagcattctttgatatccacgctcctaataaatgtggtttagctgctgctcttaaaactacactttgggaccagcatggattagggatatttttccctagaagaagagatatctaagttgaaacacaaagaataagtaggatcaaatgaagcagaaagagagagatcagcagtatatatatatatatatgtttattgaatgagtaaataaacgaatgaagacaatttgacaagaagcacctgtaaagcatatcactgagaccttggtgttctgttggtagcttctctttctgaaggcataaggtaaaactgtccaaatataaatttccctcctagtttgctcactctccagaaagctctgagcattttgaaatatattcttatgatagctcattttataacataaggaaactaaagctgcctggccttatggatggagccacatagttatagataagtcagacaccaagataaagagcatttccatgaagtgaggtagaggcaggtgtggaatccaagcttactgaatggtctaatgctgacttttttacacctagaatacctttgtgaaaatgaaatatatcaagaaatgaggacatttaaggaaggcaggcagcagaaatatgtatatcaaaaagctgaaataattggatgagctattctctatgaaaaccacatttttatcataactggaaaagatctgttataaactgaacaacagagaaatgttaagaccttttatatctgtcccccttgacactacactgagagctatgctgttgttatgttttccgaatccctctgtggcttctcttgtaagtgagcaggacactacagaagctgacatgcgaagggccctgataaaccagaatgctttttccatacagtaaattcgaatggttatttgagctcaacagtgttttctctggtgtttgaaaagcaaaaatagaaggatccaccaaacactgcaagtcatggaaactatagacgaattgggtgagttgagggccctgtgatggcagagagatgtctttatccgaggcaatggtgcacaggtagacaagcacactacagcagctctgagacatttccagagccttccttcgaaagggcatccctaaacaacctgagtctgtagaggtggataatggtgtgtgcattatgagtatgcacacaaaggagaatgtctgttatccttagtgcagagtaagtaacataaagtctagtggaaataaaaatatataaatttaattgtatgacataatttgttggctatagacattccctttcacttctttctttttccattttttctttcttttttattgacccgcttttcctccattcagtgtggaaggataagcactgaacagagccatactagagcaatctacagggacttgtttcaaattcaaaaattgggtgacccaaggttctaaagtctgtcagatgaatttgaataatgcaggtattggcactctatggcagccacaaatgtggcagaggtaatgagttttggaagctcccctgagcctcaggcagaattacaatgtcaatcaagtttatttccttccaaacctccttttctttacccagggatggatttgctttagttggatgtccaaagttcttgacttactataaagaagtaaaaagtggattggatttggagacatataacatgagtttgaacccaatccagtcaatcattgcttgggtgatcttgggtaattcacttaaatttgctgcttctcaatctcccaacctatagattaaaaagtcactcatttattcatcaaacaaatagttctgaaaacttagtacatgtcaggtattagaactgtattttttatgattttttaaaaacatcatttaccccaagagtaagtaggtaaaatgtaaagtataataggaagagcattactgagatcaagttaagtgagataaagtatccagtacttgcttacttcacagttaacacttacggcatattgctacatcctcaagcctactttaaaaaaaaaaatcattgtattccccttgtaagaattaaacctcccatctcttcagtgctgcaactctcattaaggtatcaatctgattacctaagtgaagaacagtaatttacccttaggggaatttatgctcccataaataatttactatttttaaacgggagctttttaactctaatggaagtcagctcaaggcaaccaataactactaagcacctactatgttttaagtcatgtggagatgtaatccccaccttcatgagttttgaaatctataagatttgtaaaaataatatatcaacccattaaaatttaaaaagctaaattttgaaagcaacaaaagttttaaatgattgatattacaaaggattctatgggaccctatgtaatttcaagtaagttatgtgtcgtgcaaccattactggaataagtgttgaaagaaaggagaaatcattttcttggtggaaaatattagggaggcacaggagaatttaatgaatgttgccacctgagtaactcacccacctagagattgcccccacttcttccattaataccctcacatagctcttcatgcgagtcagattccattcaccagttctcttctcacttcataaatttttttcaacatccttagcttagcaaaataaagatcatcactgttaccaattagatcaaatacttaaaaggccaaagcaaagctcagtcttaacaaataagagaattatgaatctatgaacttggagggaatcttgtaggtaaacacaaagtatgataaatagcagcaagtctttatgaagcacattaacataaaatgacttatttgatcccctcaccaactctgaaaatgggaaagggcaaagaaaggtcatttttccacgaccctcagctggtagctagtgggtatggcatccacccaatgcttgtgtcctatctaccatttaaaaatgtcatgtaggagaaaaacttgctatgctctttcttagaaattgagagtcacaaaaaggtatagtatgtattagtacaggagttaaatgtggactaggttcttgccactcaaagtgtggcccacaaactagcagcatccgcattacttgggagcttgtgaaaacacaaacaactggccccatcccagaattcctgaaccagaagcagcagtttaacaagatccccaggtgattcttatgtgcaataaatctgagaagcactagcgtgtgtaggttctacatctctgagttggatacaacacaactcagaattgtgcaaataatgtaatatacaagaaaacactttttatatgaaaaaatactatataagacttcataaaataacaattattattctaatgtataataacccagtcattcatatcagcatattgtcctacagttgaatataaataacacaaatagctggaactcttgggaacttgaaggtaatcaaactagacttagttcaggtataatatttatcccagatgagattataaatttatattaagatgccaatttagcaaatatctcatgatgcaggttgcattttagcttattatgggaggatttttttattgcgatttttttttacagctactctgctcttcaggattattttagtgttgtttttaggccagtaagaaatatcaattataacatattgtaacccactaaaatatgccttttaaaatcgtagattctcttccatttttttcctccttcacatttacatggcaaaaggtttatatcttcaagatctaaaacaaaaagacatggaagttaacaagagcagtgtgaagcctgaagcctggagtgctgacctctcattcagtgctccttcctcccctccactggggctaaaaactttgccaacatgtaccatgtgactgcaactgaatctgcaatggcatgcattggtattttcacagagagcaaggctatcagccttggaatcaaaagaccttggccgaagtcccagctttgctcattttaaacttgagtctcacagatcttttgcccttcccacctcaatttcacaacccaaaaaaaagggcaccagaagcaatggtatttaagaaataaaagggaaattttaaactctgccttttaagacgttctgtaaagacctttggttttctcctgaggttttaacacattatgcctatactgatcatcaaacccaaattattttcccattcttttaaagtatgtatcttctgcacccaatatcattttgttcagtaagctttctgcagatattcaaaaaagtaccccccaaaagcattgagtatttttctccctgtgttctccttctcagccacctttgtggctcctctgccctttcttgtcccttgagcgctggtgtccccagggcactgcattggtcctttagtccggctccctgggggtacacctctaaattatgccttctaactaccaagaatttccactctgcatctgcaggtcaaacgtctctcctgatgccacttccacaaatccacctacctacaaggcatttttggtggtaacctatagtcaccccaaaacatgccagaaactgagctcacccttctcatcccacaacctgctcctccttcttttctcgagttttctattaatggcctcatcattctcctaatgacccaagccagaaacgagttatcatctggattctgctctctcctacaccttttaaataccactgagcagacatgctgcaggttttaccatgtaaatatctcaaattactctataccttttccacagctttcattcaagcttttgttaattttcacatgaacagtaaccacctttctctctgcctccagccttgccttctcctaaaatcgaaaaaagcctaaaactaatcttcatattttatcaaatgtagatccccaagcccaaaacatttaattcagtgcagggtgtggagagaatttgtctttaacaactgcactcctggggcagcaatacaggtcagaccaggagaactgacctaatctgttctctaccataagaggataactcttctgatacgcaaatctgattaaccatgccacttccctgcttttaactcttcagtgactgctatttccatttaggataaagtccaaagtccttgacatagacattcgccacctgtcctctgcctccctttagagacttgtcttctgccacacccccacccatacatgctattgtgagtgcatgttgcctgcacaggaacaagaggggtagagagaaaagaggcaagggagggatccagtactgactaagaacacactccacattcactcatttgatcctcacaggtgctaccatctccattcgaaggatgaggaaagaagcccaaagaagtagggtagcatgcctgggcttcagaggcagtgacagaatcgagactaaagccaagatgatccaacatcaaaacacctttggcttttccatatctctgccataggacatacttcagaaaaacgggatatgtcaaactatatattatgtcaattatggccaaatgaaacagggtaaacttaagtaagataaggagaaacctggcaagtcctagcattattgtggactgctgaaaaaccagagaacagatcaagacaacagtagtcacaatataaagatactttttaagcagatccttcagaaaggtcataaatgtcagagaacaagttatagatctgaaaggggtaatgaatatggatataggtatagatatagatacatatagatacagatatagagatagatataaatataatatagatatagacatagatatatagatactgcaaatgccaaacatgtgatccaacaggtacacctatagagtgagaacaattgtgatgttgcagtgtctacccaaccacacccacaccccaaatgtgatagtactgttggacacacctcattgacaaagaattcagtatcttttctgttgctgcaaagtcttctatgaatactttgtgaggctgctcaaatcatatttgccccaggacaaatcagtacagggctcagtgtcataccaactaatttgaataaaacaataagtgtgcctatttatattcagacccatgcccaggagctcccagaggtgtggtaagtgttgctttggaacagacataaaatatacatagttctcatttaagctactgcatatttttctggtgcctctcacagctatattgatagccatggttctaagtaattagatgagtgctggagaaaggaattaagtgttaacattttatatcctcagattggcgaggtttcttccagagctaattaaatcagtgtaattcaattcagttttgaaaacctacctatcctgattacccactatgcgcgaggagctgtgttagaagctatggggcagacgtggatataaggtggtcagagaggctgatgagtgtagtggttaagcaaacgaaaaagatcctggggccaagactcctaaatctgaagctccgttctgcccctctttagatgtatggctttgggcaaggtgattttacctgcctgggccttagcattctcatctataaaagggaatgtgtcccttcttcataaagcttaagggactgaataagttattgcctgtaaaactgttattataatcccaatcctcaagccatttattttctagagagagagagaaaagctcaaaggaaggtaaaaatgggcattgcttttggaacctggagaataaagagaaagaacacctccaactggaggctgaatcatagaaaccttcgtgataggagtcaaagcccaggtgggcttgaaaggatggagagtgggagtagaaatagccgtgggaggagactctaggtgcagagaatgggagaagtaatggcccagggagtgttctcacaacagtgggcagtggagactggcaggagcatagaggtataaaggaaaccaggaaataactacggctggaaaaccaagtcaaagccccattgcagaatctttggtgccttgctaagtattcccaacaatagagggcattgaaggacttggaggaggagactggtttgactcctgctgtgacttgggaagttccccctaacagcagtgtgcacactacactggaggaatgaaaactggaaggcaggaagacagtaggcagtaggtatcacgtcagccatgtgagacataagtgagctttgactggtacagtgatagttgaaagaggtgtgaaagaagttgcagaattgggccatgattgaatgtgcacacagcaggaaagggggagtcaaggataactgagagctcaacatggggaggctgggaagatggaaattaccatggactaagagaaagaacacagagtacccataatatgtaattctaacacccattccccactaacctgccaatattgagttcactgccaaatcttaaaggcagacagccatttggctaatggtcagtaagcccaatttcctgccagatattagggcttgcttaagagtttgcctcatagtgtttgagaaatgatacgcaacctctccatggaacatgcattttgtaatagcaaaattatcaagagccttttcagtgctacaattgagatactagctgtgaatcaatgttcaaaaaaatcttaataaattgtttcagatgttactaggaaggatatttctggagtgtcaattagacacaattatagtttgagttgaataattaccctttcttgtacatattttgatgatgctttaaaaaaaaaaaaagactaatctgagaagaaaaagatgataactcacatgccattaactcctttaaagagaacacaattcataaatgaaatgcctaatttaaatgcaatttagaaaaacattcccaaggataagcattcaaaatccagcctaactttcagcaaacagaggggaaggacagaagcaggcaggagagaatgagtaacaagggaaaagagaaacagaaaatgagagcaagtaattaggatgtaattagaagatttaggggagaataagaagaaaaataagacagagggagtgaagataaactctgtaagtggtaaaattttaccacttcgtatctcaactcaggagtggcaggtgagatgttagtgaagatcatacaagtagttaggtctgggttcacacctcagcgcatccatttgctactacaatcttgggcatctccattgacatgtgtgtaaaacaaggataattacaagacatagcatatggcagcttttattaatactcatctttaagatgcgtcttatctttaccactatcccccaatattaattcaccctactctgttccatccagatgttccctaacccagtaccacaaccctttctcactcccacctgtaggtatgtactagtgctttcctccgacctggcatgtataatatatcttgggagacatctatgctgatatacacatacctaggcagagatgacaaacagaaacaaattataagtgtctgtgtcctggagtcagatgatttgggtagggattccacatcaactacttactagccctgagacattgggcatatcactcattctttctgagcctcagattcctcacttgttgaaaaagtggtgggcagtaaagattagtgggagcatagagatgcaaaggaaaccagtatattcatccgttttcacaccactgatgaagacatatctaagactgggtaatttataaagaaaaagagatttaatggactcacagctccacgtggttggggaggcttcacaatcatggcagaaggcaaactgcaaatcttacacagcagcaggcaagagagaatgagaaccaagtgaaagaggaaaccccttataaaaccatcagatctcatgagacttaatttactaccacgagaacggtttggaggaaactgccctcatgattcaattatctcccaccaggtccctcccacaacacatgggaatcatggaagctacaattcaaggtgagatttgggtggggacacagccaaacaatatcaaccaggaaacaactaagactagaaaatcaagttgaagctccattatggaagcgtatgcgagaattaccctgccaatatatacttacatgtctaagataaggtctatgctcaataaatggtcactagtactaattaaaaggtaaacaataatatgttctaggtcctgtgagaaatcttctcaagcaaatcctgcccataccaatgtcaccattctctaagacttgctatgcttgttacattatcatcaaccaataacttagcctgtgctgtcttatatctcatccactagcctacccattttggtgctttatgacagtttatataggcaatatatatttaaataataatcctgctcttttttatgtgcagtaatccccctttatttgaggttttgttttctgcagtttcagtttcttatagccaatcatggtccgaaaatattccatacgataagatattttgagagagcaagacagaaatcacattcacataacttttattgaagtatattgttataattgttctattttattattagttattgctgttaatcacttactatgcctaatttatacattaaaccttaccatagccatgtgtatacaagaaaaaaatgtagtatacatagggtttggtgctctctgcagtttcaggcatccaccaagggtcttgcaatgtatatcctctgtggataaggagagattactatatgtatcttatggtcttatatcctatataagtcacagataggaagtaaagcatttacaagcaccagggccagctacataatttttgagggccaattcaaaatgaaaaatgtagagcccttgttcaacaattattaggaatttgaagatggcaaccacaggatattaaagtgtggggcccttccatgcactgcatgggttgcaggcccattaaaccatccgtggtaagcacaacacctggtgaagtgttagatacataattaactttcagtaaacacttactgcttcactaatgaaaacatgcataacctttttttggtgaaatcttcacagccactccaggcctcttggtctggatcctacaagtactaaacatagcccttttttcttcgtttcgttcatgtatatatgggactcaaaataactaacctagaagcaaaacaaatttgtcaattattttttaattttggaacactgattcaaagttttattttcacaaataattataacaaaagatatcttcccagatgactcaattgacattcttaactttttacccttaagttctctctattctagggagaacagtactgtgataaatcgtatttcattatctgccagaaagaattgattaattttaccaagccagtgcctgcccccacagagctgtgtcctgaaaattatgccctttgggtttataatagcagcagatgatgagttaagatgtttgtttaaggtgtttgcctcagtgaatcatattttattaaatgcaaatattctcacctctaccatacattttgtaagcttccttactcttgcacgcataaggctcttatacttttctttttttcaaatcatgattcaaagagcagagagaaaaatctaacaaatgaagcagatgcatccacaaccatttcctcatctgttcactcttccttcaaagataagagtgtttaaaaatccctttaggctttcagtttatttctgatctttgtgttttcaatcactgacagaggtagattggcatatgtccttggtgttcatagacacagttaaagttttctacttttgctgtatacagttaaggtttctaatgtgctgtggccatttacatgtcttattagcatgttgacatatatttttaacaagacttggtattctcagtaattgccattcactttcctgagcacctgtataccagagctcatcagattcatcatttagttaggccatttggaattgaactgtgatgaagtcttatgcagcagacaagaagacatgtaaagagtatggccattcatcagaaaacagcagtactatctaaggagccatgcacaagactagggtgtcagctagaatattctgcacttcagtttaaaaaaaccaactcaaactggctttcataattgtattagtccattttcacactgctgataaacgcatacctgagactgggtaatttatatggaaaaagaggtttgagtgactcacagttccacatggctgggggcctcacaatcatgatgaaggcaaggaggagcaaaggcatgtcttacatggcggcaggcaagagaagaatgggagccaagcaaaaggggaaaccactcataaaaccgtcagatctcataagacttattcactactacaaggacggtatgggagaaaccacccccatgattcaattatttcccactggctccctcccacaacacatgggaattatgggagctttaattcaagatgagatttgggtggggacacagccaaaccatatcaatactgaaagaaatttattgcctctcaaaactgaggagtcaagagagaaagtaagctgccggtgaagctggattcagtggctcagcagtgtcacctggaaccagagtcactgcacctctgctctgctttgtaggaggtggtctctccctgagactggccaccttggggttgcaagctggctgccagcagtatctgaggctagctgcttcctcattcatgtccagcaggaaacacagtcttgttaaattgctccttgagaaccaatcagctgctttgcaaggatccctcagcaaatgtttcttctcatctttctgtctcagaatgggactgcgcccagccctgtgacacactcagtggctggggcttgagtgtgttgttggctggctcacaacagtgagggctaccctggcacctgaagaatcagtgtcacccaagctgctctgcctggaaatccagggttctgttagtaagcgaaaggagggaatggagaggagatgactgccatttttagtttctctttttagtcatctacttggatgttaggaaacttaagaatttaggaatttgggtcaaatttttttctcctacatctgttatctagttttttttcttctgcattttcagttagacagctggacattgagcatatatatgttgtgattcttcatttgttcaggaagtagttcattttatggatagtttaagtaagttaaattcagtattaaaaccactcatatttaattttctttaatgacaccatggacatggacaataagggttacatgttggggtacagagaccagagtcgtccaagaaatagcctctttcacctttggttgtttctctcaggatagaaatagctcaccatgaagcttatttctggagtgagaattttttaaaaccttttattttcttccaaataaatttaagatgatctgaatcattatttttctcaccatctatttatgacttaactaaagctactgtatataaaatattgtgccagtattgatgggagacatcagttttcttttgtgctaaccacttttttgttaatttttattatgggaatttttaatcatatgcaaaaataggtggaacagtatctggcgaactcctattttcttattatcctgttttgataattatctacagtcgtgctggccagttttgtttcatctccatccccctacttccttccacctccacctcccttgactccctgtaggatttttttcaagcaagtctcagacattatatcatttttcccctaaattctcatgtatgtatctccaagaaatagaaactctttttaaaaaaacaataaccaaaataccatcatcacatctttaaaacatttttaaaaataatcccttagtcaaatccacaataagtgttcaaattttatgggaggtatttttaaaaggtagctttattccctatacttgacttgataatctagttcagagggatgagaattacattcacaaaaggattagaaaagttatattccaatcaagcactagattgccaagtagcaatgcaactgctctgcaaggtcactgaagggctgggtggttcaagagagcccttggagaaaatggcaggactacagtgcaacttcacaccgagccttggaaaggcattgcataatcttaattttcttaaaattggaggcaggatttaggacacttggaaaggcattacataatcttaattttcttaaaactagaggcaggacttaggacaatcagatacagtatagatgactagataaaaatgagaataaatatgcagtgtgtagagggtgttgggagagtgatctgaccagtgattgagtgtgaagcaattacagtacttaaatttgcaagaaagatattaactcttatctatgagatgccacatgaaaagcagagaaacaaagaagaaaaataaagcacttacaagactttagatcactgaccacctggttggagccttaacttcatcacataccaacatgtgaacttgaaaaaacagcttgacaactttgaatactcgttttatattatctataaaactgtatctattgaaataatgtcattagtcctgtgttacttacatagcacattcccagtaataagctacttaatattgggatacaactttgtagtttgcacattacttccagactcatcacctttattttttttctttgtacccagcgaggtagatctcattatcccaatttccaaatgagaaaactcaggcctcaagagtgatttgtcactgtcacatacaagttataattgaaaggtattgttattgttattcttgtatgattaagcaaacagtctagagaaagcaaaatactgacatacatctctggatagaagactttccacaatgtgaaagtgtaacaagcagtaaagaaccacgtgaaagtcacatccagttaaattttctgattcagggttttaaaatggctattagtgcaaaataaatcttacagtccttatactgagatcttcctcttcctgggataataattgggatgatttctacagtgatagagcggataacagggatagaataacttaaagaatctcatcataactattatctctcactctgctacctatggacagggcaaaattcctccaaatgaagtgaaaataaattgattttttttttacaaaataaactaactagggatttctggaaatatagtgaaacatagaatttagtagcatttaataattctattttaatatagataggatttagagtttaaataaattaacaccattgccattctgttcttcaaagttgtattcatgaaaactaatactagcactatggaacagagtgtggagattttttaaagaactaaaagtagaactaccattcaatccagcatccccactcctgggtatcttcccagaggaaaaaaagtcactatacaaaaaagatagctgcacatacatgtttatagcagcacaattcacaattgcaaaaatatggaaccagcccaaatgcctatcagtcaacgagtggataaagaaattgtgatatatgtatgtgtgtgtgtgtgtatatatatataatggaatactattcatatatatatgtatacatatatgtatacatatatatatacacatatatatatatatatacataatggaatactattcagccataaaaaggaatgaatatggcatttgcagtaaccctgatggaattggagactattattctaagtgaagtaactcaggaatggaaaaccaaacatcgtatgttctcacttgtaagtgggagctaagctatgaggatgcaaaagcataagaatgacacgatggactttggggactcaggggaaatggtgggagggggtgagggataaaagactacaaattgagttcactacataccgcttaggtgatgggtgcaccaaaatcccacaaatcaccactaaagaacttactcatataaccaaataccacctcttccccaaaaatctatggaaataaaaattttttttaaattatatccatgaatgcttttgggtcttgctaggtatgctatagtgctacaaagctagcatttatcactatttttacaaaactaaactccaattatttgtactttaacaatagtttctttgaccaaaattatatattagatcagaataatatgattctgttgcagggggataatagctacttgcttgatcaaatcatcttctattcttattttctcccatagggtataattgacctcctaatagtaaatttacaaatacatattttgtgtatatgaatttatttatttatacatacagaagagctttcaggaagaaaatttttcatgtattcccaagtataagctttaaaaagtagggcacgttaaatttcttctgctaattgattcttggctacgttgtactctatgatctatgcaagcaaaattgatgtgaatgtgagacctccctgtcgataatgggatccctacctgactcctagcactggataatggaggagcccttggttatcgtcatcccatgtcgaactttgtgatttcacacttcataatgcaagagtattactttaaaatgcattaaacttctaaagatagcaaatagccttttggataatgcattttaaatagactctaaattcagaattttaaaaaatgttcgtattgtaagacatcataatagctcttatatcgcatcctgttgctatgccctactctcttttcctaggctttgccttcttcctcagaagatagcctgtcgttgcaaacccattcatgttgcaacctgagcctgaattccactctccataataggcctgcgcctcatcctttttcatttttagaagtcatctctctgtcagtagaactgattgggtattgtttaatatggagaggtcttataaatagctttcctggctaaaaattgaacatagagatttcaaatcagccccctccccctgcaccatacattatagctatctgttttgtaatcttttttattagagaagatgacagcacatcctgacataaatcatcactcataataatacaatacatattttaatctcctcagaagcattaagctgtagtacactgttgtcaaagaatgctgacatccaaaggactcataataaatatttgaaacctgaaaacatttagttttaaattttcatcaaatatgtatttagtccaaatacattaaaattccataaccaagtttaagaacttaattatgaattacctacaatgatcaaagttattttggtaaagttgatttctcagcttcaagtgctaaatggaataaaatgagcatggacttaatagaataataaattaaataatcatccatttggaagttgctatctacttcttcataaaatctagatttcatctctttatcgagagttaggtaaaattagactctagatgttttttccatttatattatcagccagccaaattttaaatggtgcatagttaataatgttatggaagtttgaagtctttccaaatttggttcatttaatttctgacaacttatggtccaaagtatttagaataaagaatagaaatatttggaatattgcctggttgcttataggagaaaagctgttcttgtgtagtcataacagtgttaaggggtgaacagagagagagagtgcaagagggcgtgtcccaagttaaggtccctctgaatgaaatttctgattttattttagctaaatgattaactaaagatggacgagaagattcttcaaaatctcctttttcaccctacctcattatgtttaaatggtcatctaagaaattatggatactatatttaaattcatgagaactagatatcagtgcttttaaacaatgtcttcatttttcaagctacattacagcaaggagaatgaaaaggaatgtggaataggagagagttgaggacaaaagagtgtatggaaggagaagggtaggaattttctagacaaacaaatgtggagggaagggagagtgttccaggcagaaggaacagcacgtgcaatcatggaaatatgagaagggctggaagatttgaggagctgcaagtcttgctagagcaaaatagcgggtatgagggaagaggaagaggaaggtaacagaagactatctgtcatatttaaagggctttgtaaactacagaggagttctatatcttaagtcttataaacaggaaatacccattcaaaatttgagtgaagaagttgactaataatagtaatgccaattgcttattcaataccttttattttactgtcagttgttatctattccataacagttttatttattctcactatatcataggttacacataaaatgcttatataatatttagctatagtaagtgtttgtacataaattatcttccagccttacagcaacttgcgagataggcattatcatcactggttgtcataggatgttcagaagattaagtgatttgaccaagacaactcagccagtaaatgacagagccaaacgttgtacttgggtccctctggctccaaaacctgccctctttacattctatgacaacgtcattcttgcattctataaacatatattgtgccccttctgtgatactggatggaggcttatcactctctgctatctcggagattctatttggctgtctttaggtcagcgtgctcacgcatagatttgttggctgttaaagcagggagaagacagcttgagggaaacagtccaggtgggggtggagcccgtaatgttgggggccagggaggagaccataaatgaaacaatatcatcattcccctaataacatttttatgtcttccaagtagtgctaagttcccagcatattctggacctacctaataagtaaatcttttcgggccagagccacattatgactttcatgggccctgggcacttttgccttcatgggcaccttcctccatgaaagaaaaaagtatatatatttattatattttatctacatatttatttatatgtccatatattataaatacatatttgtatatgcatttatatatttataaatatatataaaatatatattatatataattatattttacaactgaattggagtaaaggcgaatatagatgggattcatgattttacattaattattatattcattttttattctgattttaaaagattaaagtgaaaacactttcgtgggccctgggtgctgtgggtaagtaggccctggtgaagactggaatgttatgtgtctccatatggtaaaataatgcaaagttaatgccggaaggcattaccctccgtgggcgtggggatagaagttggaccagggtaagttccacttatgacaacagtttcgtaagaggcttaggcaagtgggagccgctattaaggaaggcagactttaaattattacacaattaaattgtagttttgtctttcatgaaggcttgagcaagtttacctttttgacaagcttatttactacaggataggaaacaacgtttgcaatatcacttttaaaagaaaagcaacagctttcaagaaatgatttcctctgttgatgcagttgcaataattttcaatatctcatttgtggtgcagaaaaatgaaatacctcagccttggaaaatgaacgcagagtgagatcacaaattgatcttggcaggaaagaggcaggcaaaggattttaaatactttaaagtactctgcacctccaaaacactgtcactctgaaagtacagtaatcaggggtggtatttagaatgccgaaagatatacaagagatggagaaagccaatactaaaatcttaaaatactagaactcagagggttagagggttaacttctggaagattaaaaggacagttattgtgtctctgtgaatacttaataaggccagaaaacataccgagccagaaataaacagatgcaaagagcatagagatgtgactgactcttccacaacaaattacaaaggcatattagaaagcactgctacaaaggaatgaatcctttgtatcccttgcgggatcctgagaaacatgccattgggagagtggttgattgggctaagggtcctggtttttgaatcagattcacactccctggagatccacagagaacgtcacagagagaacacgtggctgcaggagccttatgtgctgagcccactttgatgttgctggagagtcctactccagcatcttcctattttctcagttccagagaaaatgaaaaaaaatgaacttttgctttagagtgaagggaagttggatgagaagtgaagactggaagttgggcaggcgggacctctggggatgaactttcacctgtcacagtttcaacttattttgtggcacagagttgattaaaagagctttcctttggcactgctactgttggaggcaagaaaaggaaatgctaatttctggaaactagaattgctgcccctaaaagcacaagaaataatgagtgctctgaaagaaaacacagacaggcacgtgatcctcaaccagaaagcaacacacaagcaatggcatcagcagttattgaaatcctagcctctttttctgatgccaaggaagagcagataaaaatcaacctatgttccttggatggaaatcaaattctcatgcttgatggttttcaccactaatttcattgaaatggccccgtgctaacttgggctttctgaaagtattcatgccagtaactcagcctccgaagggtgccagagggactgagctggttgggctgagtggtgaggttgtgaggtggctgctggctgcctggcagtctcagagcccagtagccgctgtgtgctggccattggggagagattctgatggtgacatactgagagtgattaaatctgtttggaaagttagccagaaggcagagaaattgaaaagggaatgtagttcattccttttgggcactgacttttccccataagtattaactctttgctatcctcaaaatcagactggattttcacgttttcaaatttgaaactcatggaaaatgccagactgaaaactatcaaagtgtttgcaaatgctgaagagaatgggaataaagccatgagagttttcagtaaattgaatttgcttaggtagattgtaacaactctcttgtgagggcatttgagccatcatgtttaatttgggccatttaacaaagatcctgggagtggagaattgaaaagagtgggacttacaggctttctctgggattgtgttgttttctgcctactccatgtccagagtgcgaggaaataaatctaggatgttcttaatgtttggaggctcagtttcttaagacgttggctctttagttgcttatttgtgtagtccctgtgaaaataagtgtgcctttttaatttagctgagtgttatttcattgtctttgattcttttcacctgagtatggttgggtttgcagaagcccaagtgtacaacctgttagcctctttggtcatgcagaaaggcccttcaccaccattgggacctaacagtactgattctgctactgaagtactgattctgctactgatggtctcaataaatcagtaagactgaatttctcatcctatagcaaatttacccttacacgcaagaccattgaaaacacagccagcgcaacatagattttagacctactttttatggtatgtttatgtcatttattttacctctgttttctggatgttctcaaatgaaacattaggagacttttcaggaaaaacagaaggctgttacattttgactatgagaacacctgggaagagtaagggtgcataagcgaagcagcttattaagtgcttcagtaaaagtaagggaactaatttgtcacactgcatgacattcaaaagaacaaatgcctcctagactaaaatgctaaggaagggaactctagggagaatggaaaattccaaagtatattcatgataagagatgcctgaattgtaaaaagggattttgctagggggtaaaaccaagacatttgtcctttccctgcattttagttgttaccagcttgagtttcttgaggccctagtttatcatctcagatttcctaacacttttcatggcatgtagctgcagattagtatgaaaagcacaactgcgtgcttcagtgagcctctacttgattcttaaaatgacagtgatctggaaggaaggaatcccctctgttaccccaaagtgcaaaaaccatgaaactacaaagtcccgtggcagaagctccatatggaaggtgtactagctgtacaggagtgaagcccataaacaattgtgttaagtgctgaaaacgtggaattgatgagcattttcaatttttttttaggaggccaggtatttggatgaatagtttggaaagacagtgagcattgtttaaatgccccccaaattgcacacacagagtcctagcagcagcaacttgccctcaggcacaggggcaatgattaaagaaggttttcttagattgtagtgttatggaatcattataatcaaatctacctgaggaacctacccaccagaagacaaaaaaaacaagtaagatatcactgaaatcttttttttttcccaaataaaaatgcgtatctcatagattccatatggtgagaagggagatgatttgagagattatctcaatagtacatattaactgctcttacgagatgatcgagtgatcttattcagtatattattaaatttctctatctgtaaaatataattaatagcttaccattttcatggtaatgtttaaagataatgaaaaaatgataatcacaaaatgttttcagatactctaaagcagaggtcaacaaattatagccatcagctaaattctgcctgatacttgctttggtaaataaagttttcttgaaactcagccatacttattcattaacatattctctatgggtcctttcccaagagctgagtgcttgtgacatagaacatgtgtcccacaaaacagaaaatattgctctctggctctttacattaaaatgtcaataaatcttgcttttaggaaaaaccatcttagttttagaagctgaacaaatggacttatgtacactcttacataaatgaccaagttacgtgcatttctaagcctcttaacatatatataggcctacggagctcttaatcaaggcatgagagacagtatgttcaggcaaaaaggcttgagctgagtaaagttcagatagacactgccaatgactgttcctgggcaatggtctgatagaggctgtcaactcatagtatctataaggggcacacatgagtacggagcagtggttgagaaggacttgaccttggttagaggataagctctcattagccaacaatgagatgtgttgactagaaaaacaaattctgagactgcaccaatatcttgaatgaggaaagggatacttcagcttcattctgtgcagatcagtccacaactggaagactttgtttagttttctgcccccacatttttaaggaatgaaagactgttgaagctcatggaaactgaagagagtgaccaggtctggctggggacttgaaactacactatataaagaatggcacaagaaattgctatgtttgactcaagaaaagaagactcaggggtacacacaagccatgttcaaatatttgaagagcttactattcagcatagctctttggtacagttcgaaccaaggataagatggcttcctggttaggacgtgtacagatggagttggtggtcacaggagtttagaatgttgtggagatgattcaagtatcagttgggtggttggattggtgacttcgagaattccttcaaaccctaaaatatttgattctgtgaaaaagatgacctcaagggagcacttacaagtgttttccaagctgattcattcccagacatgttggtataaaggagaggtagtgattttccagttctagaaatataaatatttaggtttcagtgtatgcccaagctagcacacctcaaggtggagcccgaactcaagttgagattttgagaacatcactagttccagtcacttatttttctatttgaactgagatttaaaagcatgttttgattccccatctgaatatcctgcttcttctacaggctgttgataagctgagggaaacttagaaagctcatgtactttctgttgctctcttctatctgtaacaaatgtttagtagttttccaattactgcagcaatgttaagaggatctgtggtaacgtaattgcaaagtgctcaggaattctttaaaggaagcaggcttaatctttgattatcatcttgattaccaactatggcaatagcctactccattgatatcttcttattacttttcatttttgctaataaaagaggctactagttacatatgattttagctctctggaaataagtgacaaaaatgaataaatcatgtactactgtaggttggcaggcagggcacaagattactaaattttgcaccatgaaaaagagaaagctagaaagaaatcaatctttggcaaagcttgagtaatccatccaatgcaattcaaatgcatgggttagtgaacctctgtgcaagagttcttataacctagttaggtttaattaggacacagggacaaccaaaaggggaaaaaataagaatgttgaacagcagccaagtgaattttagaataatgaagaaatatcaaatagggtaaatcaatggagttagaggacacaatggggaaatgaaaaacattcaaagataaattaatgtaggcccaagggttatgcaagcaatttactataaatatactagggaaaagagacagatgtaggtgaacaaggaagcacaaaattggtaatacattgttataagtaagaaatggcataaaacaaatggtgtggcaaagcagaaggtcagtgaacaagaaagaaaagcatgtaagaaaaaaatacagacattcttttgtagatgacatgctatttagcaaaagtttgtgctatctcatcaagcactataatgtccttgtaaatgtcatgtaaagtaaatttggccaggcttatttacagttatgaaaactgagcctcaacttcttccaaagtcacggaaaacagcaggtttttacctttcaaccatatatggagagtttcagccaatatgcccattttagagccagaaaattcatgattccattaattttttaatttacctataaaaaagtaaagtgcactaatctcatgtgtgcagctcaattgacttttatgtatgagtacaggttcctgtagctatctctgagatcaagatacagagcatctccaggatccctgaagtttgccttgtgtctttcttggtgtgtatctcccaaatatcaccactcttcagatttctaacaccatcaattttgcctgttctggaacttcttataaatgaaattatacagtatgtacatttttctgtctggcttctttcactcaacatcatatccatgagattcatctcatgttcttgcctgtaccagcagtctattattagtcattgcctctattgcaggactggcaaactttttccataaagggtcaggtggtaaatatgttaggctttgtggataatatgctctctgttgcaactacacaattctgcctttgtagcacaatagcagccatccacaatgtgtcaatgattgagtatagcagctctgttccaacaaatgttacttactaggatttagtctttggaccatactttgccaattcctactctatggtgttcgttgtaggaatacattactatttatccattttcttgttgaggaacatttggagtgttttagtcatttgctaaaaagactgggtcatggaatttgtattatggtattaccaggtcatggaattggtattctgattgggtttaataaatactgtcaaacagctttccaaagtggttgaaccaatttatactcccagcaatggagtatgagagtctagatgtactgcttctttgctaatatttagtatagctggtctttttaattttaattattctgcatctgtctaaaggattctctgtatggttttaatttatatttccttgataagcatgatattgagcatctttcatatatataagcatatatacatatatttaaagttatatatatcttttatataaatatatacatgtgtatatataaaagtatatgtacatatttatataaaagatgtttatactttatttatatacatatatatatattttcccaaaagggagtatccaaatgagccatatatatatatatatatagagagagagagagagagagagagagagagagagagagcgagcttgtccaatggagaattttttaattcaccacttttaaatgagctattcattttattattgatttgcagaggttctttatatatcctggaaataagctccttatatatattgcacgtatctcctcccagttaatatttcattcctaagacaagataagcaattaatctcataattttttttcaataagaccctttcatttcatcattgaaatcagcactgagtgggttgtagcattaactaggacataagaaaaacatctcagaagtccaggagcctgtggaaagatcagtacattcgaagacgtggaataggatcccttctctcctgagactatggtgatcttttatacctctaaagggaggcagagcatcaggttctcgaaggaacagtaaccttcagggaggaaggtgaaaggaactcatagacatagcagaaccgatatttggaactacatccccaaagcaaagcctttcctaactcattcaccattccaacttccctgtgctaagcatggagggaaacgagtgaccttgatattgttatttataatcttcttttcaaaaagaagccaatacacatgaacctcgtttttaaatgcctggcagataccctggaacaagccaagaatgttgttcagaattctatgttctgtgctacacattctctctttagctatgtattctccttctattaagttattgcaacataaaggtgatttattaagatgagaagcagacattgctaaaacaggaagaaaagcaaaaaagaaataaatgtttcctcagaacccacaaaggagaacagatgtcagcagaagcagatgtatgcttctccggggtgaaagaaagaatccttaatgcaatcagaatccctgtaacataagtaaccaagaaagtagaacatcgaaaacttcacagaacttccgcatgtgatgttatgcatccataagtactaccctaagcgcacaaactaccaatgacaaatgctttaaaactatttttaaaagacagaaaaatgagaataaacttgcaaatataaggttatatgtatcctctttttagaattagaaacccattcagaagatttgccttgaggaagaagttatcaattctgtatcctatttaactcaatcagctaaatagctaatgtctgctcttgacccacatgtgacaggatgaatgtttaatttcttcccaaatttcaacatgtaagagaacacgatgtaaattttttaggtaaacatcatgagaaaagtgactgaatgaaataaccaaagtgttttcttctaaaccacaatgtcaggatatcaacatttaaaaaatgtaaaacttctatgtgtcaaccaccaagataaagatactgggaaaatatttgcagcaaatatgacttttaaaagcatgatacgttaattatataaaaagctcctacatattgatttttcacaatgagccctttaacagacaagttttcaacagtcttgaactaacaatttaggaaaaaagtaaagagagttagcaaacatcaaagtaatgttaaacttactaaaaaaaaacaagatatatcaattgtcaccaatcaaattagcaaatagttttgaaataaataataggcatggtgatgcctgataaagatgaaatatgcacaagcaatttcatatgtttggactatacatcatataaggccttcgggaagcattaagaatattaataatatttatatgttttaacatagcatttttagttatttcaatataatctccagaaataatcatataagttgacagtatttttaaataggtcataatttccaatgacaaaactaataataaaccacatgaccaagtataaagacaacttaatcattgtcatcttcctctgaatacatatttgtccttaattttaaaaaaatactttttatattctatctgtccaaattttcatgtttttttcttccaaatctctgtcttttggtctgttagttagaaattctttaaaagcatgtatcattctttttcagtggccttttaatttttttttttgagatggagtctcagtctgtcgcccaggctggagtgcagtggtgcgatctcaactcactgcaacctccgcctcctgggttcaagcgattctcctgcctcagcctcccaagtagctaccatgccctgctaatttttgtatttttgtagaaatggggtttcactatgttggccaggttgctcttgaactcctgactttgtgatctgcccaccttggcctcccaaagtgctgggattacaggcatgagccatcgcacccggctggtctttaaatattttatcttgtcctcctatctctcattatcattcaactatagaggcataataatataaagtatggcaaatccattcaatgagaagtggctatataaattgtatgcaaaccataaaaaatgattatgtgtaatattaaacagtgatttcaacaatatcattaaatgcctatgcatagaagaagaagctaaaaggaaatacactagactacacccaattattgtgtttcactcatgggacagtgggttttgtttttctttcttcctttgaatattcaaaacttttcacatttcctttaataggatgtactttctccagaatgaaaatgcaaatcattaaagtaattgctctcttcttcaaaagatcactttactcacaaccctcttttaagattttttttaagagtttctagtttccttcccaacaactctgatcagcagttctcagagtcccactgtttacattcattctcttgttgtattgcagccaagcaaatatttggtctgtgcagccagcagaaaggtgagagcagatgagatgatgaatctaaacggttggatgttatgagtcctcctgccttgttaggaggtacaggcacccagtacatcagctaagcacttttcaagtagcaaacacttggctggagctcagccctccttctgcttatttgctactgagttccccctttcttgatcttgaagcctgttacaagatacacgcggtctagatttttatctcattcctgtttcaggctttgaatctggctcagatcgtctcgtttctgtggaaaccccatggttggtaggcacaaatgaccttgtcctgatcatgtattcatcatctccagtatcctcaccctcctgcatatctttgttcttgaagtgagaagtaggttttaaagccaaccaaggttctactattgacatccttctaagatgcatcttcttcaggtgtcaaatgacgctgcatttgtctgtacaccatctcctcagaaatctcttatgtcttattggcatttactttgagatagagagggtggatggaaaggtgaaatctaaaagggcatgagcttacccatgatcaaatagctcctaggtagcaggaataaaaatgtacccagtttcctgactcaggggttcctgattgcctgctttatgtttttttcaatgattctccatcactgtttgtatacgtgtaatttttaaaaatttgtttaacttagttcatgtttttctaggagatgctagtctctgatagatctccaaaagttaaaaaaaaataaaagtgatacatactctaattcctacctattcattgaaaataaatggaaagtgaatttaactgctgttcacaagctttttgacaggctttctctaaaagtgactatttctgtagttagctgagaaagcacaacaggaggaaaattttgcttttgattacaactctttcctgggaggtaataccactatgaaattctctttttttctatgtatttttcttaccttctaaccaggtcactacttttggggtaataatgtgtctgcaggaaaatggaaaatgtgagcagaaggtgaaattatttcactcaatagatatttacaggaacctatcatgttgctattcgtattcaaagaaaaaaatgcctgatcccaaggtgcttaccatcctaataggaaggcatgtaaactcaatagtgagatgagtgagcaggtaccattgtgtgcaggatttggtagaggcacagggggaggaggatgtggacatacctacaggatgggactccctacccgaaggctggaaagggagtagagagggtacaaggtaggagataacactgcagaggcctcattgaaaagagtattattagaaagataagggagaaccacggagggctttacacagacacatcctatgaccgtgacattggaagtagttcttagttcctgggttcatctgatgctaaactgtacgtgaacactaactccttaagacatacgttctttggtttgaggccttaccacatgtttggatcatgctcttctgaattgataaacaggctgtttagtggtatccatttatatttgatactctgcttcaaatatggcaatttgatcaactgaatgcagtctttgaagccacaataaatgtatttttttgcttaagtagataatgaaaatagcaagagaaatcgatgaatgaaaccaccatttggaggcatccttgttgcattaaaatgtaagatgtttggaatgagctacatgcagagggagtgacggttcactaaagagataatgtgataagtggccttcttctcccttagcaatcaatgtttatttgtccttagcaattttctttattttctactgggcatacatttctccttcaaaataaaataatctactggaaatgaaattgatcaataggcaagtcagaggatttttttcaaaaatctacagattaatagggacaagtcattaaggtggaatagatatccttattgtaaatgtatgtatcatctaaattcaaggtaacaggtttcctgtgcatacgtgtgtataagagagacacacacagagagagagagagagagagggagagagactgaaacaaggaggctttaatgtattacagcaatggttctcaatttatcaagcatcagaagcagcaattgggcttgctaaagcacaaattgctggacccatccccagaaattttacttcagtaggtctggaacaaaacctgcagtttggcattagttgatccaggaaccacattttgatatccactctaccagagagctctggactcatcaatcgtatttcccccttataccaggtagccatgatgctcttactagcatgcaggggtggagacctaaaacatcaatggttaaattcatcattctttgtacacccctccccttttgaaatccctaataaaaacttgctggttttgtggctcagggtcgccatcactgtcctaccaatatttgatgacacccctggaggcccagctgtaaaatttctctctttgtactctttctctttatttctcagaccggctgacacttaggggaaatagaaaagaacctgcgttgaaatattgggggctggttcccccgatatagttggatgtaatatttcttattaatttgtggagattttatttatttttcataaagaatcaaatatttagagctaacaaggatttaaaacagtatctgacttaatctattgtctatggaagaagacagtcaggccccaacaatttaattcactttattaaggtcctgtagatacttactggtgatgccaggagcaaaatgtgtctatctctgaactccctgaccacacaatctttgcactttgccacctggcttttgcaacttttaatttcagagtcattaataaatgtgttagttattatacaacttagggtgcctcatattagtgagacaattgtttaaatgcatctgccacatttttgacatggttataaaggcaaattagctaccactacctgttatttattgagcactcactaagtgcctggtgctatacttcacatccattagtcctggttaatctttaactggctctgaggaacaggtcacatagttcttacttttctgatgaagaaactgagactcagagaggttgcatggcttagtccaattcatgcagctaggaagtgacattaggagggcaagcataagttgggagatagctgagccacgcaatgtagacccagtagttggcccctcctctcccaaatgagaattgacaaaggtatatgccttggttgtgtggtaacaaggcaggcccttaggccaaaaataaccaggcagattccacttgctgaaacagggatacagtggagtaacttaggtctcagatttttttttttttaaagataaatgctcaagtcactgaaatcaggttacaaaatcagaaactgatttgcagaaaggctgatatgatgattaatgatctgagtctgacctaagagctggactgttttcctggggcaggtcagagcatcaggtagaggtcaggtgattccaggtgttgggactataggatggctgcaggaacatggactttgttcctgagttttgctaggtatggagctgaacttttgtgcttctgtaaggagaacactttatgtttctgttttaaaactgtagataattgcaccatgatgtgttttctgagcagggaagttgggtgaacattatgacttggctttctcacaattgggagtagtagtaggccactgctgtgtaatgttttttttcctaaaccttgaagaaaagtggaagtaaaaagaggaagtttagaaaatgaataaactatcttgccagcagataaagtccaaaatgatcacaggttgtccacacacaatttttattatttacttttttaattgtggcaaatatatttaataatattttccattttaaccattttatttatgtatgtatatttttgagacagggtctcactctgtcacccaggctccgtcagtggcacaaacagggttcactacagcctgaacccctcaggttcaagtgatcctcccacctcagcctcccaagtagctgggactacaggtgtgtgccaccatgctcagctatttttattttattttttgtagagacaaggtctcactgtgttgcccaggctggtctcaaactcctgggctcacacaatccttctgcctcagcttcccaaagtactgagattataggcgtgagccactgcacccagccttcaccatttttaaatgcacaatgcaataggattaattatattcataatttcgtgcaaccattacctctatctgttccaaaatgtttcattgaccaaaacagaaactctgtaaccattaagcaataattcgcctttcttacttacccccaacccctggtaatctctattctattttctgtctctgaatttgcctattctgagtaccccatataagtggaatcatgcaatatttgtccttttgtgtcatgcttctttcacttagcaaaatgttctcaaggtctatccatgtcatagaatgtatcagaacttcattcctttttagagctgtataatttttcattgtatgtatttaatatataccacattttgtttattaattcatctgttcatgaagcctggagctgtttctaccttttagctattgagaataatggtactgtgaacattggtatacaagtatctggctgagtccctgctttcaatgctctggggtacatacctaggagtgaaattgctgggtcatatggtaattttatgtttaacttttcatgaaaccaccaaacagttttccacagtgactgtatcatcatacactcccaccagaaatctacgagggtttcaatttctccacacccttgccaacagtaattgtttcttaggattcttccctgcattatagccattctagcaggtccacacatgctgtcttcagcatgctaagttgaagacaccaaagcatatgtctagtgtcttagttggtatttggggagattatttttactcaaaccagggagaaggggagaacaagggttgaagaatgtggttcatagaccactgtaacaaaataagaaacccagaaataaagcaacacacttacaactctctgaacatcgacaaggctgacaaaaacaagcaatggagaaaggactccctattaaataaatggtgctgtgatagttggctagccatatgcagaagaatgaaacggtttcattctgcatatggctggccaacaacctttacctttcaccatatacagaaatgaacccaagatggattaaagatttaagtgtaagacctcaaactctaaaaatcgtagaagaaaacctaggaaatatccttctcaacatcaaccttagctaagaatttttggctaaatctcccaaagcaattgcaacagaaacaaaaattgacaagggggacctaattaaaccatagagcttttgcacagcaaaaaacaaagaaaaaaaaaacctactagagtaaatagacaacctacagaatgggagaaaatattctcaaactatgcatccaacaaaggtctaacatccagaatctagaaggagcttaaacaaatcaataagcaaaaaacaaataaccccattaaaaaaatggacaaaggacataacagatacttctcaaaagaagacgtacacacaaccaacaaacttatgaaaaaatgctcatcatcactaatcatcagagaaatgcagatcaaaaccacaatgagatagcatctcacaccagtcaggaatggccattattaaaaagccaaaaaacaacagatgccgattgggctgcagagaaaaggaagcacttatacactgtcggtgggaatgtaaattgtttccgcctttgtggaaagcagtttggagttttcccaaaaaaatttaaaacagaactaccatttgacccagcaattcaattactgggtatacatgccaagtgaaatagatcattgtatcaaaaaaatgcatacactcatatgtccattgctgcactattcataatagcaaatacatagaatcaacctacgtgctcatcagtgatggactggataaagaaggtgtggtacatatataccatgaaatattatgcaaccataaaaaagaatgaaatcatgtcctttgcagcaacacagatggaggtggaggacataatccaaatgaattaacacaggaagagaaaaccaaatgccgtatgttctcacttatatgtgggaggtaaacattgagcacccatggacataaacctgggaacagtaaacactgtgaactagcagagtggggaaggaggaaaggggatagggtcaaaaaactacctattggatactatgcttactacctgggtgcggtatacccatgtgacaaacttgcacatggactccaaaataaaagttgaaaaaaaaaaaaaaaaagaagccattggccatctacaaaatcaaccaaccataaaataacattctggattacctgctgtggggctcaaagtcctttaggtatcatcctttcatttcacacattagggttatcaccatagtgtagtggaaagtctacaaacttttcaatcaggtaactttatgacatagacaacgtgtacatagacacattattttatgtttgtgtcatcttgaaattcatatattatatatatgaatatatattactaaatattggttttctcatttatatagccattggggataatagaacaatttacctcattgaaaaacattttcaatataggaataaaaagataccatcaatgtaaaaaaaagaatatggtcattagatgcagtctatgaggaggtcttctatcacactgagaatctcttgtgtttggaaacataacttggtcatcttggcatccccagcgtggagctcagtgctgaagatgaagtattcaactgtgagagattgaaagttgaagagtttatttaaaaaaaggtttttagcacttcaggaggctgaggtgggcggatcacgaggtcaggagatcaagaccatcctggctaacacggtgaaaccctgtctctactaaaaatacaaaaaattagccgggcttggtggcaggcccctgtagtcccagctacccaggaggctgaggcaggagaatggcatgaacccgggaggcggagcttacagtgagccgagatcgcaccactgcactccagcctaggtgacagagcgagactccgtctccaaaaaaaaaaaaaaaaaaaaggttttcttactgagaaattattttaagatatatgttcacatagacctttccagaagaaaactgaaaagaggtaaagggtagtctaactcacaaatataaatagagaaacacaatgcatatttactcagcaatcttttaatatgaggtcatattattggaataggagtttaccagttggatttcggcatgatttttcttgcacaaaacacaaagcagtaactataatttctgcctttagcttttgaaaaactaaaagaacttaaagatgcttgcaagccaacaagagcagagtcccattttcctccttctttaaatttcgtatcattgtcttacctttaccaagatttttcaaccattctacttcacccagtctttccaaagtacttaattttttttctaaattgatatttaatgggttgctcaattttacaaataacataagaaggtttagggtcaccgcaacagattctttgaaaccataaaattcaacccttggctacgatgttggtgggggattaaagagtagcctaccagcctcaagtggtcaaaatgacatggacattctcacaggcactttaaagaaaaaaatgacgagttggctatatttatgcatgcagaattatttttatagagttctatcttgattaaaacataatttagtagattaaatatgctatcttctttgagcaagctttggaagaccaagctactagtagaattataccagagttaggatactgccctctgcatacactcaaatagcaggccagaatcccaatagaaaatgagcatgcttagctatgtttctgtagtatggaacttacgaaggttcgattcttgatttctcatatgaatcagagctctctctctcctttccagtgtgacccagttgtattttgcataggcagatggtttgaaggaaaattccagattattagcatttgcactggagcttgacaatcacctttatgaacctgctcttggaatagcagccttggaagatcctggagtcaatctccttttatttcagatgaaaactgatgacagggaaagagcccaggaagaaagtttttattcttggtgccttgggcaacgtgtgtatcctccctcaaaagaaggcttggagcaaaatgaacacttacaggaaactgaggctcgtatgttttatgcagtgaatcaccggcataattggaattctaacctcgaaattttatttccaaatttgactggctccactccttatacatcaaattgatcaaagcagaaattacagattcaaatttatggtaaagctaagaaaaagaaagcagaacgatgagtcagaaggtaagaggccacgtaacccaatatttttttagcataaagcattcacgaattttactggcacctcaactaaaatgatgttcttttaaaatcgtgtcacttgattataaacatcttgttttaaaaatggaacatataatccaacatcccccaaatttctagactaattcaaacataagagttgatcttaatatggatttaggtattcaacaaatacttatagagtgtccactatcgggcaaacattgttctaggtgctggagttacaacagtgaacaaataggcaaaacctttaccctcatgaggcttagagtccagtggaaaggaaaagaccaaaaataagataagaaaactttatggaaatatataaacatacataggtatgtctatataatacactgtgatatacctagtaagatatatatagttttgagagaaaaacatggctaacttgtttgtgccttaccttgtcatacagaattagaatattatccatactgaattcctgggcccagccctggccagtgtctctgccattttatggggtacattatctctgctgagctaagtaattgctaaatccacactggaggctgtgtgagtagagaagtgacacaccagttaacagggtgagaaattaatgcaaattaattctccaccctcccagcagacactgctcccactttcttgcccttctccatccccctgccagttcacagagaaaagtatgaatattacaaatgatactcacttcatgtctcagtgacctagaaaggagtgtgtgcactaaggtgcagcagtgctttaatgacgctgagcccaaaagcaaggcagtgacacaaagaggggagtggtgtcactgagaggaaggcccaagcactttccccttctgcacctcttcccaggagacaggggtgagttaaggcagcacaaggtcactgggattgcctgaagcttgaccacaggcacgagtgactttcctcttggctggtaccatctgtataggggaatagaagatttttatcataacaaaggatatctcaatagagtcaattagcccagcatgcctcagagagttctgtgatgtgagtggtcacttctttgaactaaagttgaataaagaaaaaaagaaagtgaaatcatttcagttacaaagaacctagcactgcattctataaggttttatcattcagatttggaaggagacgggagccatggtggatgccgtgaggtgtcaccagatccctttgtgggactatatccatcccccaccctccagctgttctgaggattggctgctcacctctgtccccttctttagggacctctgtatctggagaggcacttgcaccacaccccatcccatagctggtgaccgatttgttatcagagctccttcatactaaagaaagagagactgagactcaagctgctgaagagctttcctcaaagtctcacaatctggtcagtcgtcaaaggagtctgtctgactccaaatccatcctctctcccctcaatcgtatagttgctttattctcttctagtgctgtggagaagcagccccagtttgccactgaataataagcgtccccaccatttcctttccccattgttgttatagggattcctaatatgtgttgctaaggcttcaccttatatcacccagaagctctaacctgtggcttcctcaagagacattatccctgaaaaacgggtagaaattcaggaaactgcttactcaatttctcaggtggtggcggatgttttcttccttattctttgttttctgcttggtaagtctgtgtgtaggtggtttaattgtgctgaacagattctttctctcctctgtacaaaatgggctttgggggtggacaggaggaggaagagaaagatgtgagtttcacataagagcagagggatccttagcctgtcagctgagaaacgaggactgtgtattcctgagtagtgcctcctgcctttcaagcctggaaagagaacaggagagggaggcatgctccccaccctgggatgttccctttactgctaccacttattgctttactggacatcataaagattgcaagatggacggaatttatttggataaaaagcagtggatgttgggtataagtaaattagcaacaggtgatagattctgaacataggacacctctagattgttatgtcaatccacacattccttgcaatgtcaaggaaggagtaaattttccagataaattaaacaattaaaagagtatcaaaacttaaaaaattcattccattttgtggagatctttccatgatccaacatctcttctcattaaaatgtatgcagagccaggcgcggtggcttacgcctgtaatccccacactttgggagaccgacgcgggcagatcacaaggtcaggagatcaagaccatcctggctaacatggtgaaacgccgtctctactaaaaatacaaaaaattggccaggcgtggtggcgggcgcctgtagtcccagctactcaggaggctgaggcaggagaatcgcttgaaactgggaggcggagcttgcagtgatccgagatcacgccactgcaccccagcctgggagacagagcaagactctgtctcaaaaaaaaaaaaaagtatgcaggccaggtgcagtggctcacacctgtaatcccaacactttgggaggccaaggggggcagatcacctgagcccaggagttcgagaccagcctggccatcatggccatccctgtctttactaaaaatacaaaaattagccaggcatggtggtgggtgcctgtaatcccagctactcaggaggctgaggcagaattgtttgaacccgggaggcggaggttgcagtgaaccaagatcgtgccatcgcactccagccagagagcaagactctgaaaaaaaaaaaaagtatgcagaaaaaattttactttttcctagtgaaatgacatccacattatgatcatctcatatgtgttgcctactgaaaatacagcagcattctccaggctgctgaggcatgtgatctactgcctggcacaccaaatgatccatcactttagttgatgacaaagaaagactaaggaattgctccagattgagggacactgaggacacatggcaatgaaatggaatacaggatcctagtcttcatcctgggctaaagaaaatggttgaaaggatttgactgggtcagttgacaaagttggaattcagacagtaggttacgtaaaagtattgtatcaatgttcaatttactaaagttaataactgcagtatgggtgtgtaagaggttatccttgttcctaggaaatacaccctgaagtattaaggagtaaaaggccacgatgtgtgtaactaattctcaaatagtgagaattatctcaaaagttatatatgttaacatatgagtagcatatatgaatacattctcatatatatactctcaaatattattcttcagtagtataagtgatacatattagtatataagtggtacatattagtatgtaagtagtaatgtgtatactatctcacatatatatataagagagagagtgacagcaagcagcagaaacaaatgaggcaaaatgttaacaataggtgattttggataaagagtatacaaatgtttttgtaccattcttataaatttctatgagttttggattatttcccaaagaaggagacaaaagagctttctttaagctgcaacgatgaagtaacaagactggattttacatgtggcacctaagaagctctctcattatttatacatatgtatgatattgcaccttcactgacagacttgaacatttcataagaaatgagttgatactagaaatgctaggtgaagattgcccaagttaaggctgaatataaatcttcttggtattccatgagattctgagacattttatgggagttttggcagcatgggctggctaagtgtagctcagggattactggctttaaatgtcttgagccagtgtcaagtttgagttgaaggcattggcaaggtgtggaataaatgtgaatggggatagaagaggatctttggagagctgagtcggtaagtgtacactgcacggcatcaggacagtgagcgatgtccttggaaatggcctctttttccagtatgtcatcatttgtacaaagcttagattaaagcaggaaacaagaaatatcttaagctggaaaaaaaaaaaaataatagtagaggcaagtttgaaggaagtaaaaaaaaaaattgagacttatctttccatttatataaatccaatcctcccagccccagcctttcctgtctcttctattaatgactagggcagaggatcttcccatggggagctccttttctgagttagagatgttcaatttcatctccaaggggaactggtgaaggtaacaaatagagtggctatggaaaacattagagagccaaacccagataatagcaaaatgatgctcatatgaactaagtttcctggtgtatagagaagaagcttgtgtgctggattcatatgaaaaatatcctcttatacttgaagagaagacctctcattagcacaaaaatgaaacctatcctcatatttcactcctaccttcatctctcacaattcacaattttatgatttttattaaaaaaaatagtttataggaaaatacccacttggtcatcaaataatttatcttccatagcatttacttacctcagcatgctgcaatattttacatagaggttgcttaaatccactgctgaaatgcaggcaactctggaagaaaaaaaaatgtgttaacagataaatggctccctacttcatgctagttaatctttgcagcaaataacagaacaatctataaagtatagaaagattttgagtacttggaactttactctctgagctggcattttgccacattggggataaagcctcaggtcttcctaaaagcaccatggaatccataatagcccagagtgtgtggctcctcatttttatatgtcatcagaaagatggaatgccaagagtatgtctggggtctgggttagtactagctcaagggaaagggtaccacgtagtcaatcacttcccacatatgccagatctcccctaaagattagtcaacgtgccagtaaaatatgagcctgcatttcccatgctatgaggagctcaagacaagcagactaaatgtttgtgatgttgacatatgttggggtgttgtgatgtatgtacacttgtatgcagagaaagagcctgccttagccattatgaggtactaaccaaaactgcctcatgggaaagggcaactgagagaatgtgaagggctggtcaacagcacagagaacattactgcgcacctcagttgtgccctctgctggggactcagtttttatatcaggcaatgaagtggtgggtgagccccaatttggtggtacaggtccctggtagagacatgtagacactaaagttcagtgggcatcagtttgctgaaacctgtgtttatagacacatgatggtttaatgtgaggtgacccagggaatttgttgaaaccaaaaatgaagccttatttttggggatcagaacagttagactaagagctctatgggaaaacattctaagaaatacacttgaaacggtgagactcctcgtgtgtgtgtgtgtgtgtgtgtgtgtgtgtgtgtgtatttccacatatatctattttatccaacttcaaaactattatgaattcagtcttctttgccacaattagagaggaaactgtaatttgaaaggttagcagatctgctactgtttcctaatagtttgtatagtttctaatgaccggaatgccacccaggaggcctttatagtggagctatgtcaccataggagcggtccaaagtgaatgttacttaatcagagtcaccgaagatgaaaaatgtagtatttcctttgcaagctggtgaggctgtaattttcaaatgccgctaatgtaatgtggagtgggagggggccgccattcctgacctctgtgttttatcctctgctttgaatggtttcggcaaaaataaaaatttctaagtggcactcataataacagaacttgaggcaaagggatgctcttcgagtgtgctgtagcatatgaaaacagaacctggtgagcatgcggcatgccagaatacgaaaacagaacgtggtgagcgtgcgacatgccagaagggttcgcagtgtcgcttggggtataggagaaatgcccgtgtgcaaaattgctgttacccagtgggctagcccgactacaaagaaaatcactgagataaagacattgaaatgcatatgatcattgtcgtcatgcagtgaaagttctttaaatctagaccccttatctctttcatggttttcagcagctgactttggcttttgtccacagttgaacaggtcctccctgcttttaatagtgaggttgagcttttggcggaattctagatgtgggctttcacattaattctgtgttctgtagtttatctgctatgttttatgctgggggtaagtctgtaatagctgcagtcattgtgaagcttatgatatagtgggaaaaacagatattgaagatgaaatgacaagtatgattactttgatgtatgggaaatttagggtaaacaggcatatataaggacaggttgctaatctcatttggggagtgttatatatcattgcagatacagttatatagatttaaatatacttgtagcatatgtacagtatatgtatactcatacatgtacatatttatttattaaagttgcctgatttagccaataaaagtataggatatatagttaaatttgaatttcagataaactagaagtttttggggataggtatgtgccatacaatatctggacataattacaatgtggagagtggtgtttatctgaaattcaaatttaacagagtgtcctgcatttttttctggcaactccaatgtatgcatatgtgtgtatgtctgtgtgtttttgcatatgtgtctgtatgtgtgtgttaatggcattcacagcaatctagatgggattgtagactattattctaagtgaagtaactcaggaatggaaaaccaaacattgtatgttctcactcataagtgggggctaagctatgaggatgcaaaggcataagaatgatacagtggactttggagactcggagggaaagggtgggaaggtggcgagggataaaaaacaacaaattgtatttattgtatactgctggggtgatgtgtgcatcaaaatctcacaaatcaccactaaagaacttagtcatgtaaccaaatatgacctgttccccaaaaacttatgaaaataaaaattttaaagatgaaaaaaagaatactttaactgaaccattgaggaccagagatgcttgtagttctgaaactctatacagaagcatgtgttgtgtatctgtgtatgtgtgtgtgtgtttgtgtgtgtgtatctgtagatgagtatatttatatgagtatgtatttatgtgtgtatatgtacccttcccacacacacacacataaccaagggcaaatctaagaggagtatgagaagtattatagaaagaagtatctagaaacaaggcctttggaactgagcactgaagttttattcttttcaaaataagaagcctgttttcctaccttctttgtgactgctcttctatttaagtctcttttgaacagagagtggtaagtactggtgtccccatgtccagttacaagcacctgatctgcagatgtcaaagaagttaaagcctccctggtctctctcctttgcttccttccctgttcttccagcagtttcttcctagttagggcttgtataagacctttccccttaaccaaccccagtaagaagccattgtgggcatggaaattggtttgaaattccaaggacatcacttggattataagaatacttcagtgcaaccattgaggaccagagatgcttgcagtcctgaaactccatacaaaagcatgtattatggttttaaataataaaatcgattgtttcaaatcatgtgccatatctaaacagttgattttccttacataggagtcagcttgtacatgcatgttcacattattattctcgctgactttgggattgttccttaactcacaaatcctctgcttcctcattcataaaacagagttgctaaagtttctgccccataggactgtcatgaggattaaatgagataatgcaaataaagaactcagtgcaatacctggaagatgtagtaagagctatgagacttaggggtgtgcaaatgtggctcctgccacacagcctctaatgcatcagccaccatctcagaagtcaattcagacatttctcacgtgttctgagaaacatggggaagagcccataccaaggtactcacataaagactgtagtttacgggtgactaaggttcagctttggaagaccaaggggaacccacagtaccatagttaaaagaagactcagcaggaataagtgtgggctttcctgagatatggcccaaagccaaaaccactgcatgctcagaatgtttgctcagtgtgctgggagcatcttggggctatgagaacaaatttctctttgataatgacatattaaaatagacatccctcaatgttctttgtagtcaaaagatagatggcctttgagacacttgtcactagtgaaatagattttgtcattatcagaggaagccgggccatactgcataccacaattaacttgaataaccttttcagttttttttttttttcttaattagggtttacagcacaagaatatctcttataagagggaggattttttttaactaagaaattttttaaaattttttattttggctgcaaaaaaatcaagctgtacatttgtgttttcaaagccatcctccttttgaaaaccacaaagccaagcgcatgctatataaagatgttatattgtagctgaacttcatgttaactgtcattaatctgtgacttccaagcaagaaactaaagtttttaaagggtcttcaagtgaagtatgtccaaaagtaacaacagaaaatatcattttaagatgccgggtggtttcagactctcaacactgaccttttaccttcaaggctgtgtcttgcattacatccacttctccttaaggctacagtaaacctgtcaagtcagattgctgtttgagttgaaactaacaggaacaagcggaagagttttacccaagtgattagtggatttcagactgcttgtcaaaaccacttggtgttacgagagttggcataaccccataaggcgtttcttaaacatgcctttatttggttcattttcaatttcttcccataactgccacacaaccatatttgacggaaaaggaacttcaatttcatgtttggaactttaacctcaattaaatgcaaagtaggaaatgcaaaatatttttaaaagagacacttatattggctgttatattggctaatttgtttctggatttagtcagatgcatggtaatatgtcctatcaatgatggaataaatatctctgctggaataaatatatttgttggcttctaccattctataacaaatgatgtcaaaatgtgggttttttttaacacattgataccattctctttgggcctcatgtatgaatctacagggagaaaggaaattactaaggctgctaggactgtagggaagatggaatggggtgaaagaatagagagatttggggccagttccatggaatactgtcatctctgagaaactctacagtattgagaaaatcccccctcatctgtaaatttgctagggctcctccacacacccagaccttagtcaaaagctgcatactttaacataacctccactccctgccaagcatcatcaagttctcacctttaagaaggggagctataacggtattagcctgctagggctgctataacaaaataccacaaactgggtgtcttaaacaacagacatttattataattctagagaccagaagtccaagatcaaggttctggccaattcagtttctgggaagggttctccacctgacttgcaaacagcagtcttctctctgtgtcctcacgtggcagagagagagtgagctctctggtgtctcttcttataacagtgccagctctattgaattaggaacccacccttatgatctcatataactttaattgcctccctgaaggccctatctccaaatacagtcagattgaggattagagcttcaacatgtgcctctttagggggatacaattcagcccgtaacaataactaagaacaaaagatagtatctgtattttggcaacttactattatgcatctagtctgtaaatgtttttctgtcacccacaacaaatatacatttagcatcaaaataatgaataaacaattttaccaagaaacgtaacactttagcagtgttaaaaaaagctctatgccctgaaggccaaatatttgtagctaatgtttagcatgttaaatgttgacttgtttttagaatgttgctttttatgcagatgtctttgcaagaaaaataatgttttgattttaattgtaccctataaaatactaaccattgttatatagcatgacatgtagcactgatcaaattatatttcccactgatcaaattatatttcccaaaacataataaatacaaacaggtgtttcagctgttaagtacttttttttctgttgccataattacaaagaaatttcatcctagatctaacagcttagactcacaacctataagatggtggtcacaggttgtatataatgaaaaggtaataaagacacaggtgaaagtcctaatgcaggtaatggattgaaaagcagataaaagctctaattcagcctctctgagccttagtttttctttttatgaataagtaacttgggctaggtgatcttttaggaccattacaggaataaccattctctcatcctaagaaacgaactaggaagatgatttggtaaaattagcaaacagatctcacttggaaaaaagtaatgaaaataaggtcaaatttcaagttatattagtgggaaacagtcttcggattgtaagattatgaaccagcctcccacatgaaataatataagctggattttagaagatattttagatgaaacaaaatctcaggctgtgtccgttctgccacatgaaataaacttggtgaccccatccagcctttttccatctctgattgcaatgcatctgtaattgaaaaatgtctttagggaagtgtactgttgaacagccttctgcctgaacaacatcatcctaacacacatctcataagagatttcactgctctgacaagttacacatcctaagtgaaaaaccacagtgatattgttgctgtttgctcaaccccctgccggagctgggattcacaccctgaagctgtatttcatgagtgaattcagattaaatctttgttctctttccatcgtatggcacagctgccttaaaattcaccaccaccgacagacagaggacttcctcgagataatgacccacaggaaatttctttcatgaatcagacaagccagtagaaccaatccaccatggagagtttagggcaatggcatgccaggttggcattataatctcatttgccacatgcttgttgaaaagcctttgtgctggaagctacattagacatttgggaaggagtaccacattatgcacttcatcccgtgtttgtgaagaactttactaggcctaatatcctagctaaaatctgccttatctttccttcacgacagagagaaaagatgggaaagtcaaaatataaatatattgctgagtcattgactctttttattagttaatttgctaaattgaccttgactcagcttctctggattagggttaaaatgccttgtcatcatttttggatctctacatcctggaattgtatggcagaatgaaaagaggtagactagcctgcataaccagctgcttgcacctccccatctttagtcacacaattcctatgagcttcagtttcctcatctgtaaatttggaacaataacattcactccacggagtgatgatgaggtttctggtgggcaaggtaacacagtgctttggcttgcatccttctctaccacttgttaactgggacactctgctgtgtttccttatctgtcaaacagggatgacttttttaaagcagttctttttcatagagttgtttgaggattaaatgggtagacaatatatgtgaagtattctgaacagtgcttggttcatggcaagccctcaataaatgctacctcttattggttgatagaatgcacctgtgctcaattaatgttcccttcctctcccctttttctccttcatttgccctccttgaccacacacagaaactggaaggcagagtttctcgtgtgttaaaaatattccaggtcaggcgtggtggcttacacctgtaatcccagtactttgggaggccagggcaggtggctcacctgaggtcaggagttccagaccaccctgaccaatatggtgaaaccctgtctttactgaacatacaaatttagctgggtgtggtggtgcatgcctgtaatcccagttacttgagaggctgaggcaggagaatcacttgaaccctggaggcagaggttacagtgagctgagattgcaccattacactccagcctgggcaacaagagcaaaactctgtctaaaaaaaaaaaaaaaaaccacatgtttccaggatccttactttgaacattcttcaggaattgctctctggaaacttcaaagtcatggagagctaaagcgttggaaaagaatttctaaaataatatgctggctaacttcaaggtattttaggtctatctctaacaccagccaagtgactggcatttgtaaggtgtgggtcctgtatagagcacatgaggatatgtaacaaagaattattttcaaatctgttagcaactcagagttcatgccctattgccaatggctgtggagcttcattttcaacatatgcaggacagtaaatctgcatattatagaggagactgtgttggaagaagaggcttggaatggtagtctatcttctttgtattcagttcaactagctgaagtctattttaatggtgtctctattcaaataaaagtgtgatggtggagaaaagagaggctaagcaacatggcaggaataaaaaaagactttagggacatgatagtttgcatggttggagaaaaattaactcaatagatgtttgagttggcagatttgctaatgtcctacagcattctttgtataggtgtaggagattatttgcattgcttggaattgaagactaacaaagttgaaatgctttttgaggtattattgtgtcagtgacaaatgccaaaattagtggccacactgggtttgaaccacatggtggtgatgtcagaggagagcggagtccaagtgggatgaccagggcttcaataaagcctggggtcccagtaatgccaggaaacaggcagcgcaaaaggcagaagcacttggcagttgactgattctgttgcaggacctaacaaagtgattaacatcaagtaaatgaagatgctccttggaaaactgtaacattatcaaggctgtcagggaggctgcatgaagttagcacactgaaacgtgcccctcctggttcacttcctcagacagaatgttctggctttgggttttgctatcagatgtgatttgatctccaggcctctcacagggacagagatatcaagaagtcagggggtctgacagtgatgcattaggcaataggatgctgaggctgattatgatgcaggtgacagaaatgaatcacctcctgaatatgctgacattggcgctgcgggaggagacagagccagcgctcttgtgatgtcaataacgaaaaacaggaagacaactctgcctggaaccgtatgtgcctgaaactgggatgcttaatgttagaggtaacttgacgatccaggccactattatacagaaaacaaaacacacaccaaaaaatatatatatcttaacacctttggggaatactatttatgtattgcctcttctttttcacttttccgatcttatgaggtataaattatgataaaattaacaaatatatgtcatgatcacctaaatacttgcatttggaagcatataataagcatcagctgatcaataaaatcatcattaagatgtctacatagcggccgggcatggtggcttacacctgtaatcccagcacttttggaggtgaaggcaggccgatcacaaggtcaggagtttgagaccagcctggccaatatggtgaaaccccatctctactaaaaatacaaaaattagctgggcgtggtggcgggtgcctgtagtcccagctactcaggaggctgaggcagaagaatcgcttgaacctgggaggtggaggttgcagtgagccgagattgtgccactgcgctccagcctgggcaacagagtgagtctccatctcaaaaaataaaaaaaagatgcctacatggcaaatgctaaataggagaaaaaccttgataattctctgaatactgggttctgaaatggtaatagttttctcactcccctggcatttatgtattgccatgtagctctagttttcttcaaatgaattaatgtcctatctttactcctcaaatggatcataaattcctgcaaaacaggggccattctaacttaaaatcctttgtaaattctcagtgtttccagcccacagtcctttgcatgttttagcatatcaagaactaaatgaaatcatattgatatatttcactaaataaaaagatgtgtaagttctctaagatgcttgtggtactctgttctcatgctgctgataaagacatacctgagactgggttatttataaagaaaaagaggtttaatggactcacagttccacacggctggggaagtctcacaaacatggtgaaaggcaaaaggcatgtcctacatggtggcagacaagaaagaatgagagccaagtgaaaagggaaacgccttataaaaccatcagatctcgtgagacttattcactaccaagagaacagtatgggggaaacagcccccatgattcaattatctcccaccgggtccctcccacaacatgtggcgattatgggagctacaattcaagatgagattgggtggagacacagctgaaccatatcagtgcaagaaaaagtatgggttgtttagataaggtaatgctagaaccttgagaaatgtttgatgtcagtaactggggaagtgggttaggtgatggagacatctgttcagaatggcccctcagagggatgggatggtatttacgaaggtgaagtcagcagagcccgggagtaggtgaggaggagcctggtaaggccaaaagtgtgaggccccttcgaaggccctaagaacatggttcattttctagtgcaataggaaatcaaactagaactctccatgaaaggtagaaaatttaatcctgttttcaacacctctgggctgatagcattagagaaaaatcaccagattccttgatcagattattctttttgagcaattgtaatttcaaatgccccaaaagtgatagattaaaaaggttttatagttttataaatatgactcacttatgttttattattatttcacttatagtgagtcttatatttagtgagtcttatatttataaaactataaaacctttttaatctatcacttttggggcatttgaaattacaattgctcaaagtagggcctatatttatagaactagaatttgtattgttacctttaaaaaaaaatactgacccaggttttactagattatatgtatcctgtaaaatcaaagaaaataaccatgaaaattccaaagaaaaacttatatatataattattgtgagtagaatcactgaacgaatacatttatattggttctggaaagcaatgagaagctttacacaattacattatctcaaattataactttctgttgtttttcagagtttgtaaaaaataaatgatgtgtcatatttaatcttctttgtccttagattcaccataataaatattaaggtagtgcatttattatagggcttttcacttgaaagacaatacccattaattttaaaccttatgttggcagtccctccaacacagtattagaatacttctgtctctattctacattatgtttattgggactggggaggctaacatcacaattactttcaatctcaggaatcagattcttctttacttcgaaaattctcaactactattaaatctgtacgtttcttctctgctatcttctccattgtttcttctgggaattctatcaaatacatgttggagcctcccaatccttactgcatgtctgataactattctttcatattttctgttgcttcatctctatggctttttatttttcttgtattatagtttttctgtcactggtgtatctggaaccagagatgggatgaattcactcagtcattttcaccaaaagtctcagcaaaactactatatgtttacctactttattgtttaaacatataactttgaaggaatatccaataaatttacacttcccaaggcactgaagaaaatcattgctttgggtttttatttctccttttctagaaagggatagatttaaacaacatctcaaataaaaaaagaggacaaagagtcaaaaagcaacttcaaatccttctatatacaaaattccagctttctgtaatacataaatactttaagctgataaacaaaaagggtagctactcagtttaaaccaaaaacaagtgtggataaaaatgtacctaatcctccagagaatcagggcagtgcctaagaattatgtgcattccacacaatgggaaatgaatatattttccacattttagagctttaagatgtgactgctttagtatgccagccaacgcctacaaaagtgtgacaacaaaatacataaatcaataaaccattcctctatataccacatacttaatccattttgaagtgggagtatttcactgtaataaaaatacggaggtattttcttcaatcactattctaattagttcaggcttaccttcttttatggctctgtgaaatatcaccaacacatacaatagttatggaaacaatacatcccatagatttgaacttataaaagccttgcatgtgaaatttgtttctcagacaaatgtgaaattcagtacctttactggttgcactacatgagcaggttggaaaagaaggttttaaaattctgtcactagaattaatcatattccaattttgtatccttcacttctataagcaaccgtatagaactcagtcagccttgttcagcattatattttcaatgtgtatattcaatgaatctttctttaataaacatttatctcttagaaaacacttttctcaatgtatgagccacaacataacttaataaactaagaacacaaaaggtataaattaaaaattcaaacctgacatagtttaaattcaatattcttaaccctggatcaatcaaataataatctttttcatgataagaatgaatatttggtgaccacaaataataggaagacatatgtaatgtgatataaaaacattttatcgtgtgccaaaagcatctgttgcctgtaaaaatatgtgcttccttgatgcttatctgcatttggtttattcttttgagcttctatttggttctctaattttacctacaccgtttcttagtcactgctaatcagattccaacaaacaggagtacagaaaaatcaagggacttaaggttgcacttgaggtctccaggcatgtgtctttgtatttgtgaacatctagcccatcttattatagcaaatctcaaatggtcattacgtttcttgtgtatttttgcagccagtattgacaggagtcaacttagagtttgtctgtttatttgatgtttatcttgtttaagaaaataagaagcaaaaacaccaagaggcctatttgttagggaagctttcctctaccaggttagagcaggtgaaggatcctagaaaaatttccaagcctcttttatttctctcctcaccaaagcacaactagagcagcttgggaaagtttatgtcctgccttgcaaagcagagatgtacctgaacaaatttcaatctattccaccaggagtttgtgattgttctttcagatggcatcttctaagtctcatcttaagtttgccatttagctctccatgctttgtgacttcattttcttttttgagagcagggagaatacgttcacttttctttcattaaagagtatttcaactgtaaatgataaatggctttcaggatcctgaatataaagagctatatgaaaacacggctaaactaaaccatgagttatctggaacactggttttcaactgggactgattttgcccatcagagacgtttggcagtgcctggagacattactgatcctcacatttgtgtgtagggtgctgctggcatctagttggtaggggccaaacatgctacaaaacctccaaagcaaaggacagagcagacaaagattcatcaggccccaaatttcgatagggctgaggttgagaaaccctgacctagagtttgtcaagaacatttcacaatccaaatcttaatccttcttaagctccctggaaatttatatttataaaataatgggaaactgaatcatacaaatagaaaagctcgatcaggaaaatggtgcttggaaatgcttttctatgagaagaaatagatgagaagtgaatgagaatattctattcttttgttgttcttgtttgtgtctcttttttctttctcattctctctgtgtctctctagtggatgctatgaaaaatgtgtcccacattcacactacatgctgcagaccacattatttaataacgggagtctcagcagccgtcttcagtagtgttcgtttaattttctattaagattagcatattacttatggaggggttttttttggtattatatttcatgatgctttgacacgttgaggccttgctaatcctggagagactacctctcccacggctagctaattcctaaaaatagcaaataagagccaggcacggcagctcacacctgtaatcctagtgtgttgggaggctgaggcgagcagatcgcttgagtccaggagtttgagaccagcctgggcaacatggagagagcccatctctacaaaacatagaaatattagctgggtgtagtggaatgcacctgtagtccagctactcagcaggctgtggtgggaggatcacttgagcccagaaggcagaggttgcaatgagctgagatcgcgccactgcattccaacctgggtgacagcgtgagaccctgtttcaaaaaagaaaataaaaaacaagatagtaaacaatttgcctgtgtatttgcctttcgtatgcaaaccaaccagtccagaaaccatacttccagtcaccccctttatctaactctcaccaagccagtatttctttaccctaaatcatctcatgaccaagtaacagatgactagagacaccgctagaacccactgaagttactcaaattacccaaccttaagcttgctcactgaacttaccctatcttgtccattcttccccagaaaaccacaatacaggcttttccaggctttttccttgtctttcctgcctccctgagagccctggtgcttacccatgtggccctgtctgagatacctgttcctagagatctgtgctccttccttcatggcattcacgtccatgtctgcatgcattactataccgcactaagacaaatcctgggtacatttaaaaacaattagcaaccttggggattaaaatgaaagcaaatcttaacaaacccatatttccgatcttcccactagccctctgaagtaaatgtaatcgttcccattttacaaggaagaaactgaggttcataggctgttaagtgtcttgtcctgaggtatatggctggtaaatgattccaacttatatctgttaaactccaagatacagtcacttctatgaagtggactatgacaagtggcatttggcttgctcacaaggcaatagatatcatctccaaagaatagaatgtatgtgctccttaattaatgcttctttaattttctagaatgaatactctttttttcccccttaggtgatgaccatcagcagaacttagttacagagtaactgatgtgggaatatacatgattgtggggaaggagcacagggctgggaatctggtggtttgggttggagttccagcttccctgctgaccaattacatatccctgggcaaactgttgttctcttaggggcttcaacttgctcttctgtaagcagaaagcctgaattatgttggtgcaaaagtaattgcgatttacttttgcaccaaccttacattatttttgcaccaacttcacattatttttacaatttattatttgaacgatcccatttgagataaattaccagcacctctgagacccaaagtgttgtagagaacgtaaaatttatgacatgtctctccaatccatagagattagtagtttttacatactggttcatttttctggcattactaggaggacattcattgtaggttgcattcatttattcaataagcatttattgaggaactgcttggtgccagttaattggtgtgaaaaagacatcattcttgcgtatacaaataatttcaaatatttctgcaaaaggctctaacaaacatttttacaaagtgtgtttttgggtaaagcacctagtggcttaaaacctcaggttcttcatgtctgaagtgggcgtaagtgcctatttcagagtgttgttgacaactaaataagacaaagcatataaagcagttagtgtatcagtaagcactccataatgttagcccttattatagttttcagaaggaggaacagctggctgccaagattagttatggaaaacttttggaaggagatgatatttgatgtacgtctttaaaaaaataaatagaaattcaaggtgaaaaagaagggagaaagaactccatgcagggaggccagcgtgcacagagcactgagaggtggctgtttagaaaccaaagtgcagggatttgtcctttttgttctttctccttttccttttgctttagcgctagacacaggggctcccacctgtaatcccaacatgatggtgggaggccaaggcaggaggatcacttgagtttgagacaaatgtgggcagcaaagcaagactcccatctcccaaaaaaaaaaaaaaaaaaaaaaaaaacaagctgggcctggtgatgctcccagctactcgagacgctgaagcgggaggatccctggatcgcttgagcccaggagctcaaggctgctgtgagctatgatcgtgctactgcactccagcctgggagatggagcaagaccctatctctaaaaaaacaaacaaacagacaaaaaactattttttattgcttaatattttattaagataacatcataattgatatataatatatattcattacatgtattatttgtatttaatttgtctattatgtttaaagttgtagaataggtatgtgtaatattttattaatatttcccctttcccatctgcacaacacttgtcaaatatcccaagataaatgaatttctttaggattccctggcctctgcagacagtgattttcttaatctcattttttctcaagaaggaagaaaaggcaataatgtgactcatgttgtttgttcccttccagggctgtattctccagtcttgtggctgcctctagtacttggtttggttgttagagtgagcattatttaggcatggtttgtaatggttccctggagctatttgtggaagagcttatgtaataaaatacataattatgaacttgttaaaagagacattatttactcatttgtccaacatggctcctttcagtctacctcataagtaaatctatatttagtcagtgtcatattgatctgcaaccagagtacactttaatgctcctgcagaaatacgccataaaaaaaatagcttgataagaaaaattcactgcgggtctcatctcatttgaaaacggcagaagaagaaaaattatactttcttttccattgttttccctttttttaagacaataccagaaaaatgaactgtaatacacagttctgataatatcactgtagagaatctctttataaatgtcatgcattttatgaaatttagtgttagaaaataaatgactaaagattacataattgttggatctgtgtgtgaccttaaatgagtgttcattgtaccattttttctgtaagtttaatttttaatttttattaattaattaatttatttatttactgagaaggggtcctgctctgtcaaccaggctggaatgcagtggcacgaacacagctcactacagcccctcaacatccagggcccaagctatcttcccacctcagcctcctgagtagctgggaccacaggcacatgccaccacgctgggctaatttttaaattttttttagagattggatcttgccatgattcacaggctggtctcaaactcctggtatcaagcaatcctccctccttagtctcacaaagtgctgggattacaggcatgagcaaccatgcctagctgtatgtttaatttttttttttttttttgagacagagtctcgctgtgccacccaggctggagtatagtggcacaatctcagctcactgcagcctctgcctcccaggttcatgcgattctcccgcctcagcctcccaagtagctgggattacaggtttctgccaccacgcccagctaatttttgtatttttagtagagacggggtttcactatgttagccaggctggttccaaactcctaacctcaggtgatccacccgcctcagcctccgaaagtgctgggattacaggcataagccaccgtgcctggcaaaagtttaacattttaaataactgttcctcagcactgcccataatttaggtaaatactacttagaattagataatttaaggtaaagaatatgtcatatatacatgaaattgtattagaacaggaggtaaaaatcagagtaaattagaatttgtttaaaacacagagttaaacactgtgagagcagaaattattttataaccaccaatagtacaaagctaagctttcatcttaaagttgtatgtttgcatgtgaaatcatgcagagaattactttagtacttaaagaaaataaaaacattatgaataaatgtttatttatttggtacttaaaatctaaataccttagcacaagtggaaaagctctaactacaaataccagggcataaaacaaatcctacattacagttttaaaatgttttacagcttaatactgttttattcattgagtcagaaatttccgtgtgagtacgggagtttacacttgtaaatcagaaaccgtcgcagttaattttttcactctatggagcaaccactttcgtctgtgtgggagtgttggtctactgtagctgaaacagacaagactaggccagtggagacattaaatgtggctgaaaataccactgatgttcaactttccttcctatcctgtacttatattcaaaactgtcatttggctcatgggtttgggtttttgttttggggttttgttttttgttttgttttgttttctgcacagcctagaaatattagtaatcttgctgcttctgtgccctaaaataatactttagttgcctaaaataacaaatgaatcttttgagaagagcttatttatgtagcaagatactgattagggtatttattggatacaataactaagattaagtgcctgaagatttatgtatcaggaacttttcaactttgactccatccaaaaatactatgtcagtataagaacgtaaagaaaaatgcatttaccttttgtctcatagcatagaaagcaaaggttatttttgtcaattatgagtaataaaaaataagtttatttaaggtatatatttacatttggagtgagaggatgataagaggagtcatttgaagggagtaagttagctagaaaaaaactcagtgtgctactgatagcacctgtgcatggacagaggaattagtatcattaccaatttacagacaaggcaattaaatgagagaaggcttacgtggtctgtccaaagttaaagagttagtaacttgtggaaccagtattcatcttaagctttggcttaaagaccacaagctcagaatcggtcattctcatggccctattatataccaacagagttcctgaaaaagccaatgcaatttccagagagcaatttacaatggggagaagagtctagcccaatatggcacataattctgtgaaacattggatgtgtaagaaatttatcaatatgctctttatattttacacctaggagatgtgcacaaattcttggttaagggggctaattaacgatgtcttgaagtgaacattaaattctctcctacacacatctcgttgtctaaaaaaatcaatgaggactttattagcacccttttttatatccaattctgtaacctgggaaggtgggttctgcccatcgactaaacatggtaggaaacctgttttcttatttgtaaaaattgacattaatatcataggcctgttagtcccatactgagatgtaccagcaaacaaacttattttttttcaacatctcaatctttattttgaacaagtcatgatttcttttctttcatcaatatatatgagaagcttggcctgctatggtagtctgtgacagctaaagcaatcaacccctagccaagagtacttaactcttttctttgttgaactgctcactgatatgtggatctaggaaagtcatttctctgaagctcattagtttccagggtaacatctgtattacataccacatacaaatattattatcatcattgttaattatgtgaagtaaataaatttcccaactgttctaggcattacctaaaggacatggaatcactgggggcatgtaacatttaaaattattgggtgtctaaaattgtttaaaaccaggaaaaatatatagttctatttgcacttaactatttaaagtgtatctgctgcttgtcacccatatcttaaccttgtccattgatgtcagccatattcttcaaggtgtttaaatagcttagaagcccttcaagtaatcataataagctaacacactttgaggaaacatgtgctgattgcatgatatgtattatttcagtgaatcctcacacactttacaaactggactatcattatctccattttagaagtgtggaaatcaaggcacagatacgttaactattaagtcaatgtcaaaactactagggccgggcacggtggctcacgcctttcatcccagcactttgggaggccaaggtgggcagatcacaaggtcaggagtttgagaccagcctggccaacatggtgaaaccccgtctctactaaaaatacaaaaattagccgagcgtgatggcgggtgcctgtaatcccagctacctgggaggctgaggcaggagaatcacttgaacccgggaggcagaggttgcagtgagctgagatcatgccactgcactccagcctgggtgacatagcaagactgtgtctcaaaaaacaaacaaacaaacaaacaaaaaatactaagtcctggagtcaggattggagctgtgctcttctcttctctttctctctctaacttgaaaggttttctttgtttagaaagatacagcatgactaaggtcaataaaaataacaaaaataatcattataattataggtgatcgttctcaattgggcagtttaaacagtgtcttgtaaaattttaaagaaaaccaagaactttatgcacgcttctgtcagttagcttttgctacataacaaagtactccaaacaaagtggtttagaataaaactaaccatttatttgttcataatttttgggatcagcttttggggcttaaatcagctgggtggttcttctagtccccactgtgctccctcatgcccctgtgggtagctctcgggttggcagagggccaccggtctaggatggtctcacctgggatgggacttgcctcggttccatgtgttttgtcaccctccagcatcccagccccggctcatccacatgatggtggcaaggttagattgagccgaagctgtggaggtctcttgagacccacatttggaattggatgacatcacttccaccacttccattggctagatcaattcacaggatcatcccagcctccagaagtaaagaaatagactttacttcttgatggagatgctgcaaattacattgtaaggatcatggtacagtgagggaagaatggtggccatttttgacagaataaatactaccaactttagctgtgaaatatttttaagagttatatggcaatatacattttctgaaaatctgttttgttctattcacaggggttaggatggtataagtattctttaattgcacaaatatctgtgattagaaaagccaaaaatattgtcagtctcttaggatttgagttttggactgaagttatctaactgtgaataaagataatcctgcagtaataatttcatatttgatttatgtttctccataaagttacctcaggcattatccctgttaaaccaaatttaatagaacttcagttgttctgttccaaatgcttgtgcatatgtggagaattcccctgtacagttgtactgactctctcaccaagggatgttcgttcttttgtgagtttgttctaattgtgtcattcactgtattaccattaattagcaaattcatctttcaacttcactcccatgggacagattcagtcaggcttgggtaggtagggaatttaattaatatatcaacaaattgaattttttattaggtactttagttttatctttttttatcttggtattatatattagaaatcttatttgaactggagttacctaaagttgtttttattaggtaggcaaagaatccagctatttctccccaaaacactatatgaaataaaatatgccatcaatgttccttttgggttattttcaagttggccctctatctatttacatggattggaaattttttttcagatttaaccttcccgtattgatggaagaactgttttatagtaaatttatcaatagttgaatatataaacaaccactattcatgggttaagaacaaagggcatcagtgtgtgagaattcaattcaataggactaatctcaaacgcaattaatgctctcattctttctgtgccctttggtagtctgttctcccaaggaatttattgaaatagatacacttaattaaactgttttcagcacttgggctaagacacaatttaaggtgtgacatttcacttaaagaaaaaggaggaagtctattctgaataactgtttaaacatttcaacctggccccttttcttaaagatgtgcaaaatttcaggtagtggaaaatatttgtcaagtgttctttcttctccagctcctacttgtccacacgtacacacgctcacgcatggacacacagcacactcattacttctaaagtttcctcactgtattgttgaaaagttttcacagtatgaactattatgcaaagtaagcagattagtgcagtgaattggagtggtattttaggttgataaaaatcagttccactcccagcttctaactggctgcatttttttttcttgtgaaaataaagggcttctcaacatcaccaatcagttctacaatcatctgcttctatgaattctagaatctgattttgtcatgggctttatctgtccaggtttcccaattcatataactgtgagcagacacacttgccctaaaataatcatttccttatgtataatttttttctatatgctatgtaaataaatgtatgatatacatatgaagcaaaaggaaataaaatgtgaaaacaatgttccttcagtgctcagtgaccctataacttgcacaatagcatagtttacacattgcaatatcctgacatatgtctagacatatttaacaacaaatatgtcctgacatatttacatggagggatccaagctttcaataagaattaccaggactttaaagttacaaaactaaccaccaatttattacatttcattacattgaagggaaaaaaatctgtcctcaagaatttttgtctcttttttatggaaaagcatcccctttttgaacaaatagacacttatttttatattacattttgtgcacaaattttagttttattttgctttcaaacctagacttaatctggaaaacatcaaaaagaaaaggggtacatttaacttcgttaatagtaagatataaaataaccatcaatatttccataataacccaaaaagtgttatcaccttaccacactgatatgaggctgcgtatttcaaatatgttttttagacgttagttcctattctttgtcataaaagacaaacatgtcagatatgaatctgtaggaagagtgaaaaagggtcaaatcttttccaaatgtatcttaatgcttgttaaagtcactgttttatctttgtaagttcctgcactgcattcctcattgtattcatttctctctaagcaagctaagaaatcttttgttttgttctccccttcaaaagtgttgacttctcctaaggtatcaggtaagaataacgcataattacctccactgtgacatggttattattttactttccccattaacacagaaggaaactgaggaagaacatgacttgaatctaagtcataaacttcagatcttgttgggattttgttggttggtttgttttgtattacaccatgaaatacacacaagaaagtacttcacattgtgcaaaatactatgtaaatatcaacagttattattataaattttgaaaagttgtccacattcttactaattcctagtctcttaccttacctttttaaattaaccaaattgatatgagaatcccagtctgagactaaatgtgacacatagaagacttccaagagtgttcaggcccctcagctggcagggaacaccagcatctggtctttgaaagttagttattcacttccacgtcttctgttctgccagctggtctctggagctggctcattcacacatagtggtcagaaccctaggactccactttaaaaagcctcagttcataaactgtgataagaccagcctttactccactccagcccaaacagtctataaactttaacagagagaaaagcaaaaatgtttcaagtcttctcttttgttgtaattgagggtcacttcataaggacccagggaggtctcctctaagaaacacaaccttatgtagaagctgaagaattgggatttaaagtcagaagatctgggtctcaaaccagctttatcaaactacttaaactctctaagcctcagttttctcatcgacaaaatggagatatcagtatgtaccctgcagtgcccctgtgcacattatagacaccagatattaaagtcactccatatagaatagaaactaccattatcaccttttgcaaattcagaatctgagtttgaatttttctattgaatgcagtgatccacactttgtagaatgaggggacagaataacaagtgggaaaccaatgtggtcccaatgtcagtaagtacagaattcaaattagccaacactgtgttttattttattagtattatctacaccaacacttttgtaaacatgagcatattgttatgttcaataatgttcaaaacttatacctctttctgagccttaaatcaatgacctcaggcatatttgtatggaatgttgtctctttatatcccatttcaaaatggcaggagattgaaacaggaagtaaacagacaataataaatgggaatctatatgctaattgcagcccatggtgaatcctggaatgcatctttctttgagagggcatgacagcatcccattcatctatacggccccagcgacagttgggtgatgtaactactacaacagcctattagttattctgtctcatcattgttcaggaattttgaacactgccttcaatggaaaaattcaagctcaaactatgaaaaactgctatcatcccctctaacagaacaaagcatgtctactgtatcctgtgaaacattaaaaagaagcataaataaagcaagtaggatcagtggttaagagcacaggcttcggcatcaaggagacaccagttctgatcttagctctgcattaacttacattgtatcctagaaatgacttaatctctcaaggccttcattttcttatctgtataagggacatgatacaacttaccttgaggtgttgtggagagtaaaagacatatttgttagtgccaggcacaatagcacttcaccaatatgagtggttatcagtggttgctatttaaatatgggataatatttctttctcactccataatttaaacacaagcatgtggtaatggttctatattgaattttaactctgatttgtattctatcagagaacgtgatagacacataaaatgctctcatttcgggctgctgagattcctgaaactgctattttgtaagtgaaactccagtgaactgaaattgcttgataagatcaagcaacccttctgactatgagagcccttttcctcctgtaaaatgggagaagttaagcattttaaggcagacagcatagctgcaagataatttaaaagatgggtagttggttctgctcctttacttcatacaaaccaaaatcaaactgtccattcacattgtacccaatgcccactttggataagtgatacagaagcaactgcttgaggctgaatctttcatgaggtggaagaggtaaaaatggcagggtttgtttggggctatcaagacatcacttctttgacaaagacttgtagaatcccagtgcaccccgttattctgcagctacagctctctgctctaaggtgagctcgaatctacttgttaaattgttttttacagagtttgcaactctttctgatgtgggccttgcaaaagttgtgtccttttggtgaccgtcctgtacccccaggcttctgcacctgctgcagcccttggtaacaacacagcttggcataagttctacatctagaagctcagtgtgccagaggcaaagattttcctgagagacctttgattccccagcctttacagcagtggctctcaaactttactttgcataagaatcaccttgggatactctttaaaaatgcagattccatggcattctcaacctattccaattcagttggtctggggtagaattctagacttcgtatttttataagcatcacagtttattctgatgaaggtggttactctggaagacacctggagaaacgctatagtatttaaaaaattcctgatttctaaaatatgtgatcatttaaaaaatgatatgatatagatgataaatagcctcatagcctgaattgattcacatatgctaacatgtgtcagaagcattactgtgtattggtgtctttaacttcctttttcaaatatgtttgggggtgatagagtaaccacaacggcaataacatgccctttaaaagagtcgactgcttttcaagcagagatatagatattatactgagagtaaaagctcaggctttggagaattgatgagagcattttctagttatctgaccctgatctgctatttcctcatttacaaaatggaggcgaggacttcctgactatcaagggcctgtccctgggccctggcactttttaggtactcagtgctagtacccacatgggtagtagggacagttacaagaggcactgcctctgtaccagacactaggggctctttacacccaacttttccccatcattctgtgcttggcaggcttagaaacatattgatctgggaagttcttcacattatctgaactcacaaacttttacttgaaacactagatattagaacataatttctaatataaaaggaagacacaccaagccagtgctcattacagttatgttatcaagcaaatgggctcactgccctgatgtgcacagaagccaatactatgtgacaccaacttttaagaaaataaaggctttgttagcaaaattggtcagcaaggagacaggagcagacacaaatctgcctcccctgatttggggtctcgtttcggaaggcaagagaaaggaatgatggcttggcaggatctgattggaagactttaaattttaccatttccagaaaggtatgttgaggcagattttagaccctgattttctgggtcagtggatacctggcttccaaaagtttgtcattcaggttctgatgatgtcccagtcttattggttccaagaggaggattcattggtttcaggtgtttaattagaagtcaaagttttttccattgcgcatgcctgaaccacatgacttctggtttggggctctgtaatacctaaaagataactcaacattttgttatcaacagagtaggtccagtttacagctagatttctgtaccaatgaggcagagccacaaaaagaagagttcaatcacatcaacagtcagatgaatttcccctaccattctggagatgacagatggaaaactatcaccaaacaaacaggcccagcacaacccctcttccctggacacagggccaagaaaacactggcttgttctcacatacgttccaagtcctcttcattccaaactacatgagtaccatcacccttcatcataggagtccagcttgttcaaatcttctgtattgcttactagagtgagaagtgtatgattgtggtaccagatctgaagagggcaggattagcattcttctgaggaggttcaggatggaaattacatttgcattcattgaaaaccaaagcacttcaatattggtatagataacaaaggagagagaaacagagccgatctatttttttttccaaaaagactccgtaatactttgctagactctgtaataaagtaccacaaacagaggggcttaaacaacagaaacttattgtctcatagtcctggaaactagaagttcaagatcaaggcatcaacaagggcatgctctctctagaggtagtaggggtcggttctaggcctctcttctagtgattggtagttccttggtttatggcagcataacctgaatattcacatggcattcttcccatgtttgtgtctgtgtccacatttcctatgtcaataggacactagtcttgttgaattgggggcccataataccctaataagtaatggcctccttctacctaattatgtccacattgaccctaattacattcaggtcacattctaggaaactaggagttaggatttcagcatatgaattggggcagggggagggcataattcaagccataacagactcttatgggcacatttataagaagatcggttaggacccaaagttttgtgttgtacaggaaggtgactttagcctaaatttttattatttgtgcaacaacaaggtggctttagccaacaatttttttcaaaacaagtattatctggtgactaccatttctataggcgtttctctgtatgacccccatggaaatgtcttgtttttaaaagacctatatccataaacagctaaatgacttgccctgatgagtgggatcatataatattcaccacttaaatggtcctgactttgtgtaaagattgattcctgaatattttcccagaagtaaaccaatcattttaacgtaagtgatatgtcagtcttctaatggagctaataagcaaatgaaactaataaaactgccctaactaaaattatcaaaatttaccttcttgcaaccatgagggaaaaaagcatctctaagccaacttatttttcatagaaattgacacttaaatcagaaatcactgtaaaatgcttagacctcatatgtaaaaggcattacctgagattaagggttagcgcactcacattatgctcacaccttgttctgttcacttgtatatactgcagtatgattgcttttcagttttacttttacactaacctcatatgacagaatcatgtttgaatcctgtgtgtttgacttggaactcctttttgccttcactgaagatttctgcaaagcagattgttaaattctcagtttatctttctggaaaaaaaattagagttttttggtacagactaacaagacttaagatactgtgattaacaagaggaaagctcctaaaataaagctcgaaggcacaaatttaaattgggtaatagtcaagggtatgattaaaaacttgctcatttgcattaattaaacagccattggatatcattaatttatatcaggaattaacaccacagtctatcaatcagaagcaatctaaattaaaagtcaagaacttcctagttcttgaccatgtgttttccttgtctagtgatagggttttttttttgttttttctatcctgtttttctgcccgattctagtggcttaatctattcatatccaggtttttgtcacaaacaaaatggggatattaattctcatccattaccattaagattaatgaacatgtgaaaggcttggagacttgtcatggtcagtgtaagcctgagcctcattcatgttttgggtcaaatgtgttcttctcaaaataaattgagtgataaaagattgttcataaatgttataggagtttggagttgtgccaattataatacaaatctagatctctaaaacattggatctcaggaaaatatttggagagaagtcccagattatatcttgtaggaagcaaagatccaaggatttgatgtaaggaagggctttcttatttttgcttctggagaacatgtcactaatcctagagacacattagggaatgactgggctggccactattttaaatcagttctagttttctgacagctctagtggggtattctaattactcttccttacctgcattgatgactcaagactaggatgatccttagtattggaagggcagctccctggttagattcatccaagaaaatctaatagaatgagccaggaaaattctagatgtatgtctcacctgtgcctggatctccttattcaatagatattatgtaactagactatgaattaaaatcaagaagtatctaacagagaaagttttcaaataagacattttctaatagtccttcatttcatctgcttcttaattctctggctgaaggtccagttcattctgagctcatattaccagtgatctattctccacctgtgctcagctgcattctgacctggcatcagtgcagcaatgcctcaccatcttagttattgccactgatgctttttttaacccaggttaaagctcccatcttccatcaaattcagagatagcccctctaactgattaactcttctttactgaatatgctaggaaacccttaaaatgaagtaaatttgggaaccttttaaagaagaatggctataatttcctcttctcatttaccctgtaattcccaaatcctatttttaaaaatgaccacaaagctacataaagtgttttttaatagtttttaacatgaaaaaagaagaagtgtatatgtttgtgtccatgaatacctaattgcctttgattctccatctcatgtgttatgtaaactctggataaattgaaaggatatcctgttttattaaaaacattatagatactccatcaattggataaaaattctacttgataatgaaataatatgaagatgcagagaatgaaactgactttccttgaggtcattataatctagaacactcacttttcctatttaatctacacactagacacattgctgtgagttcgatatcattgtgctcattttacaggacataaaattgagtctcacaaaacataacatacctaaaatcacatagctacctggttatggaacttggatttgaaaccagatttttctggcactgccattcctttgctattctgccaagatgttttttcctccctgcgtagctccatgaggataaaaatgcaaacatcgtttattaaatatctactgtacacctcacacacattatcatataaatcctccacgcactacaacacagttactgtcattatcatcttacacatgagcaaacttaggctcagatagctggggtagcttcaacaaactaaaaagtagcacagcaaggatgcaatccccagtacagcagatcctcattattcatggattctctatttgcaaattcacctactcactaaaatgtatatgtaaccccaaaatctgtatttgcagagcttttacggtcatttgctgacttgcacagagcagtgctagacatgcatgtttcagctgaggttgaacaaggcagagctctgccttcttgtttcggctgtcacactgtcaacaagtgtcctttttgtggtccatttagtgccattgtttctgcattgatgtgtttttgtggtaatggcactgtttaaaatggtccgtaagtgtagggctgaagtgctgtctcgtgttcctaagtacaacaatgttgtactgtgctgtactgtgctgtgtgcagaaaacatgtgtgttagataagctttgttcaggcacgagttatagtgctgttgactgagttcagttggaatgaattatacagacagagtctttatttttgtatatcatctttaaatatatatatatatatatatatatatatcaaatatacaaggggacttcaaaaagtacatggaaatagaatttaaaataaaaatataaaatataaactttatttctcaacataagttccatcaaggccaagacacttttgtaactgatgataccagtcatttagtccatccctaataaactgagggttctgggaattaaaccatgtccatgcattttttttacattattaagtgaagaaaaatgggtgccctttaaagattatttaagattaggaaacaaaaagaagtcagaaagacccaaatcagaaccataaggtggatggatgcctgataatttcccatggaatccgttgcaaaattgcccttgtttgatgataggaatgagcagaaacattgtcctggtggagaaggactctctgttgaaggtttttggagcattttttctgctaaagcttggctaactttctcaaaacaccctcataataagcagatgttattattctttagtcctccagaaagtcaccaagcaaaatgcctcgagcatccctaagaactgttgcacgacctttgttcttgactggtccacctctgctgaaactgaatgactgccacctcttggtagctattgctttgattgtgctttgtcttcaggaccgtactggtaaaggcatgcttcatctcctgttacagcttttcagagaaatgcttcaggatcctgatcacacttgtttaaattttccatagaaagctctactctggtctgcagctcatctggacacaatggttttggcacccagggagtgtgggaagtttgtccaactttaatttttcagtcagaattgtgtaagctgaaccagttgagatgtctagggtgtcggctgttctttgcctgttaatcattggccctcttcaattagggcatgaagagggcaagattaatttttttcctcaaaaatccttgtggatggtctgctactgagggcttcatcaacatcatcttatgtcttcttaaaaccagttatgcatttgtgaactgctgatttctttggagtattatccccaaaaatgttttgtgaaacatcagggatttcagccttcgtccacccaagctttaccataagtttgatatttgttctttcttcaatgttggcagaattcacattactctcatacggacttttttcaaactgatgtcttatccttcttagtgcctcaaactatatcctattcagacatattataacaagttagtacaagtttattttggtgcaaaaaaattttgaaatccacgcagtgtttaataatatgtatttccatgaacattttgaagaccccttgtatataagaatatatactctttagagaatatagatatatgtaaggtatatatatatgtgtgtgtgtaaagtatacacatatatatatatatatataaactgtatagtctttaaatagaaatacacataaaacaagactgtgtattaatcagctgatgaaaacgtgaccagaggcttgcaggagcctaaatctgtatttcctctaggaccaatgcatcgttcagtattcactaatctggtgtttgcagtgaccttacagaacatattaccatacataagaattggctgtatttgtgtttccagtgggcaagttcttctactacccactgtctggccttacatacattctgtgaattcataatgttctgatttgtgtgatgcacctttgcttttaatttatattcagatttcccatgggtgacggttccctctccacagccctcctgctaaccatcatcactcactcaaatgtgacaccacactgccactctgcatttttgctgagatgaccaacaaattcttaccatcattatgaggaaaacacaacagagcacacagtaaagcaaactcatcaaatatttacttaaattgatttagcttagagcaagtttatatacataaataatttttgcttagtgagagtcagattcagaaatgaagatgcaaaatgtgagacaaaaagaagtgctgggggcagggatggggagagattggtcagcgggcccagagttacagttggataggaggactaagtcctggtgctctgctgcacattaggatggctatagctaacaatgttgtgtttttcaaaatagctagaagagaggattttgaatgtttgaatttccacaaagaaacgataagtgcttaaggtgatggataaactgattaccctgattttatcaatacaccatgtgtacatgtattaaaacattacactgtaccccataaatacaattttttaaaaaaggtacctgaggctcttttctaagcatcttcattcagctattgaattcatacttgggtctaaagaaacaaacacatacatcacagtggcctcctcttactgcatgacggtttcttatcttcaccatgaaccttctggaatgtagccctttctctgaaggagatcacttctctcctgcaaatttctctgctgagaaaaacaataaataaatcagcaaggatgataccctcaacattggcaagggtgctgaagaagctggaagcctaaagggttgtaccatccaggcctcctggagccattcagtgactagagttctgtgaaaacaatggcttgtctccagcctgcgtggcccaaggaaagatgccatgaaccagcagtcccaagacatgggctccagcctggctttacaagccactgattgttctaggcaagtcactgtacctctcagaatcaaacttcttcagctgtaaaatggtggaattctctgcgtgtctacctccagagattgtgttaattagaggagatactaacaactcactgtgtagaggattttgtagtcaacaaaacattattcatacattatctcatgtgatactcacatctgcattgccagttaaatataattataattataattgtagccatttcatgagaaagtcctttcaaacagaaagctactgcacaaatccttgtactataaaaggaaatcagtgattttgaaggcagcaaaaagaagagcgttagtgtctgtaatctatgtaaaccttacttcacgtgaaggaaaaaaatcacttaaaaaattcgtaccagatacactattgtctcttttaaattaaatggattattgcacaaggtgccaagccaaggacactgggcctgaagttcaggtcacactctgaccactaggacattcacctgggtgccaggatttattctaaattgcacaaagttgccatacaggccagtgggggagtaagctaatgactcaagaaataattattactgtaacagccatgagatgcatatagagtttgtgttccccactctataatgtgatctttttgttttaaaaatgattttgttcttacttcagtctggataggctaggtgatgcagcagtaacaaacaaccccgagatcttggtggcatatcagaacaaaggtttatttctcactcaagctacctgtccatccatgctggcttttgctgactccatatctgttactctagaacccaggctgatgacgtagacaccatcttgaacactgccaatcaccgaggtagaaagaaaacaatgaaagagccctggagagtctcataccagcaagaaaaagcactgggctggaattaacacacggtatttcactctcagttcctcagtagtccaactgcaaggagtgaggaagtacagtccaacaacatgcctgcaagtgaagggaaccagaaatattttgcaggtagcacatagcagatatgaaagcatcttaggagttttttcttactataagctcattaattgttccgtgggacaagattgccaaaacagctaatgccaacttaagctgcattgtagaaacatagaatctagaaccaaggaggagacagttctctttctaatgcctgctgcacacacacttatgcagagtaatcctttagggactgacctactctgagagaatgcagcattctcggtcctctgacaccactgaaatgctatgaaaaaatgaggaggtcccttatgatttggggacactggaaatgtgctttatatatttttcacccttaacacaaatacatgtatttattatttttcattagttatgtcaagaaaaattgaaactttatgaagaagaagatgttttttcatagtggggacctcatctgaaaaataactatttctagaaatgatattctagaaactatattttagaaatcttatgcctttacatgagatttttttttgtcttcagctaaaatgacagacttaaaatataataaggcagaaggagtgtgatatagccttggtgtctaaacaggggagactgtttcccagaaggtgaagttatcccagagtaaaacatcctggaaaatgaagaagcttttattttcaccacacacgtacacataggcctaaagaatattctccactcctggaaagaccgatggcctgaagccatcccatcctccagtggggtttgttgaatgccctctccaatacacatatatcctctttggtttaaaaaaaaaaaaaaagtctagacagatgagtttaaaatgagatttttcaaagtgctgttaacaagtgtgggaggagtaaccaggcagatataaatgctggccaatggggattacttacacagaatgtgctgaaaatgaggagtgtttcaagaattgtttccctgctgtattgttggaatgctaaagtctaaatatggtaatgtgaaacactatcatatctggtgggaactggaatatgctttattttacaatcccacaggggaaaaatattttggcagttggatgagaatctgggagaatgaagattcatgctgacatcagtccgaattatgctcatgaaatgatattcatctcaaacacagatgtgtttgatacattgttatttaacatacatttaattattcctttcattaacttttcctaattgtttctaatattatttgcctttggtggaataatcttgttcttttattatctcagaaaggcaggatagggaataatttgatgaggtgtaagcttactttccaacacacacacaacaccttggagggcctggttatcaacggctattttatgtagaaatatcatgagaatatttattggtgtttgtttcaattttggcatccaaccattaatattttaatttccattttgcagtagctgtattaagcataataaccacttgaaacgtgtagcctgaataggaaagaaactacagaagccaaggagtattttaattacaaactccacttcaggaaaaatgccagcaacaagagtatggttgtgcaagtatttagggtagggtagactgctgcatgaaaaacgtttgcagttgggtgatctccccctgctcaataacacaaggttagaaggatagcctcattgacttacaaacaaccagacctgtgcaaccttgcagttccactgccatgtgaaaagcagagataaaaagagtgctgggataatccaggttaaaagacttgaataaaaaagatgacagtaactcacaaacagaaaagcatgactcttcatcccaactcacttgaaaatcaacactttcacagaaggcctccaagactggatgggatctgtttcaggatacatttggtgacagatattctatgaccttttgtgtgagagagaagatgcccaagttactatcagtgggaaatgaacaggaagccagggatggtgtggtagcaggaaaagaacttgagatttggagttgggcagacagattcgtgggctgattttgcctctgagtggctagacaatttggggcagattatttagtttgtctgaacctccgtttttttaatggtaaaaccatactttttcctcatggggtcactggaagatttaaacaagttaccatatgtaaagactgaaaacactcagtaccttcccttccttatctagagaaaaggaattctggaactgctcttcttattttatgtgtgagaaaactggtgactagaaatgcccaagtcctgctccaggtcacatggctggattccctgtgcccaggggagggctttcccatgacctccacccagccccacagtggatctcacacaaagaaatgggagaagaacagatctaactgggacaatctgaggaccctccccaccattggtgttaagattatggacttggccatgaacagtcccatcagtcccatccttgactcctgacacgtgtgccagagacactctcctcacactctagcattctccaagtgatacctggaccatcaagccaggagccactaatgatcatctaatccaagaagggtatctcctcagaacaaaacccatcagtctcagtagctgggcatcccttggctaactacttaaattcccttgacctaaatgatcagactcatctcagaggattgttgagagtgttgcaaaaaatgtacctaaaagtgttcagcatacagcctagcgtataaatgcatagcagataataaatattattttttgaactcttaccattattggagatgacagtaagaataggtaacatgtatgagtgtactctgtgccagacatcataataagcatctttcacttcaatctttccaacaagacaatgaggaaggtgttatttactcatttttcaggtgaagagtctgaagccagaaagggtcaggcttgggggaagggagacagggagattcttctggacattgcctggcacataaggtagcacgtagctacattaaaaagaatgtacagaagcctagctgtgtctccatagccatgttgctaagactttggctgaattgttcactactagacccctagagcctagcacaaggtttggtgtatactagatgttctgcaaagtttcattaatttgttgagtgagaaaataataaacactgccgtgttcacatcattatgttgacccaacagacaatctcagggacccttgggctggtgtagtcaatcacaagggctatttgtagagacagctccccgctgtgaagccaaggagaatccaaccatgaagagagaggaaatattactaagcagaaaattaaaaacgatcctattggctgttggccttggcactgtttctgaagaagcaagttcagaaacatttggcagtccgtgtcatcgcctctcataaaccccaagaataaggaaggcatcagaaataaatttttattttctgattaattttctatagaaaggtttttgcccaccaacaagatacaaagggcaacttaaaaggcatgaggttattaaaaatcaatgctaaatgttgtcatcagagggtttgcttattttgctgttattaaaaattcacacaaattgggcgaaacattttcagcctgaaagagatctcggaaaatggctttcttatcattaaaatgcaagctaagcagagtgatagcaaatgatcttttcctatgatcagtttttcctaatcttggggtcagaaaaataaatgtcagaggaaataatagactttatttaataaaataaaataaaaacaaaatgacctggctattaaaatgaaaacacaaaaaaaatgtctgcttgtgactatgtgaataactgaagcttcgttttaataaaaatttttaaaaagtttttcgactcttttattctgatcaaaaaagaaaaagaaaaagaaaaatcccaaaggtccaaatcgcaactctatttatctattgtaaaccaacaagagccgaccatgttgagagagaagacaggagaagtgttagctgtggtgaatagagaatcctttaaaacaacaccgaaaaatatattttctaagaaagcaaagatctctgttgcagacatgtttcttaaccaagatatagcaatagcttctttaaaatctacttctcatgtactgactaacccattcattcctaaaaagtattcctttcatatgaccatgtttagcttagttctcactttaaatttaaacaaggactaatggtactccaaactatttgctttctttcagtctaacccactccttaaggaaacgagcaggagagacatgtcctgcaatgccatggcacgtgcgcacaccccagaacacggagcagtgctttcatggtcgcctgccacgtcacacactggcactgacagaaatagtaacaacacaccctctttgagacagtgattgctttagatttttatacaacttgtttaaatagaggaaatctaaatttttaccaaagcaattgccccccttcaggaggtgggttttttttgggggggtggggcagggtgtcaaagaatgtttagttcagtaccttttctagaagccagtacagctaaatctataactttcctattttacatatttggtaattaaaaaccaagtgtgaagagcttatggattttattcaacgatgacatatttttttagattctgtaatggcccataaatttgcattaatgaccacctgttccagaaaccttggaaacaggaggctggaagaacatccgtgagtttttatgtgtctcggatacctgactctgggccaaggtggaggccttggaggagtagaaaggactctagtgactggctgattgttaccatttttggccaaaagaataagtcaggcaccagaatgtgtaaccaggtaatgtaattatggttaatgtaaatgtcacattttaaatcctgtaggaattcacaatagttcaggttttataacttttttttttttttttttttttttttggtgggaccaggaaacatggaactgacttgcacgggaggtcagactggcttaatttgtatttcctttcaaagttgtgtgagatacaaatatgcaccacaatgtacccatcactgtcttcttaaaaacttgtagggaaacaaaaatatgagaaattgcatcatatttaaaagcgctagaggaactgactgtataaaggaaatttttttggatggagagaattatgtaaagcccagctctaatgtagatctaaaaacaaacaaacaacaataacaacaaaaaagacaggcctaagaggtgctaaaaaattgggagccattaatcttattgtcaataaagaagtaactcataagcaaatagctcctaatttatctcttttctatgtttaacccattaataccatcccccattatctgctctttcacttttttggtttcagttacccacagccaactatagcttgaaaatattaaatggaaaattccagaaataaacaatgcatacgttttaagtttcccactgttctgaatattgcagtgaaatctggcaccatcccattcagtcccacgagggacatgaatcatctctttgtccagcgtctccacactgtcttccctcccctggtgtgagtcacttggtagccgccttgattttcagattcgttgttttggtgttgaggtgcttatgttcaaggaacccttatatttcttaataatgacccaaaggtacaagaggagtgattttggtttattgttataattgttgtattttattcttagttcttgttgttaatctcttactgtgcctaatgtacatattatactttctcatagttatatatgtacagaaaaaaacatagcatatataggatttggtactatccacagtttcaggcatatgctgagggtcttcgaacataccccccagggctaaggggggactactgtaacagtacgtcttctagcagaggactaaattttagaacaactggaagcactggcatttgaagtatgagaaatagtcagggcgaggtgtttatttgtagggcagtaactctactagatcaaaaccatggcctacataatcttatttagtcacacctcatttcccctgcaatgctgggagacagaagagacatctggggaaaccgaggctcagataggtgattcaaagcctaaatgctaaagccagtattaaaccttattctaaaaatcattccatttatccttctgaagtttctgtgagaaaagggtaaggatgtactgtgaactcagaagtattccatgtttacaggtataactaaattcatttttattgtatctgttgtattaatactagggtatcaataggcacaaaattctcatggaatcagacaccagaccacctcatgatcactggaagatgtttcttttctacatgtaatactgaagctaaaaattagtttctgctactgaaaatatgtctctgttgaacaaaaggaggccgttcttttgtttgctttttttttttttttgcaatatcactttactgtgacccaagaacttaaaaaaacaagttaatattatcttgtcattctgatatgtccagatagttagatctctttaaagaacttcttggacccttaaagcttgttttatgaactatggaataaaaattctggtattgacctattaactctttttttccagtgtttcaggaagtttctcttcctcccaggaattaacaggctatcaaccagacgcaatagaaataaggattttgtggacaaaagctgtgtgttttaaaagtcagcatataccacaacatagataaatcttgagggcattattctaagtgatataagcaaatcacaaaaagacaaatactgcataattccacttatatgagttatgtaaagtagtcaaactcatagagacagtcaaatggtagttgccaggaggttggggaaaagggaaatgagttgttcaatgcatagagccttttagtcatgcaagatggaaagttctagagatctgtacagcaatgtgcatagagttaacaaggctgtactgtatgcttaaaattgttaagggagtaaatttacgttggatatttttcaccacaataagttaaaaaaagaaagacagcatgataaatcctcaggatacctgggcacaccttctgagaacaatgttgaactggagatcaaagagtgagctataaagcactacactccagtggttctgatatttcaagaccattttgaactcacatcaggtataatgaaccaaggacggaattttttaacaatctctgggagcgtctctcacagttcaacaggacatttcagaatatccattccacaagcattctccaaaaaaaagaaaaaagtactaactttgatttgttgctaaatgcctaccatcctcattgagcggccttactttaccagggccaattgatccctaaggctctgcagtgttcctagggaaccttgataaacattattaccttgagccacaggggacatacaaatgagaaacactaatttctatttgcaagaaactctgattagcaaatgaggtagtagagtacacatggatatttcctgattatttctctaccctatgccaaaaaattttctgggacaccaagactcaaaaacttaaatttacatattcaagctctctgaaaaatgttatacagcatcctacctcctaatgattctttgaaaatctacactggtccttcaactctttgggtaaaattgaatccttgggagaaagcagtgatagtggcacacaatcatattaaaacatgtagaaccagtcaattagttgcagatttgagatgttaataagatcagagattcgctgagaatattgaagctagaagacacctttgaggtcaccttgtccaatgtctccattacacaggtgacgaaactgagaccctgagaactcttcttgtccagtattaataacaactaaagaagggattaatttctgccaaagtgtttacgttagctcaactgtagtagcccctggctgcttcttattaaactattagtttggcctgaaatttttcttggttcctgtttatgggggagtttaataactgctatctgcagtaataagagatataataatgtttatcttcttatttcctctgaggatcttggaatgtgtttcatcattaattaaagaatcctctgagtccccctattagataaatattattagccccatttataaagaaaatgaaattctgagagattagttgacggagcagcagcataccctgagttaatgtttacagtggatgttctataaacctgtaatcagcaggaactttgtgatttcctctgcaagtattttagtccttgaactaaaactcagaagtcgatattcagctattgctttggacaagaattgtgttaagagacaggaactaaatattaagactagggggcttccaggtgtatgagacagtgcctgttttcagaacatgtagagacatcaagacaattgcataaaatgctaaaatatcaggtaaaaatctgtattctaaaagaaatgctatgaagattgaagggagtaagaatataaaccaaggtgaggcgatcagggaaaactttaaaatgaaagtaactttgagctggttatttaaagatacaaaatataccagtggttagattttggggcattctttcattcattctacaagtatttcctttattttcacttcttccttctgtaagtatttcctgagaacatactacagggtgtcgtctaaactctgaggtagaaaaagtgaggcagagaaggcaagaatggagacagagttcctctaacatccttgctttcccccagggatatgcaaagaaaagcagaaagcttttttttttttttctcctgaaaattttgggcatgtaaatagcctcaggcatgtcaaaaactagtgaaaaatgaaacttgacaagaaggttggaagcaccttgttcacaggccttaaaggcaaggagtcaagtcatattgctccaagagtaataaacaggaggttaaaaggacaggaaacaagatgcaagaagttagtggttggctttgctgcctgggtagcaggatgagaacttgttccattatcagctgcagaggggcaggacaagaagtgagctgaggtagaaaaagactacagaaatggattaaaatggaattggtacagagaagagcactaggaaaaagaacccaatgaatgaagcaaggcttttcaagtgcctgttttttcttctttccccctttcttcctcccttccttccttctttcttttctccatccttcccttcctttcttccttctcctcttccttccattcttcccacctgtaaatacttactgagtgcctcctttatgacaactacacctgtgaaaaacagcagatcttagacaacaaataaacagataaataattaacacattcaacagcggtaaggtctctttgtaggtgggtggcagcttggattggataggtagcaaggagctttctgagaaggtgatagctaagtgaaatgtaaatgacaaggagccactcattgaacaaggagacgaagagcatttgccctacacagaggaaccatatggtgcagaggccccaatgtgggggcaagctaggagtgtctccataacagaacgaaggctggtgtagtgaactagagtagaaaaaggagattgtgaataaaaaaacgtaggtgggctggatcgtgcagggtttgtaagccagcaggatttgtaagccagggttataatgggaagccattggagggtttcaggcagtggtgtgaacatgacctgatttacatttctaaaatagcagtctagatgttgcagaataatgagcaaaaatgaaaacaaggagctgagaagagatgctcttgcagtattccaggcaagagattatgctggctcgaactaaggaggtaatcatagtgatgaagagaagtgaacagatgcaggatagtttttggaagaggaattagtagaactggaagatggatttcctgtgaaggttgaggagagcaacgaggtagataaacatgccatttaccaagatggaggaagactgagggaggatctttgggggatagaaataaagattccttttttatccattttaaattggagacggcttttagatgtccttctattaatgtcaagtgggcattggataaatagttctggagttcgaggagagatcacaagtagaaatctggattggggaatcattagcataaagactatatttaaggtcaagggtctggatgagatcccctcagagagcctatagctagaagagataatgaggtcaaggacagagcccttgtgtgctccacattctgaatttgcttagaagctggagaaaaaagtagactgcacatgagaccagaggtggaagaaacacaggatacatggtcaccattgtcttattagatagaagggcacagtgggctttcaccacgaggactaagggagtagagttactccattggagggcacgttggccactacagaattcacctggaggactcagacacaggataagtccctgaatttaacaattataagaagtcttttgagaaagcagttcaatcatatgctgaattttgaagccagattttagggagctttgggaataagcaccgtgtgagaaagtagaagcaaaagatataagcgagggtctcccacagtttggggctgacacatggcagtgagggcgatccccacttaaggagagatgggttgagaaaggattagactaaaacatgcttgtagaggtaaagaaaggagattgggagaatctcgatataaataaaactggggacgacagataaacgtagattgctgagaagctgggaggggtgactggagcaaggctggaaagcagaacacaacttaaaaggtgggaaaatgccttttgcaaagatcattcataatgctatagtttagcctatgtttggctaaaataaagattgttttcacacattttactgctcttaagttaataacgtgaatacaacgcaaaacatttatcacacaccagattttactagcttacaatgtaagtggtggaagatctgggaacagatttcagaataatttcatgcctagattcttcctctacctgtttcctcatttagggggcccttctcggtttaattgtctccagctgatgatcaattaagcaaactgattgcagttgcatttgatggcagagcagcattgtgaaaaaaacatcatgttggaatctaagctatgaagggaaaggtactagacaacccacagtgtgtcattgtcacgagcaaaggaggagtcatttcctctctactcccacacatgtggttaaataatttgtatttgagcataactgtttttctgtgacaactggaatagacaccgtcattgttaagaataatcaagtcaaggaaaaatgtagagcaccacatgtagatgattcttggaatgattttagtaggaaatagaggatttttaaaacttttttaaaaaatttctcattttagatacattttagggcaaacatttcaggtatagaaaataaatgcttcaaagcactctcggcattagagtcattattgatgaagtcattatgtgaattatgaatttattcttgcgaaatgatagtttcctgggaatcttacctccaagttaggaaaggccaaagttaagcgttgccttgctagtttaagccagttgtttaggaattctatacaatatctagaaacaaaaagctaaacattttaaggtattaaggcgagagtgttcggctctcaatccactcagcttccctcttggaagatcagctctattcgcctttcaagtgtcatttgtggggagatgtgttgtgcaaaggagactcctgggaccaatggacccagttttccttaggaagtgatgctcacctactttaaaacagcactgaatggaaaatcaatcttgaaggctgagagtgaagctgagagcttaaacttgactctaggtatttgagggtgttcatagaaaggggccagctaatagcagagaggcatatttttgtaaactgaagtaggatggaccctctgggatcatgaattacaaaaaaagttccccctctcctgccacactgaagggtacagaacccagctagcagaaactgggctggatttcaccccctcctcacctttgcacagtacatgaacagcacagccataggcaaccgccctggggctgactctgagctcctctgggtaaagaagaatgctgcctcctcagaatcaaacacacagtatttgattactttatcaattttatggaacttggcatcctccagacacatattcataatcagattaatatttttacccgagagggcctccttgtctccttctggagacactcaatggccttaaggtctaaagccgtaaggataaaaggagtggtcatggattaattcattcatttaaaaaataatgattgagtgcctgctttttgccagtcacagctgtagaagttggagaaacaacagcaacaatgaaagcaaatccttatcctcttggagtagatattccagtgttgggagacagaaagtaaataaaataaaataaaataaaataaaataaataaaagtcatacaggtagtatttcagagagtgatgaatgcaccagaggggaacagagcagtgaacagcctaagagtgtgggggcacagcagtgaggccagtgctgcaggtgccgtataagcatgaaggagagagcagaaggtggaattacagaggaagcaggtcttttaggcacctgcaggaatggttttcctttgggccagctgggaagctcctgagggtatattgcacaagggaaggacttgactaggttgacgtcatattcttgctcttgagctgagtccaccatacttgggaaatggcaggatgaacaatgatggtacttgagctgcatgtttgtgtgtccccaaaattcatactaatcccccatgggatggtattagaaggtggagcttttgagatgtaattaggtttagatgtggtcatgaggatggagcccccaggatggcactggtgtccttaaaagagactagagtgcaatctcttggtcacgtgaggatacaaagagaagatagctgcctacaagccagggaaaggtcctcagcagacagaagatctgccatcaccttgatctcagacttcccagcctctagaaccacaataaacaaacatttgttattcaagccacctactttatggtattctattctagcagcctgaactgactaagacactatggcttggaaactgattgtcggctttttttggaatctgaaaattggattgcatggctttctggcatacatttttggtcttaaggaagtcctgcctccatgagactgatgatcttatgggactcattatacatattttcacatttgtagtgtatatataatctagatgagttttcagatgccacatatctgtgagcagaaaaatggtaatcttgtcattgcacagtgcagagatggtgacagcaggttctgcatttttgtaaatgtctggaattagccatcaaagatggccagagactggttgtacccagaagctaaaacagaaaaaggagggggctaggttgccttgtttctactctatctgtattaacttccaaagagtaaaagaaatatgaccaggcaatgtgaagaaaacccttttagatcccttctcagtgtaagacagattttggctttatctctacccctaaatgtgaatgagtgacttgaaatgttgatcacaaattctagacaacgagatgtaatttcctgacccctaagtctttgcttcctgaatttctttttttttctttttaatgtatttttattctttttttattattattatgctttaagttttagggtacatgtgcacaacgtgcaggtttgttacatatgtatacatgtgccatgttgctgtgctgcacccattaactcgtcatttacattaggtatatctcctaatgctatccctccccactccccccaccccacaacaggccccggtgtgtgatgttccccttcctgtgtccaagtgttctcattattcaatccccacctatgagtgagaacatgcggtgtttggttttttgtccttgcgatagtttactgagaatgatggtttccagcttcatccatgtccctacaaaggacatgaagtcatccttttttatggctgaatataggaacacttttacactgttggtgggactgtaaactagttcaatcattatggaagtcagtgtggcgattcctcagggatctagaactagaaatgccatttgacccagccatcccagtactgagtatatacccaaaggattataaatcatgctgctataaagacacatgcacacgtatgtttattgtggcactattcacaatagcaaagacttggaaccaacccaaatgtccatcagtgatagactggattaagaaaatgtggcacatatacaccatggaatactatgcttcctgaatttcaagcagaaatcagaccattcattttcagcagccttaatgtgatgcacactaaagctggctcctgtgtttagggattacagtgggttggattccttcacaaaagtagccattagtcaagactaaaatgagtgaaatctggaaggagttaattacaagtgatcattttgtggggttgtgattcatataacacaatttcatttgacactaggagaaagaactctgaaagagtggttggaagatttaatagcaatattttacacagtctgttgggtttgtagtatgtaagtttccaagaagctacacaaaatcctattggtttgtgtcatatacctttatttaactttagaaggaatcataatccatgctaactaaatctaaaaaaaaaaaaaagtaccacttgtggaatgcccaggcacatttcaactacatgagttttaattgtcagaggattatatatccaagagaattgatctccatatacagctgacagtgccatggctattaatgatggaatgacatctttggaaagccctgacttcatctcttccagggatgctttatcttatatttccatatcaatttctgtggttagcacctttatgctaacttgaaaacaaatcacatgtaaaataaaattagaatgactaatactgatttaaaataaagcaaccctgtttttcagtttcaacaggccttacatctacaaatctgccaccaaattttaaaattatgtacattctcagggaaaactaaggactggcagtgaattggaacaagactgagatgatgtcttttgtgtactgtaacacttcaaaatcattgcttccagaaaaaaaatcacagaggcttttaatattcataaagatagaaacaggtgtttgaacagaacttgagccacctttgacaggagcacaatcagtttgtctgaaagggtcttcattttccctgtcactcactggcaggactgggaacatcaaaacagttatactcctgagctttcactacctgtttcaaaggattatacttgacatttctaatttttccccaatcattaaactctgtcctcccccttttaaaactgcatgattttgttagaaaatcaaagcaggcagaagaatacattagtgctcaatcctcatggactctgtgctgacctcattgctttttatgtctaccagtagaccacacaaactatttttggttcatcatttatcctgtgcagacagatagctgctagtctacctcagaacactatttagccagatgagggtaagtaacaaactgcattttagatgtaaatgctgtgccatgtaggctggacaggatgctttctctttctttgcctcagtttccttctcactttgcagagaggtaaagctgcccctataaatggatgcgacttccatgactgaaccttatgattattttctaaaaagtaaaagcacttattattttgtcctctcaaaaaaggaaagacaagataaatgtttaaggaactacttaggtaattgtaggtaactttacatgttactattttattccttatttcctctccttgcatatttgggcaagttagagatctattgtgtgccagggggcaaagaggaagaatacaaatgatttatctgtgctgtgccaagtcagagtatctaaaaaccgcatttgatcattttggggccagcacgtaactccgcaaagcttaattatgtccgcattattttgataagaagtggctttaggaaaacaataggaagacattgtcactggttggctcctgtgtgacctctgtcaaggatcatacatgtctagcctcagtttcaccacctgtgaagttaaggatttgggcactatctcaaggtttccatctcgaactaaatgtctattacacaatagatctataacttgaccaaatatgcaaggagaggaaataaggaataaaatactaacatgtaaaattacctgtgatgtctaagaaattccttaaacatttattttgtctttctttttttggaaggacaaaataataagtggttttactttttaaaaaaatagtcataaggttaaatcatggaagtcacatccatttatatgagagatgagaataaaagatgaagctttaggacactgaagtcattgacagttttaagtgaaggcagagtagccatgtgattttttttaaatatgaaattttacccttttgctgaaaagaggcagaatgtgagagggggatgtagggaatgtgggaaatacagttagtcatggaattattaggatcatatttgtaggagtcttgcaagtcatatttttatttatttatttttaaatcttattttgtatatttaaaatatacagcatgatgttacaagatacatgtagtaaaatggttactatatagtggaacaaataaacacagctaccatctcacatcttcacttattccctgcctaccccatggtgtgtgcagacatagtctcctcatttagcaaaaattctgaatatactgtgatttactgtggtcttcatattgtacattagaccttttgacttgttcatcctacatatttgctactttgtatcctttgacctgtatctccccacttcctcttcccagcccaatcctggtaactactgttttattctctatctctatatatttggcattcatttatttattttttagatggtacatataaatgagatcatgcagcctggtgtggtggctcatgcttgtaatctcagtgctttgggaggttgaggcgggagaatttcatgaggtgaggagtttgagaccaaactgggtaacatagcaagactccactctatataaaataaaaaaaaaaatttaaaagctagccaggtaaggtggcacattcctatagtcccagctacttgggaagctaaggcaggaggattgccagagcccaggagttagaggtggcagtgaattgtgatcatgctactgcactccagcctgggcaagagagtaagaccctccctgtctctaaaaaataaaaaaataaaaagtgagatcatgcaataattttctttctatatctggcttattttgcttaatataatgtcctctaggtcaatccgtgttgtggcaaatggcaagatctccttttttaaggctgaataatatttgtgtgtatgtgtgtgtgtgtgtctgtgtgtgtgtgacagtttctttatccattcatccactgatggacacctagtgtgtttccatatcttggctattctaaataatgctgtagtgaacatgggattgcagatacctttgtgaggtgattattttatttatacacagaagaggaattgctacaacatatgataattctattttaattttctttaggaacctccatattgtttcctataatggctgcaccaatctactttcccactaacagtgggcaagggtttccttttctccgcacccttgacaacacttgggtcttgtcttttttatagtagacattctaacggatatgaggtggtatctcatagcagtttttgttttcattttcctgatgattagggatcttgtgtatctttttatgtgcctgatggccatttttatgtcaaatctatagaaatgtgtattcaagtcctttgcatatttttccatggagtttatattttcttgttactgaattgtattggctctttataaatcttggatattaagcccttatctgatatatggtttgtaaatattttttctcaacctgtaggttgtcttttcattttgattgttttctttacagtgtataaggtttttagtttgatgcagtcccacatatttatttttgcttttgtagcctaagattttggtgtgacattcaagacatcattgccaaagccagtgtcaaggagctttttccctatgttttgtcctaggagttccattgtttcagatcttacatttcagacttttattaattccaagttgatttttatgcatggcataagataagggtccaatttccttctttggtatgtataaatccagttttcccagtatcatttatcaaggagactctactttctccattgtgtcttcttggtgcccttgttgaaaagtagttgattatatatgtttaaatttatttctggtgtctctattctgttccactggtctatgtgtctgttttcatgtcagtgccatactgttttcattactatagctttgtaatataatttaaaatcaggaggaagtgtgatgcctccaactttgggttttttttctctttcacagaatcgttgtggctatttagggtcttttgtggttctatatgaattttaggattgttttttctatttctttgaagagtgtcattgggattttgatagagattatattgctttaagcagtatggacattttaacaatattaattgttccaatccatgagcatcgaatatcttttcatttatttgtgtcctcttcaatttctttcatcaatgttttatggggtttaatgtacaggtcttttacctccttggttaaacttattcctaaggtatttttatgctgccataaatgggattttttaaaaaatttactttccagataggtcattgtttgtgtattaaaatgtcatagattttcatttttattttaaatcttacaacttgactgaattaatttattagatgtaatagttgtttggtggagtctttaggtttttctacatataggatcacattatctgcagatacaaataattttacttattccttcctgatttagatacctttcatttcttttctcttgcctctttgctcttcatagtacttctgggactatgttgaatggaattggctaaagcgggcatcctggccttgtacctgctcttagaggaaaggctttcagtttctccctcttgattatgatgttagccgtagattttgcataaatgggtctttataatgtcaaggaacttttcttctatacctaaactgtcaagaattattatcaaaaaagtatgttgaactttgttacatattttttctgtgtccattgatatgatcaagtggtttttgtcattcagtctgttaatgcaatgtataacattaattgatttgcatatgttaagccagccttgcatgtttgggggtaaatcctacttaatcatgatgtataatcattttgatgtgctgttgaattcaatttcctaatactgtaatgagaatttttgtatcagtgctcatcagagatattggcctgttgttttcttttctttttttcttttcttctttttttaaagagatgggggtctcgctgttttgcccagggtagagtgcagtggctgttcacaggtacaaacacagtgcattgcagccttaaacttctgggctcaagcagtcctcccacctcagcctcccaagtagctgaggctacaggtacatgccactgtgcccagctttgtaattttcttttcttatggtgtctttgtctgagttaggtatcaaggtgatgctggcctcaaaaaatgtgctaggaaacattccctccagctctatttctgaaaacatgtgggaagtacattcgtcatggaattattaggatcatagttgtagaagccttaagagtcatgtctttacaagccattggtaatgaaatttgcattttccctcaaaaaattttcagtcagctcccaattcaatttgcctgtgacactgatttctctgtcctcacctcctgttctgacagcaacatctacgtttggatgaatgcttccaaatttggttaaattgtttgcagagatttttaaagtacttaagaaatttactttgacttgacatttgaattagagatgagataaaaatttaaagtaaccaacatcatagaaccttatgtccctatttcactagccttctttttccctgtataatatggccaatgaataaaaacctcaaatcttatcattcttattatgcatttaaaatttcccataaatatcacccaagaacctgaatgccaaaaataagtatgcaatgccttctcaaataatacacatgtgaccttcatataggaccctctagtcaccaaaaaaatttccatacaactgctgatatccccatgaccatttcaggctgagagagagagagagagagagaggtttataaattattttgactcaaaacccccaaagtagaaacatgctcacacacatcgccagcctgttacttagaaactagcacctcaggacatagggatattgaagtactattgaatccactttcctcagctaccacctgtgaattatggctggcagcaggagttttatgatactattgtaaaagtaatatacctcttaaatggcaatttactaagttgctgatgaaatgcattgcaaatatgttagtttcagggtggttaggaaaattaaccgctgcatattttccatattgtcatatatgccaacatgctcagagaatcaggagcagctttctgggaaagctgtttaaatgtaacatatggccagttagtcacttggttagaacatgaggttgataaggccaaagctttagggaaatcacctgaggctgttcttttaaaagtagtctcagcaactgtatcccaaaaccctataaaatgttcccttaacctcacacttttcattgtgcttcctatctaattttctatcctatcgatttgatcccataccctgctcctcagcataggctgataacaatagagtgtaatcacacatcattagacctcagattacattttgaagtgatccccaataaatcttgagccacaaaacaatcatacaaaagagagactcaaagggataggtgagtgaatataaatttggaaactggtgtttcattaagtttgtagaggcttatcctggacaaagatctgtgcttatttgtatgaccccctaagatatcttttatattaacagacacttgcatagattttcacagtttaaaaagctgtttagattaatcatttcatctaaccatcacaaaacccctctgaaaagaggagaatgttattatccaaattttatggaggaaaaaacaaaagctaatgatccagcttgtgagtaatggaattagaatttgactcctcataccaaccccatcatggaaaccaggctttgaccacaatacaggtcccctggagtgaatgaacagactaaaacaaacaggagtagtgaaagtgacctgcagaacacttaaaacagaacagcgtttgacaagcttgatggcccaatgatttgaatctcttctctaaacaatgttagagcacagataggaggtaagttgcaatttgcacctcaaggatgctgaggctgcatcccaagttagtagaaaagagtgcagtgataaattcgagatgtctgccatgcggacaggaaatgtctagtggcaacacatatttgctcttcctatattaaagaatctgtcattttataaaacatacttgggttttatgatgagaagcaacatagatcaataagtcgacaagcctttgttaagcattaataaatgccaagcactatattaagcactgtggatgaacaccatggagattaagagaaagtctttgcgtatataatttacaattcaatctgggaaataaattgaatgtgcagcaaacactttaattttaatcttttgatactgattgtaaacacaaggcagattcataaagggacaaatcacaccaggagtccatctctgtgaaatgtaacatcttttgaagggaatatcaagagatcaaatacagttgtggaaaaggccttaatagaaggtctgtgtagtttgagtgctgtgttttcttacatttatttcacaccatgtggaaatattttatcaatggtcaattacagccaaagagcggttaaatattttgaatcactactgtatttgcttatctgaaattatgctcacatgcatgtctttagcaattatcttaactctataattgtgattttagttataattagaatggacaagaagtaaataatgaaagctccccaaatatccttttctcccaatagaagtagaaaaagtaaaactgcaaacaaaactaccagtttcctgaaggagacttgattacaactcccctgtgagaaaaacaatggaaaggttgggttttctttcaaaataatctgggaatggggaagttggatatggagaggtggcagtggggttgtagataaaacaagattggccgtgagtgggtaattgattaagctgggtgaaggtacatgacaattcattatactgctggcttgacttttgtatatatttgaaatttgtcataaaattgttcttaaattcctcttaaaggtgcaagagtaatttaaagtttcagacatagaagggattttcgacattgatgcagaaggaaaaggagaaaatatttaaaaccatgttaagtaaataggggagatggaattgcctgaccaagaagtatagaacttgttcaaattaatagcaaagacatggaaccaacccaaatgcccatcaatgatacactggataaagaaatgtggtacatatacaccatagaatactatgcagccataaaaaggaatgaggtcatgtcctttgcagcaacatggatgaaaccaaaagccatcatcctcagcaaactaacacaggaacagaaaaccaaacaccatgttctcattcataagtgggagttgaacaattagagcacatggatataaggagggaaacacacaccagggccaggcagggggtggggggcaaagcgggggagagcattaggacaaatacttaatgtatgcaaggcttaaaacctagatgacgggttgataggtgtagaaaacgaccatggcacacatatacctatgtaacaaacctgcacgttctgcacttgtatcccagaacttaaaggaaaaaaaaaaaaacacggactggttagtttgccagcagaattgagaaagactatacaaagcccccaaatcccagaacttgtgggtttgaaaagtgaaattgtttttcaccttattattttatcagtctcaggacaaagattaattaagggtgccgttgtcacgtcctttgttacaacttgtgaaaataactgaagtggtgccttgctgttcttttcagctgaataaagtgttcctagaaagctaaaaggcaaaaaaaaaaacaaaaacaaaacaaactgttgcaaaatttggatgaagggaaaaatcagagctaagggatgctatctttttttttcaccaccaattgtctcatggatgtacgtttatcattgatttggtgtaacaggctcttttggatgctataatttctcatctgtctcctgctgcaaaatccatcgactatgcctgtagctaggtctacatcacagctgtgaaacattaatctcaaggacacattcttcatccctggcctggctgatgcatgctgtctagttagttccccagtaggctctggcttctttcccgatgttctcctggcaccgctaacaactgtggaactcctgtcattctagagatgagactgctgtaatgctccttgggtggccttcaatgtcccatacttatttcctctcacttccctgatcctaagagggatttgtcacccaggtgtctggaatcaaggctcttctgtgactttgttatataaaaccttgatttagaagcagaactgttcatcatactgcttttgtgaatgtgtcctttatgagttctttgcaaagccctccatactggctgctaaacagtttattaattatgatattgagtaataagattgttcgacgaccaggtcatgcataaaagcccaacttcttggctctggtgatgtctgtttttgttaggctggctctcatatttattttgtcatgattacgcaataaaaggggatttttattatgtgcccccatgctggttaagccttcactaaagctaaactaataggaagctgtgtatgtcggataatggcgatttcaatgctgaaattgatggcgaaataagacacaagttgtagagtactgctttttgctgctctcccctgtacccaccaccaccaacaacaacaaaagttgtctcttagtgtgtgttatctttagtattaatcatgaggatagcttatatgtttataaattgaatgatggaatttcaagaaattttaaaaatgcagactttcttttgtcccagaacaaccacagggctgtaagtccaaaagccataaatgatagggcaagtgtaaatggactgtgatgagaggaaaaatgcaactaaaatggatagaaatgggactcaaggatatgataggctctctagaaaccccaagcctgctgtttccagtgaaagataattagagttttctgggggagggggatggctgataaagggacatccagaataaaaaagaaaaaaaaaaaaaagcagttttctgaaggaaaagcttcagtaaagtttagactggtgtcaggaatgataagaggccaagaagctcaagggaattcagcgattctttctgcaaatgctggaaaaactccctcctgtgaatctccagaggtatgtagagagtatatgtaagaaataatgcattatatctgcacacagtgtatgttcaacatataatctcttccacacttacagaaaattactttccgatgctcactaaatgagaagggttacaagagataagagggtggtctgcgttcccaaggcagctgctgggaaaagaagggtgttatttaaaatgattgtaagtgactatcttcctagattgtacattgtgcccccttctccagttgattctctataacctagatagtcaaaggcaatactgacattgagaactgccctgtaataatactgcgtttatctcaacggttcttcttttttttatttaataagagaggagtttcatgaataaaaacaaagctatcatgatgtcaaaataatattctttgcacccatgagttgagaaaataacagactaaagaggcctttttgctttttaagatgtgggagtctttgtgagcttccctgttcccaagatgaatctgtaatcttggtacaaactgctgagtgggtgtgttttcgatcatagaaaacttttcttatgtatctggagagtcatggtagtcttactacatctggttagtcatattccccctccaatcttcgtacaaaagaaacccaagactagatcagggcttgtgatgatggcaaaatgatatcttactctttaagtgctgcatttgatcaacatgtgtcattaatctctccttcctgtttgtgacagtaaatgacggaacactttatcaattcttctttcaattagattgatgtatgtacattccttgaattttaaaggtcattaatttgcacattagtctcttaggttggtagcacacagattgatgtattgatgatttagtctttcattgatcctatatcatctttagcaccatgagccatgagtgctgtttccttcccaaccatgacacaatgagtgaaaatgcattaatgtttacaaagaaataaagaacctggctcttgacccttgtagagcattttaatggccctggattaaaatgattataaaatgtatcgagtcatattcttaaagtgcctttggcatgtactggcctttcttcctgagctgtaggtaatagctatagcatccaacaaaaaattgccaaaaagcctatgaccttccatttgcagtgatacttccaagtaagtaaggactttatgaagttattttcaaagtacttcattgaagaaatgtttccctagtcatctggattgagattttgtttgcctctacctttgatatatcataccctgttgaattattcagtgtgggtcaaagtaacattaagcttcttacaaatgcaatattccaaacatatcccagcattttactttatcaccatccatagaataaaccacacgcaccttatctgtgctacaaacatacttaatataatgataataataaaaataataaaagtgtaataaccttaagaaacagttgattgatgtcattgatcactttagaatgattgggagtaacggaaacataatgctgaatttaaaaactgctatacaaagccactgaatgttttactaaagaaaaaaaaacatgtaatttgaatctttcaaaaaaatctcttttttggcccagaaagtacaaaattcttagctcaaattttaaaatgaaatacagtgtagtcaaatatgtaatatattaaatatgggttccaaactctgctcatcagtgattttcagagtaacattttaaccttctgtagtctcctcatctgcaacataagcttaccctgaatcatcacaaaagctccttatgctctaagtttttacatataaatattaggaaatcatttagaacatctggaaagcatttgaaacaaagagatgttatcaaaggagtcaacagtaattttcatcaatgtttaagaagcccaaaaaattcctattccacttgaaaatttagtgctatgcagaacaggtagtaaatgttaccagttcaagtcagaaattattttattagcagttgttagaatcccagccatgtccaagctggaaaatagggaagcaattgatccttttagtgcaaaactaagactggctaggcgtttacaacgcagtggaggaaaggacttataatcaaagaaccttataataatcaaagctcatgtctgtgatcaaaccaaatcatgcagatttctctccttaaaaagaataaaaagacaacttttggttcattaaaaataccgacctcttttatagacccttcagcttataatgcatcttaaatcccattttggaaatgacatacagtatacaatcaagttcaaaattttaccactatagaaacagggaggaaaaggtcacagagaagagaagccatgtgtggaaggacttgagggatggtttgacaacctgaacttcttgaaatacttggtttcagcatccctctctcttttccttcctctctctaaattgtccctcctctttttctatctaagggacatgatccttagcctcctgctcttttccttatagagtcacctgctctggggcctcatcaatcctcataacttcagctccagccaggacagcagtggagcagaaaggtcaggagtatcaggacagaagcctcatcagccaggagggctctacagcctcggaagaacttatcaggaaaaggattgagacctgggcatcagtttgtattgaaaataagaaataaatgccctggatcatagagggaatcaacttgtgaggccatttggtcaaagaaggggaggaaggtgtgtttgaccctagagccttgctactcaaagtgtgatccctggactggcagcacccacattgcttgagaatctacaggaaatgcagaatcacaggtcccatcgcagatcacctgaatcaaaacttgcaactgactgatatatgcatataaaaggttaagaagcgctggacaaaatcaaagtggaaaaaaaaacagtcagtaaagatagagacgtgtagacttcacatctattggatcatgcctgaaataattatcacactggattttggatctcagacataaaacttgatgttttcttccaaatctgacagtagccaagaaggagcaaatattgtggagtgtgggccatgtcagggaatatttagttcctgtaacagggcaggggagttcaagtggtaaagaagatttgtgtctcagtgtagtatgcactaaattctgaaaaatgggctggagcagaatgaggggacccttgaaagacaactaaagagtgttcatgtttttcctgggtgcataagatgtattaaagagaaatacagtgagaacaatgatttagaaagaagcatcttgctacaagatgccaggaacagaccaagagcaaggagactgggcagagcactgtacttttgtcagtgtcatctcaatgtatggcatggcccatctgctactgtcctcccatctccatcatcatcatcctctgaggtccagctcaggcactacattctccaggacatctttcctagtgacataaactcatatcagccgcactgcaaagtcttgtagttcttagattctattctacaggatttaacctcaagggtcttaaaatagagacttgtggattggaaagggacctggcagggctgtgcaatcctaattcccatctcctccccaaatccttccagagacagagatcttgatgactcaccaagcaacccattataggtggagggagctgtaattattaagaaagaaagttcttttttagactgaacaaaatttcttttttcctttgtgtcaatcacatactaaaaagcaccaggatagcacagcgatctgcctttcatctgtttctctttcatagattctgttgagtctgcaagttaaaagtgttttaggctttcttttctgatctgaaagaactcaagcattctcctcactagaaaagctcatttaacaagtgtttcttttgacatatagctactatgagagtttagggagaccctaactgatttgttctctttttagtttttagattagcttatgattttacagctccagtatcaccctggcctgcagagagtttagggcagtaacagcaggggcatcctgaatgacaaaaaatcaacacataacatgggagatcacacaaatgcaaaaggcactttagaaacaaaattttcctaggcccaaagcacacagaacagggagctatgtcctaatcaaagtcatttacatatatgaagaacagcaaatctgtcaatccagagcaggagtgggtagatcagatcttagatgaaatgagagtctcctgggtatctgttaatttcacagtgcttgtccatactttgtccagggacaaggcactgcggtcaagaactcgccctggccctggtccacctgtcagccctctcttagaaataattagaatgtgaaccccacaagtatttctgtcagacaaccagctctccccctagtattccctcatcaccaaaccaccctgagaaatagaccaaagcgagcctctagatctgcaaattgaggaacacacagacccttgaacacggtgacttgaccagtgcagggtcccctgtgaggccagccagctggtttctcatttattgaatggcagaaataaggctaaatgttgcagatacatcattttattgtaatactgcaaccgccctggcaaaagagaccattaaccccatttcccgtattgagaaactaagtcaaaaacaggaaaagatagactaacaagagacagacaacaaagagtgggtagagtgacttgaacacaccaaatgcatataaccactacacttccttccttagcattaagtacaaatattaaataaggaataaacattgcatgaggcagagaatcccaatatagttgggttattgcaaagaatatgaaagttaatactttttagaagggtagagatatgataaaactgtaaaatattgaaagacttgaaattttacccaccaagattaacataggcaatcatatacaaagccatagctgtttctagaatttttgttgacagttaagtgtcatagttagcaaatatttgttttctagaacatgtctttacacccagcaagtaataattgatgcaggtgagccccgcagaggattgactgcatttttctgaccacggaacaactccccggggccgacaaacatttggttggaatcaaattggcactgatttcttgggcattattaaacatgtgctctttggccatagctatcatttcactttccaggtgaaataaatgtaagtgaagcataagaattcaaagttgaattaccatgtgctaccttaaataatatatttcacaccaaaagaagactctgggttttgatcaattaaaacatacaccaataattgcaaatttaaatatgatgttgctttttctatccagtatcttctgttgctcccacaaaggttttcagcatactcttcttgcctcttcgtttacattatatttctaactttgttaggatagaggtatcttcacgcattcagcaaacatctatggcctgactgcctttttccaaacatggcaaaggcttagaggcacaacactgaactatgtccattcacagacacaggctggtttcgttgcaataataatttcggtagagtaaacaagataatggagacaaaatgatattaacattgattatttctgaggctccacaatgtcatggaagactcaggctcctctcatctttctgttctggtatcctcaggctaggttaccatcatgcctgcaaaatgattgttgcttctcaaggcatcaaacagagatgtaacaagggtggggcaggaaacctttcctagaagcccctaccacactggaaacctttcccagaagcccctcacaaactggaaacatttcccagaaaccccttcctcactggaaacctttcccagaagcccctagcacactggaaaccttctcagaagcccctagcacactggaaacggttcccagaaatccctttctcactggaaacctttcccagaagcccccttctcattggaagctttccccaaagcccctgccacactggaaaccttcccagaagccccgagcaaacattactttatgtgtcattggccagacagctacaagcctgcccctaaaccaataaccaacaaggagaatgagatttccatgatagggttagactaaccagaatttatctgggctgaagtgtatttggttattggaacaaattagggttccattaacatgaaagatgggggaaatgattattgagtgggctggtagtctctaaggtgatccagttagacaactctaggctgggctgcttacatgctagcattggttggtttagcactatctttttttaaaagctagctttcattgtacttttcaaaaatattttaacgattttttgggtgtatgattcagtggcattaagaatactcactatgttgtgtaaaccacccctatccaattccagaatttttcattgtcccaacagaaactccgtgcccattaaaaataattccccatttccctgttccccttccttttggtacctggcaatggccactctatttcctatctctatgaatctgcctattctaattacctcacataactggaatcacatagtatttgtccttttgtgtcctgcttatttcacttagcaaaatgttctcaaggttcattcatattctagcatgtgtcataatcttatgatttttatggttgaataataatactctattgtgtgtatacacacatgcacacacacacatacacacacacacgcacacgatattttgtttatcattaatctaccaatagactttgtgttctactttttggctattgtgaatgatgttatggtgtacatgggtatatagtatctacttaagtccctttttttagtactatctttaatctcactgaaacttagggacaaacgggatgttcttaacctgttgcagatgttttataagtgataaagcatctgtaaagtactgaatatagagcacatcacaggtgcttcagaagtgacacctgctgccatggtctggtctttattgctgttttgtttgttattgttagaacacagaggcagagctcaaaaaagggattcctagctcagcctgaggattcagaagtatgcaagctgtgctttgaagatcagttaagagtagtatgtatatcagtttgctagggctgccatatcaaagtaccacagactggagtggcttaaacaacagaaatttattttctcacagttctggagtctgcaagtccaagatcaaggtgtcagtagggttagtttcttctgaaaccaaccttggattatacttggccatcttctccctgtgtctttctgtggtcttccttctctgtgtgtctgcatcctaatctcttcttcttataaggacatcagttataatggattagggcccatccatatgaccacattttactttaatcagccctttgaagactctatctcctaatataaccatattctgaggtgctggaagttaggacttcagcatatgaatctgcagggagaaaagagcccacagccacatcatagggcctggtgactactgatcttttgaaggagttgccagcaatctaaatgattgactgaagagaaggggtcagatcagatctgagttttctacctatcagtcgggagcatggtggaggctgggttgaagggaggaagggcggaacactagaaacaagttggagggttatgattattgttcagatatcatcatatgattcaggctagaactaaaatagtgggtgtatgggaaaaaagtttggaaagcaacaccttagtgttagattgattatgaaaataaggaaaaggcgccgggcacagtggctcatgtctgtaatcctagcactttgggaggccaaggtgggtggatcacttgaggtcaggagttcgaaaccagcctggcctacatggtgaaaccccatgtctactaaaaatacaaaaattagccaggcgtggtggtgggcgcctataatcccagctgccttgggaggctgaggcagaagaatcacttgaacccagggggcggaggttgcagtaagccaagaccacgccacttcactccagcctcagcaaaagagtgaaactctgtctcaaaaatgcaataataataaggaaaaggaaagagcatttgttaatggtttgggcaacagggtatgacactgttcttgaaaaagaggaagctatttgaagaatgggttcagcaggaagagcaagtgctatgttctcttttgcacaggtcataattgacaaatacaagacatttgagggggactgtctactagttggttacctataaataaggatttagtgtttacgtgtgaggtcagtagaaatagaaatttttaaaaatcacaatgaaaaatggattaatgggtatgggtgaaactacccagagggtatatacagagggctcaggcctataccctggaggagctaatgcttaagaaatgagcacactaatagttaataactaatgaacaaataaacaagaagtgaccagagatgggcaggaggagacagagacatagagccccatcatgacacacagaagaatgtgaagcacaagtcagtagcgtccagtgtgacagagaggacagacactggcagttaatcagttgttggtactttagtgagagcagtttgtggccaaaaccagatgaatatgaattaagaaattattgggagacaaacaagacctggatgtaggctgttctttttcagaagcttgcctgtaaatagggcataagaggtagattttcaagttgtttttaaattgaagatatttgcacatgttcaaatgcctaaggtaaacagagtgactgaaggaacaaggtcccctgcagagggaggagaggaagtgggatctataaggagctgaggcaaagaagtcttgggaggcattttaatggcccctattttttctgtgaaatagagagcaaattcatcagctgaaatgtttcagcacagagctgggcatatggtatttgctcaacagatgcttatttaattattggtggaagtatatgacatttggatttggaatgagcataagaggtccagaggcaagagtgagttgggcagcgggtctacactgatgccaggggtccacaggcaagatcctgacttacctagttcagtcagagcaaggggaatttttaaagtctctaagtgattctcattgtagtcaagagtgaatcactggtccaggggccgggtgcagtgactcacacctgtaatcccagcactttgggaggccaaggtaagtgaatcacctgaggccaggagttcgagaccagcctggccaacatggtgaaaccccgtctctactaaaaatacaaaaattaactgggcgtggtggtgcacacctatagtcccagctgcttgggaggctgaggcaggagaatcacttgtacccgggaagcaaagattgcagtgagacgagatcgtgccactgcactccagcctgggcgacagagtgagactccgtctcagaaaaaaaaaaaaaaaaaggagtgaatcactggtctaaaggtaaacttgaaacatgcttagagtaaggaaaggctactttttaatgagctaacagatgtgatctagggaagaaattgttgcctataataatgtaaaataggatttaatcacatctctttttcatttcccttgaattatcaaattctgtttatgtaaaacagagagcaaaagacaaataattacaaagagattgagagtaataacaaaacattgtgtaatataccagacattaacaatgaaaattgcccatctctctgcctaactatatggccattgacagaacatattaaaaggaaataaaaataactttcacttagtgccaatcacatgtcaagcattggatttgcttccttcatatgttgtctcatttaaccttctcaacaacccattttaccgatttctaaactaagactcagaaagtagcctcatttgtaaacaagaggaagggcagcgtcctggagtttcagaagacttggagaagagttgggaagcccaggatcaggggaattcactagtttctccctctcagtagataaaagccttaggaagtaatcagaggatagaaatatgacttccatttgcagatgtaaatatttaaagtactgtacatttgtttaacacctgctacgcaattcaccctctgttgactttgacatttcattattttagaatgacctttgccctttagcataacacaaatccattaaaaggaatggtgacagaaactcaaaagggttgtgtgaagatcatgatggtttttatacccctgtgcctctgctttcgatcaatttttctcttctatcccagtaacatggttatccaagccagataaaagcagagaaaatggctcttccctctcatttttgctagcatgtcaaaataataaataggttaatcatagcagtcattttgacttaggacatcttaggcacacctttgggagtgcagaaacattcccaggttactattgaagagttccagctcttagccagaaaagaaaatctacttttccctttttcctttacttgtgtgaagtcagtgttctaggaagtattgaacctgtctaagaaaccctgcaaggcagctctgaaatttacagcctggcagcaagcttttaaaaaatgcaccaggcaatctagagtaagcttttattgtaataaaagacacaggtggaagatgaatagtcaacgccattgattttgacaccaccagagaactgtgtcttgcgtgtagagtgtatgtgtcactgtcttttgaaattgagtctgtggctgctgctactattgtctcccatggcaacctaccatcatcctaggacctccatcaataggcattgaggtctggtgggcagaagactgggtagagacctaaagtttagtcattgatctcccacataccctggttccaacatctgcagtgaagagatatcatcaattcctccctctctacccccttgttgatatgacaaaggatctaacatgttaggcaaaaccaaggcttctattgcattctatgtttggctaatttatttcttaatgggttaagagtgaaataattagaagcagttagatattcatttattgaatctctttggtctgcatgcagcctgtgctaaggaataaataaataaagatgtgacaaggtcagaagtttgttccttatatctaatcaagatcctggagttggaagtaggtcgttacccttcttgtgaaacttccatctatgcatttgctatgcacacaaggatctgaagtcctctcatcctttctttcagcatatatttgttgttgaaaatatgtatttgctatgcattagatgttgttctggtcactagacggtaaaagataatttttagtacctagcttcaaagagctcaatgccaccatatacaaaaggcaagtatagagataatcaagtattgtggaagctgagaggaagaagctcttagcaattctccaaatccatggtaaaatttaaaaagaggtatttgagattaatccattacatgacaactcatgtgtattagttcattttcatgctgctgatacagtcatacccaagacgggtaatttataaagacaaaggggtttaatagactcacagttccacatggctggagagacctcataatcatggcagaaggtgaaaggcctatctaacatggcagcaggcaagagagaatgagaacctagtgaaaaggaaaatcctatataaagccatcagatctcgtgagacttattcactatcacaagaacggtatgggggaaactgctcccatgtttcagttatctcccactgggtcctacccacaacacgtgggaattatgggagctacaactcaagatgagattttggaggggacactgccagaccatatcaacttgttactttaggaagatcctaatgtgatgcacatgaaaacaggagaatccggtggttagataactggcgtgtaatatgaaaagggagtgtattagggttctctagagggaaagaactaataggatagatgtatatataaaggggagtttattaagtattaaactcacatgattacaagttcccacaataagccatctgcaagctgaggagcaaagaagccagttcgagtcccaaagctgaagaacttggagtctgatgtttgagggcaggaagcatccagcatgggagaaagatgtagactgggtggctaagccagtctagtctttccacgttcttctgactgcttttattctagccatgctggcagctgattagattgtgcccacccagattaagggtggatcggcctttcccagtccactgactcacatgttaatatcttttggcaacaccctcacagacacacccaggatcaatactatgcatccttcaacccaatcaaattgacactcagtattaaccatcacagggagaaaggtgaaagcgagaagggagagaaagcaagaagtgtaaagggtaaggtaagtgggtaaaacttgcagagaaggaaaactgaggagcaggaagtgattaagcaaaatagtatggggccaaattacaagaaaagggctgtcagaacatatcactggttgcttaatttgtgccacatatgattttgtaaattagatttgtataagtaaatgccatccacatacatgatttatattatcaatttgttttattggcattattcccaagaatgctgaaaaacatatcagcagaattggaaagaaagtttctaggcaatagtcactccttttcatcataaatctgcactagagcccaactgtcttctctaaaccaggacatggatgttcagctgctcactggatgtttccgctaggtgtctaacctattattcttttcccttggaacttgacctctcatcacctgcagttgttatacttttccctgtctccttgttttctcgtttttcttttctttacttttcttttcttttttttttttgtttgtttgtttgtttgttttttgagaaggagtctcgctctgttgcccaggctggagtgcagtggcacgatcttggctcactgcaagctccgcctcccgggttcactcgattctcctgcatcagcctcccgagtagctgggactacaggcgcccgccaccacttctggctaattttttgtatttttagtagagacggggtttcactgtgttagccaggatggtctcgatctcctgacctcgtgatccgcccgccttggcctcccaaagtgctgggattacaggcgtgagccaccgcgtccagccatctccctgttttttcttactgctgttctccttgtctaatagtccaacttacactcttccccacccttccccaccctccctcagtctttcttctctacttaactgacttctagcaattctagcaaacttcaaaaacgcagccccagttatctctgctcccctttccctgcccggactgacttaaatgctctttcttcaagatttcattgcacttggtacatgtttcctatttagccgtcatcacactgaatgataattgcaagtgttgcttgtctgtctttcctgaagtctggtatcaagtacagagtcctatatctcacaggtactcagcatatgttggctgatcaaatgaatgagtacagaaaatgataatgcacttttaactgtcagtgaagtcaagagttgagaatatttagttctgctgagtcttgcattgatcttcaacggcttagtcattcaaaagttatactaacatgaagggttaagtgtctgacccatacgtttttagtcccaaaggtgctattatgagcattatattttttataaagttttaagtcttctaaattttttacactatgatgatgttattagttagcctttaaaaataatgacttttaaagcccccgttttctcaccaacaacaaaaatggaagtccagatccagtcttcttgtggtctaggtgtatgggccaggggtgcagcagatgacttaggagaaatggggaagagactggttgtccagtcaatataattttgtaataacgtttggaaaccactggtttctgagacactgggtttggtttgttgatatggaaatggtaacctataagggttagcttggaaatgtgtggaatagtgttagtaaatacgtacagtctaatgcaagtttagaagaacaaatatattttttctgggtcaaaatgtttcaaatattcttaagacttatacataacaaatatatgtgaaggaaaatagatggatgtataatatgcaagcagtagacacatctttctgccaagagtcagaatgggtttattcaataaagaaccactagcctttctcagaatagtctagtgtcagtatagttgttagtcttggggttctgacccaattccagctaagtaattttattctgcctgcttaaatttccctaccattaccactcgacacagaattcttcttcatttcttgctccatctaaagtgtgattccatcctgaaaaagagcttcatgcaccactctaaaggtgactgctttgctgtgatgagtgaggcaattttgttatgttaagtgctttggggaaaaaagcacttatagtgctcccgtagaaacgcaagctaatattactcaatgagccttcctttcagctgttgtgcagtgtggcattttcaaaatgaagaggccttcccccattgcagtttatttatgtgatatattcagaatggacctatttcctaaaggcatctgggaatatgtgtagaagaaatatgaaagaaacaaaaattaaacacagatgaagttaaacagctaacagtggagaggctagtggggttgctaaactgcaacttcaaacctagatctgaaattctgaatgattaagaagaatggaaaataattacacaaggatcttccagcacatctgccaccttgctaaggtctaaattgcaaatgatgttagtagttccaagaggtacttagggtaggcaaatgtgtccatactaactacagaattcagagcttcatagactttagaataaataatttttgcaaatttattgaatatttacatgcagcatttaaaagacagccacatttttgaaaagtgtagcagccaacacattgaatatacatagatataattcctttctagaacacatcagcatgctttttctttaaaattaatccctttcattgtcttttagtagccccaaattatctattccctttcttagaataatcttttagcctgtttttaaggtacatgtttgctttgaaaaagtggtattattgatctttaaatactgaaaggtgtcttaaggttaattcaagagtattagcaaaaataaccttacctaagtctcttgaaagcaggtgaggacacagataggaaggcactgtaaatcaattgttggagtgttgactctatcatcaaatagcagatattctgatttttttttctatttcattcctaagtgaggaggcattttctccatcttttcgtctgaaaatctggcataggtacgtaaagaaaataagaggaaatctttcagaagaacatcaaggcctgtgacatgggatgctttatttgacaaagacaacaaagatttccctcactgaagaacatctctcatatttcatgactcttattataacgttgtgacaaattctggaagcatttcctggcctttcacattgcctcttgagtatggacattttaacgtacttactagtgtttagaagcagagatgttaatggttgaaaccttggaagccaggggctcatgggctgggagggcatccaattctgttctcagtacagaacctctcactccattaagcttgttttatttttatttttttcaaaatgaggcgaagaataacatcgacctcttagaatcaagaagattaaatgaaatactgcatgtaccacttcctgcaggtacataggaagtggatgttaacaggtggcccctcaacaactgagccacacgttcgcttttgaatctggataatgactatgtgatgagcctatatatatctataccttcatcttttattattgtctcctcaaaatgtctgtaatcattaacacaatgtcacgcacagctagataatgctgtccccatggttaaagtcctgcttcactggcattgtggtttcaggatggattcatgggactgtgacccgttttcctgtgatattgatgtcttcctattcgttcttgaaagcctaccttttataccaatttttctttgctttaacattattttgagaggaaacggtcttaagaatgaagctagaagtaaaggtcaagtatttttgtggcagggcacaaatctctgcagtccttctgtctttttaatcagctaccccggtgcacattgtcccaacccacacagcttgtgtttgcttccgtgggctgcatccctatagctttcatttgtctcgaccacctgcgtctttcactctgacactgaacacctgtgtccacttttgtccccaacctgagcctgagtctgggatcagtttgcctctgcccactttctctttggtctatctggacacctgcccaatactcctgacctgattgaccccaggtgctttactgcgctccctcctagttgaccaaactagtcatagattcatatgatttaggaactagaaagtctatcagatatctacaaatttaagcatttaattttacagatgggaattcgtgagctcagtgtcagatgttgatgttgtggtgcaggcaggactagagcctctgtctccttcttatgtaattaaacccctttatgattgcaagggggaaacaaatgatctgttttaaaacctaaaagtttaaatctacacatagaatgtctgcttgaatgtctgtttttcaagtgtaggaaatatattacattgtggaatcagagctatattttttgccttcatttatctctctatgagaattctatacctaagtgtatgtttgaatttttatgtttattaataaaatgtgtttactatactttgttcttcaatgaataaataactgtcaatttaaagaaatctatcttaagtagataatcagaaatagggacaaatctgagataaggagtatattttataatagtgcaaaatcaggtaagaatctaaaaagccaacaataagacaattgctacagaggtcatagtgcattgctgatagggaatatcatgcagccagtaaaaaggatgctttcatagaataatgaggggagtatctaactatattgctattgaattgaaaacaaagggtaaacattgcatacatagcctgatcctaatattgtgcctattagagttaacatctgaaaggaagtatcacaaaatattcgaagtatctctgtcttggttagttacagatgatttttattctcctccttgtcttctttttccaaatagtgtgtgacaaacacatacaaagaaaacatttgaagttttaaaaatctaataaaaatgtagttatgtctttctgaaaaacaaagttacttttcactttgtcgctagggggaagtgttcttactccaatcatatgcatcttctaagaccagaatataccactgcattctcaaaatcaacaaggctacttttccatgggaagttctgaaagagtccgaacactaagagaagtggcagaaagagaaagtatgggcccacagctttcaagatgagggctgctggctgcagttcccaggggcacttgtttgtttaatgcagccttataaaggaccagagacagagaagtataatttttttttttttttttttttttttttttttttttttttttctgagacggagtctcgctctgtcgcccaggctggagtgcagtggcgcaatctcggctcactgcaagctccagcttcccaggttcatgccattctcctgcctcagcctcccgagtagctgggactacaggctcccgccaccatgcccggctaattttttgtattttttagtagagacggggtttcaccgtgttagccaggatggtctcgatctcctgacctcgtgatccacccgtctcgacctcccaaaatgctgggattacaggcatgagccaccgcacctggccacagagaagtataattttaattccctggagcagacggtgattcccttgcctcacacttgttaaatacacacacacacgcgcgcgcgcgcgcgcacacacacacacacacacacacacactccatcatgcccacttctctgagacttctgcaggtctccttggctagaatgacaagtccaggcaaattcactaatgttatttttcacctgtcctgaataggaccttccctagccctttacaaccttgagccttgggcaagttatttcccttctagggtcttagtttccccaaccattaaagaggataatagtagttcctacttcattgtagtgttggggagataaaactaatctcagtgccctaaagtgattagaacagtaccaagcccattgaaaatactacatgacaaaagatgtgtctctctcatcttctgcttctctctccatccccctcactttctctctttctctgtctccccctccctttttctctccctccttcctcatctggaaagtgatctttatcttcaccatgtggcattttgaagatagctttaaacaagatgcaaaggcaaaagaaataacaaaagtcatcttgccatttcatggggtaaatcagagatgagatgaagtcattcacttcctaaaatgagttttttcatttttttaaaacaatccacctttttctttgggtctgctgacccatgattacagggtcatattgtgttttttttatttttgtttgttttgtttttcattttggtttacctggcactgagcaataaaataataaaatatatatatcttttcaataataccagtatgcacagaagtaggaaaaaagggctcccattgcttactgaattgctcactaatcacactgtttgaattcaatggggaattccacaacacacccgacttttcatttatttattttttattggttctgggagaggtttgtgattcattccatgtaggttgcaagcccttgtactacaggaacaaatggtctctggggcgatttggtttattaacttttagggcaaaggaggagaaatagaagaattgcttaactgcaatatgctggtgaaaagtttagacttttgtagttcaatgacactttgagatattttgactggtcctgcttctttttcttttcttttcttttcttttctttttttttttttttttttttttgaaacagagtctcactctgttgcccaggctggagtgcagtggtgccatctcagctcactgcaagctccgcctcccaggttcatgccattctcttgcctcagcctcccaagtagctgggaccacaggcgcccgccaccacgcccggctaattttttgtatttttggtagagacagggtttcaccgtgttagccaggatggtctcaatttcctgacctcataatccgcccaccttggcctcccaaagtgctgggattacaggcatgagacaccacgcctggccctggtcctgtttcttgatgatagatggactgattgtagagaaggaggcagcgtgatggagtagaaagatacctggccgaaagacagagactcaggccacggtcacagctctgccacacatgcccagccacatcaccaggctcctcgtgtccctggaactcagtgaccttcttcacacatgaagagggtgaactggacacagccccctctcagtaaggttttgtcatttcagggatgatgataagtcatatcttccacataaactttgtgaggaaataaaaggaactctcccatccataaagaaataacaatcttaatacaataagcatttattgtgctgcctgcctggtgttgcatttaaccccccagtgaagtaggaacagtctccctgatagcagagatgaatcccagaactaacaaaggttaagtaagttgccctaggtcagagagcctgtggctggtggcaccaagcctcaaggcctgacgcacatcttatgatcatgcctctctccatgctgtctctctgggggagcagaaagaccatctaagctgttaaggattcaaagtaactcaagtgaaatgtgcaagttaataaagaggaaggagcaatgtgaatgcttttatagctttgtgaagggtaattcaggatcacagtgcccatgtggtaagaacagagttactatgagagacttaaagagaagcttaattggagcaaagaaagaaagaaaaaactctgagataggacaaaaaatgctttgtctccatcacctatgttttctccttcattattctcttgtaaaatggtgaagcacgtggaatttagtaagtaaataagatacagggtaagcatgttgatgctatttgtgcaatttaggcacttggtgtaccagatggagtgagagcagatacgagggctactgctccaggagctgctgtttacatttaatgagttgctttgggttggtccaaattaatccactagctacgaaaacacggtaggaggcactagaaacatacacagagttcttctctcagaaagatctttaagaactctttaccccttaaattctatgactcatctttaaggcaaggaatgataggttgatgtgaattatttgaacattccaagctacaaatgacataaaaacttattcctatgaagaatcaacaataaaaatttaaataaagagttatggttggtagtatatactttgatgtccatcacattcatgatttacaaggcctactcttcctggcttatgatgtaactaaacatctcaaagatataatatagcaatgagatgatgcttacatgaatatattatgtttttatgaaatacaaggcatcattctcctaaaaagaagccaatgtcggaaaatgaatcctgtagattctaattcctgcactgtgtgaggactactggtgaattattttccgccacaatttgcattttcttctgcagtgttatagcaaaataagcctctttgtttgcactggtttcagaattaatttagtttgtatatttgttctctcctcctcttcctggatttggtttcaaagtaaacagttgttttcattaaattctcttttatttggccttagttctttggttactgtcattattctggatggctgtccctgttttatttttgaatctgatatctgtacactgttttaaattgcattaaattggttcgcttccattttctattgtttacctcattctgggtactatgatttctgtagctacatctgattcctgtcatggtgtgatctttttgtatgaacctaaacaccatacagggttggcagaatgagaaaaagaaaatcaacaatttgatgtttactgaatgtggacaaattacaaggaagaaacaaaaatgacattcatcacagagattgtcttgaaagttaatgacaaacttagagtcttgaaaagcagcaggaactaccttgtttggtaaagccaaaaatatcaacatctttttttttttttagcttaacctagaaataacctctgacagaagcaaaagcagccacacttttcaatttcaagctaaaagaactaaaaagttatttctacctaataaaaaagtacaataagattctgaattcccacagaaactcttcatctacattataacacatcaaaagccaccaaggggccatttatcctgtagaccagtgctaataaagttttgtgggcatttgtgatggtgttcatggcaggagagtagggagagggagttttagtgcagaggagaaggtagcaagttagtttttataaactttctggaagaaaatacagaaagatttttaaaaattattccaatgattcttttaacgaatgtttaataacacctcttaggatccaagtattgttctagagtttggaaatacagcagtaaccaaaacaagcaaaatccttgcctttttgaaaattccatgatatttggaaaagaggaacaataacaaatatacatataataagtcagcagatgatcattgctatgaagaatcaagcaatgggaagagtgactaggagttgtagggttgttagagaaagcttttctgagacagggcatttaggttgagacctgaagaaaataagagaatgagttacgtctacatctagagggagaatattccaggaagaaggccctgggacggtagagtatctggactatatttaatgaggccagtgagtgaaaatataaatggtaatagattaggtcatggaggtgaacttagaaaggagaagacctgtgttaagtatgcacaagactgagggaatgtaaacaaatgattggtaaatttaactataaaaattcaaaaatttctgcatagcaaaatccaccatgaatgaagagaaaagataaacaataactaagggaaaatattggtaattcatgaaacaaaagggctggttttcttgattttttttaaaaagaaacttatttatatcaaaatgaaaaaaaaatccaacagtaaaataaatagacaaagaagagaaagagacaaagcactggaaacaaatagcttttaaacatattaaaagatgtccaaccttccctataataagggaaattcagggtagacccacactgagatgccaatttcttactctatcagatggacaaagatccaaacgtttgatcttaacatatcaacgtttgagacttaaagaatcagatattgtcatgtattgctggtgagaatataaacaagtacagcctttatgaagagaatttttgcaaaactatcaacattttataagcccatatctttgacccagcagtttcacttctaagactttatccaacagatttatttgtacatgggttgaattatgtacaagggtattcactgcagcattatttgtaatagcagaaaaccctaggacatgttgagtagtgagaaatgaatgagaagccaagagtggagtctgattatgaatctctttgtaaacttgaatccttagaagttcttgatcaggtagaatgataacaaggctgtgtttagaaaaatgtgtctgacattggtttcaggatggattgtgtgttggggagagctccaagttcaatgtcatttaaagagttctgtttgagctgaaaggggagaatccttgtttagggggcagaggtggcattaggcaaggctggcgaggtaggtagggaccagcgtatgaagggcctttctcatttttatttttattttattttaagtttcgggatacatgtacagaacgtgcaggtgtgttacataggtatacatgtgccatggtggtttcctgcacctgttgacccatcctctaagttcccaccccttgcctccctaacaggccctggtgtttgttgttccccttcctgtgtccatatattctcattgttcaactcccacctatgagtgaagacatgcagagtttggttttctgcacctgtgttagtttgctgaggatgacggcttccagttttatccatgtccctggaaaggacatgatctcattcctttttatgactgcatagtattccatggtgtatatgtaccacattttctttatccagtctatcactgatgggcatttgggttggttccatgtctttgctattgtaaatagtgctgcaataaatgtacatttgcatgtgtctttatcatagaatgacatattcctttgtgtatatacccagtaattgcgtttctaagtaaattggtatttctggttctagatccttgaggaattgccatactgtcttccaaaacggttgaactaatttaccttcccaccacagtgtaaaagccttcctatgtccccacagcctcgccagcatctgttgtttcttgactttttagcaattgtcattctgactggcgtcagatggtatctcactgtggttttgatttgcatttctataatgatcagtgctgttgagctttttttcatatgtttgttgtccgcataaatgtcttttgaaaagtgtctgttcatatcctttgccgactttttgatgggtttttttttttcttgtacatttttttaagttccttgtaggttttagatattagacctttgtcagatgggtagattgcaaaatttttctcccattctgtagtttgcttgttcactctgatgatagtttcttttgctgtgcagaagctctttactttaattagatcccatttgtaaattttggcttttgttgcaattgcttttggcattttcatcttgaagtctttgcccatccctatgtcctgaatggtattgcctagattttcttcgggggtttttatagttttgagtcttacatttaagtctttaatccatcttgagttaatttttgtataaggtgtaaggaaggggtccagtttcagttttctgcatgtggctagccagtttttccagcaccatttattaaataagaaatcctttccccatcacttgtttttgtcaggtttgtcaaagatcagatggttgtagatgtgtggtgttatttctgaggtctctgttctgttccattggtctatatgtctgttttggtaccagtaccatgctgttttcattactgtcaccttgtagtatagtttgaactcaggtagcatgatgcctccagctttgttctttgtcttggctgttcttgttctttgtcttggatgggtcttctttgattccatatgtaatttaaagtagtttttcctaattttgtgaagaatgtcaatggcagtttgatgggaatagcagtgaatctataaattactgtgggcagtatggccattttcatgatattggttcttcctatccatgaggatggaatgtttttccatttgtttgtgtcctatcttatttccttgagcagtggtttgtagttctccttgacgcggtccttcacatcccttgttagttgtattcctaagtattttattctctttgtagcaattgtcaatgggagttcatttatgatttggcactctgcttgtctattgttggtataaaggaatgtttgtgatcttttcacattgattttgtgtcctgagactttgctcaagttgcttatcagcttaaggagtttttgggctgagatgatgggcttttctaagtatagaatcatgtcttctgcaaacagagacaatttgacttcctctctttctatttgagtatgtttatttctttctcctgcctaattgccctggccagagcttctgatactatgttgaatatgagtgatgagagagggcatccttgtcttgtaccggttttcaaagggaatgcttccaacgtttgcccattcaatatgatattggctatgggtttgtcataaatagctcttgttattttgagatatgttccatcaatacctagcttattgagagtttttaacatgaagggatgttgaattttatcaaaggctttttctacatttattgagatagtcatgtggtttttgcctttggttctatttatgtgatggattacatatattgatttgtatatgttgagccagccttgcatcccagggatgaagctgacttgattgtggtggatgtggtttttgatgtgctactgaattcactttgccagtattttattgaggattttcacatcgatgttcatcagggatattggcctgaagttttctttttttgttatgtttctgccagattttggtatcagtatgatgctggcttcataaaatgagttagggaggagtccctccttttcaattgtttggggtagtttcagaaagaatggtaccagatcctctttgtacctctggtagaattcggctgtgaatctgtctggtcctgggctttttttggttggtaggctattaattactgcctcaatttcagaacttgttattggtttattcagggattcaacttcttcctggtttagtcttgggagggtgtatgtgtccaggaagttatccatttcttttatattttctaatttatttgcatagaggtgtttatattattctctgatggtagtttgtatttctgtggggtcagtggtgatatcccctttatcattttttattgtgtctattttattcttctctttcctttttagttagcctagctagcagtctatctattttgttgatctttttcaaaaaaaaaaaaaacagctcctggattcgttgatttgttggaaggatttttgtgtctttatctccttcaattctgccccgatcttagttatttcttgccttctcctagcttttggattagtttgctcttgcttctctagttattttaattgtgatgttagggtatcgatctgagatctttctagctttctgatgtgggcatttagtactataaatttccctcttaacactgctttaggtgtgtcccagagattctcgtatgctgtctgtttattctattggtttcaaagaacttcttgatttctgccttaatttcattatttacccaggagtcactcaggagcaggttgttccatttccatgtaattgtgtggttttgagtgagttagttaatcctgagttctaatttgatggcactgtggtctgagagactatttgttaatgatttcagttcctttgcatttgctgaggagtgttttacttccaattatgtgatcaattttagagcaagtgtcatgtggcactgagaagaatgtatactctgttgatttggggtgaagagttctgtagatgtctattaggtccacttgatccagagctgagttcaagtcctgaatatccttgttaattttctatctcattgatctgtctaatattgactggggtgttaaagtctcccactattattgtgtgagagtctaagtttctttgtaggtctctaagaacttgttttataaatctgggtgctctttgattaggtgcatttatatttaggatagatagctcttctttttgaattgatccctttaccattatgtaatgcacttctttgccttttttgatctttgttggtttaaagcctgttttttcagagactgggccagagataatttttaaaatcagaaataaaaatgttttaatgctcctaaaagggctgggaccttctgcctgggtaatttctagtcctaaattggccctctttccgggtcattcagatcctggcttatgtactcctcagtcccctctagctgtgctctctttccagcctctcctgaaacacattccagcccaagatctcacaagcattttaattcatcgatttgggtgaaagcaaaggacatgtatattcagcgtgcctgtctccagcactccacaggagacagcagtgcccctagttacattcatgccatgggcattaatcagcctatacataaacactgcagccatgtttttctttttctttttcttttaatgaataactgggggccaatgagtgcatttatcacagtgctttttaaattgcttgatttttttaaattcttttgtatgcttctcagtggggaaaatatcttggttaagctaaaatgtacatgcagcagatcggtaagagtaggtgagcattgcttctaaagaaaagagcaaaattgggtgccatggaattctgatacaacaataaggtagattgtgcttacagatttcatttttcaaagagttgatcattaaggacaaatttagatgacttaatgagaacattgaaatgacacattatcatcttaattcaaatttcccccaaaagaaggaaagttgttttttatttttttaattttaatatgcttcatctatgtcacttcaaaaagattctaaactccatgaaggcagcaccatggacagcttctgtgcccctacaaatttatagtgaccctctttggcacataacaaatagttattagattaagttgagcttatttgaattgagttttcaaggtatttttctacctaggagaatcttaaaaacatatctttttgtaaattttttaaattttactttaagttccaagacacatgtgcagaatgtgcaggtttgttatgtaggtatacatgtgccatggtggtttgctgcacctgtcaacctgtcatctaggttttaagctccacatgcattacgtatttgtcctaatgctctccctccccttccctctcactccccaacaggctccggtgtgtgttgttctcctccctgtgtccatgtgttctccctgaatatcatatcatttttttaaaatgagtttctcttcttgctttctctaaaacactttgaaaatcactatcttctaggttaaagtcagtggcattcagcaaagccatttctgattttatgtctctttttctcaagaagcaaattgcaagtgtatgtataatcatattgagtcacacttaataattatattctaggggaaggtaaacattcaggattctccttactgaaaacagcagtaagatcatttttaatccaatgccatccagacatagcagataatggctagctccctgtgtcaagagacttcactcttcataaagtcaatacttagacaaaaatcagaattgttcccttcttccaaacctactctgaatctctctcacatcccaagggagaaatggttcctcacctgaagctagctggtgtgcctttggtgtaccataatgccttgtagaagttaaagcaaattctctgttcccttctggacaacactttattttttcttgaccatcccaatgtttgtaatcagaggggacatcataaatgctaaatctgttaaatattaattggctagaattctgaacatttaggtcctgtcaaacaaaaaggggaaattatctgagtagtttataaatattgtcatttggctgttccagtttgctcttaccacaaaataaattatcctcaaatttagcaggttaaaataataatcgtactattataaatcatggtactgtgtgcattagtccattcttgtgcttctgtaaagaactgcttgagactgggtaatttataaaggaaagaggtttaattgactcacagttctgcatggctggggaaatgcagaatcatttccccaggaaacttacaatcatggcagaaggggaagcaaacatgtccttcttcacatggcaacgtaaggagaagtatgagcaaaggggaggaaaagccccttataaaaccatcagatctcatgagaactcactcactgtcatgagaacagcatgagaacaggataactgcccccatgattcaattatctcccactaggtctctcccacaacacatggagtttatgggaactacagttcaaatgagatttgggtggggacacagccaaaccatatcactgtggaccagaaattcaggcaaggctcaactagtcgattcttctgctccatgtggtgctgactgggttcaccaagtggtaatcagctggcagatggtctggtctggaaggttcaagatggctttgcttatatgtctggcaccttggcaagggtggatggagatctaggctcaactgggactgtcatctggaatccctacacatgccctctccaacactgtgatctcagagtagattcttgtaagagacagaaagtggtctcttaaatactagctctggaaactggcagaatgtcacttcaaccatatgctgttagtcataagagtcactgagccaatccagattcagaggacaggacataaaccccacctctccgtgaaaagagtgtcgaagatattgcagtcatctttaattggcaaagatgcacatcataagaaaataatgcagctttgtatctctcactaatgaactcatccatcaaaaggcagctattatcaaaagattaatttaacataaaaaagatcaccagctttgcatcttaaagtcatccatgtgtcttttactcccttattcctcatagcaattgctgtcaatacttccaccaaaatatcttacaaattggtcctttcctttccccttacagtacctggaggtggtgacttataaaagctaagctttgttatgagctaattttgtgctagacattgtactaaacaactttacaagcacgatttcatttcattgtgcctaccaccactgaggtatatactgtcataatctccattgcatagattaagaaaataggactttgtgaactacatgacttatacattaactcccagccatttagtggaggagtttagattgaaacctgggcacctgactccacagtcttcattcctaaccagaaactccatgcttacacaagtagagggccttggcccagaggcgtggctttacctgcatcctggctccttgcctttggttgggcacctgtggtggagcagctacatgccccccaccaaccctgtactaacacagagtcagtgtctctctgtgtgcctccacacctcatgcagaggtatcagttatttctaatatatctaaattttattttccaaacaaaaattacatactgctttagggaggcaacagtcttctttaaggagaaacaaaacgagcaacacaggagaggtaagcagaaaggatctgctgatcattagctgacatactgtaactgtcctggtttaattggcaagagaaaacagctccaagagcagagttaaaaataatgttcccaatatttcaaaatataagtggcagagagataattaagacagcccaggatggcagcctctggagtaagttatgctatgttgtgacttcactggtttcagagaaacttaccaactactgccttgatgtcgcaaagttattttgtgttttcttcactttgagctgagagagaggctgaggtgtcatgtcctaaggcatggctttccttagccccaaggtgggaaggaagttctcctaaaacccagggagcttgactgatgacaggcttgcccggcaggtgggaacaaaaccagtcaagaatagatgcacgtggctgctcagtgggccatgcagaccctctgtccgcctggggcctggggtcaaagaagagccaccattcactatgaggccttttccaagtcccagggccgacagttctgaccttccactgctttgtcacctcatcatgtttgaacttggcctctacaggcagtagctatgaacctgaccttttacagtggcctcaaaaaatattggaggagttttctgaaaagctgcttttcctttcatgtcatgaatatttagaacaaaatggggaactggggatgggggttattatatcatatgaatacatgtatgttttttttttaatttttttctacttttagacatcatgttatttgtgtagatttctctggccttctatcaggtagctttttttcaaacaattttgtcatcagaaaaatataagccccaaaacacactatttatgtcctttgtcagtcttcttcctattcttcacaaaaacctatgtatcattataatcagtgcatccatgttattttatctagatgtttcacacacaattttatctgagcttttctaagaatttgaataatttgtgtgttttttagtaaaaggaatacagcgtttcaatgtatttgcatacattcacactatttaatgatttatcaacaggtattttgattaataagaactactgaaatcaatcagtataatagtcattagtgtttttattgtggataataaaaaaaaaaaaacacataacatgaaatctaccctcagcaaatttttaagtttgcaaaagatctcactaaggatgatcctgaagttttgagccagtgtatactggctttggagtcctcaaaggagaatctaattttatttcatatttttatttatattgtgtttttaaaaaattagtaatggcataaaccagataagaaacaacataaagcagcatattctgactggtgatctacattaaaagaaaaataaataggtgcctacttatatcaaaaatgtattatcttggtttatataacaaggcaaatgaattgagataacgaatagaaatacaggaaccggtagtttgggcaaatggagccgtttagttttatgtttaatagtgctgggtcatcagtaggattgccttttcccaaggccaagaaggcacctgcttaggagagggttaacttgagcattttattgtggttgggggagatgagtttgaaggcttcagaacctacaagcctagtaccatggtcagagttcaacgtggaacagaaacattgaaatcaccaaagggaaacttcctcactttatggtacaaatcaaacagcttctcaccttacctatagaagataagttctactagaggagagagtgttttaatttcaacaagaagagaacctgctaagagatgatttcaaccccataactttaaactgtgactctatgttaagtccttatgatccaaccttaaaacgtgtcctttttcccccaggccacagtagctttcagactttgaatatagctgatgtcttcaacagaaaactaaatctttccaagcaatactgagttcatttcagttcagtgtaatttcgtcaacttttttgagagcttataatgtgatgggtaccataataggccttgaatatacagaaccaaatcagagaagctcccctgtcccccaaaagatgttaaagtgcaaatgctgaaaggaatgctgagtagtgtgatcacatccagacagatctgtacatcttgagagatccagaaatgcttcacacaggtagatatgcttcaactgggtcttgacttttgtgcatccaaattcacaaatcagcacttcttccctcatattctcagttttccccagactccagaagaagatgggtgagacttccttttctaaatgcagctgatccctgacctaatactgtttttacttcatgtggaatcattagatatatttaacattctgcatttggactaattttcttattttcagccctggttctagacatataaaataattttgaatcttcaaacaaaatacaatcgtcctaagattcagtcatctatttcattttggactatatgaaagcaaatttaaaaacgtgaatgcaccattatttttcatccagttgttttaacaatgtttaaacacaggttgggaacctggagctcccagtttgcaaataaatcatgttcctgtattttaacagatgcaatgctcttggtggcagagcgactggaggggccattcaacattgagtcggtcatggacccgatagatgtcaagatttctgaagccattatgaacatgcaagaaaacagcatgcaggtgtctgcaaaggtatttgcattagtaatgtatctgccaatacatgtatgttatacaggtgcaataacctaaaaacgaagtaactagatatgtcggctgggcttataaattctaatatgctgtcagcgagcttttcctgttgagccacaaatttgctacttcattaaaaatgtctaacaaaatggcattgagaaggaaagcaattttttagcttgcaactactcaatcacgaagaaattatgggctgccaaaaggtttcagagagccccaagtatgttgactaatccctcacatttgtgagcaatttggggggaattttctttttaatgtttgaaatgtctgcacaccctcgccctgttctctgtctagcaacttctaattatatcttcagctgtgcagaccaggcacatgttctatattttccattgtaaataattaaacatcccatctgacttccttttaagactatggtgtaactttcattaacaaatcttcaggagaaaatgctcctttgtatgaagtcaagcacacatgaaaagaaaaaaagtagcacattttcataaatcatatgagacagagctcctgggtttgcagctgtacaacacaaatgccaggtgcacaatttttatttgtctccacccagttgaagataaacaggacccgccttaagcaaaattgagaagtttgcagtgggtctcccgcctcttccttcatcaatctttctctcccatagtgatgactgcacaatgcccttctgttctcttgactagtatccctttcatgaaacactaaccaaatctatatcagtcctttaaacccagtgaccgagtgattgcattttaattgaaagtcatttacactaaaatatgtcaggcaaagagttgcatgattagctttctttaatttttaaaatcctttgtgaaagagatttcaaatgtaatcacagaggaggggacaggtagtaggaagacattgcagagcaagaaaaaggagccatggattcctactaggtctccttggctaagcatgattcaaactaggtttgggcttttcagggtgaactggtaggatgaaggagaagaaagaatctggcctgggtccctttttctccatgggagatggatgagctagagtttcataagcctttttgggggttttaatgagctcagtgtagcctgtgtaaaggaggatgctccaaattaccatcacctgttggggaaatagcacatttggggtttccatgaaaggccattttctttctttcctgtggaaaaaatagcaatcatccattcctctcaaatctatgcctagaaaccaattaatgttattttgaaaggcacggtatcccgttggtgctcaagtaatcaggtgctaagattgctaatgttaaaaacagctctagagactaggacaggaggaacacatggacaaaattatctgcagtttgagaccatcacaacttcttagaagtaggtgtctgtttccattggtgcgtgtgcatacattttccaagtcaagtattcttttctacccttttcattccattcattcattcattcatcaaatattttttgggaatccatgtggaagacatggctttgtactggggacaggagtgaataaggcaccattccagccctcagtaagcttactttctaaaaggagagacaagacactgaacagatcagcaattatataaattaattaacataacatagcaccagacaataataagtaataggaagaagcttctcctcccccagggcctggacatatttgaacaggaagtttctatcacttattatatatttttttcaaggaacctcagtttctctaaaagcaacagcttcctcactggtctcctggcttccactctggaaccccctccaatttattcttcatccagtagccaaagtatttctacaacatcaatacggtcatgcaccacacccacctccctccatgtccccagtctcccactttgcctttcagtggcttcttttgtacttagaatggaataaaactcctgcaagctcttgcattatctggcccctgcctaccttctaaccttgtttaataccactggtccttttgtttacttgttcagcaacatggtctctctctctctcagctccttgagtatacttgtagctcctctcttctgtaatgtttttcactcttcttacctttcagtatgtccatcttgcaattctctatcacagaaatctgtcacagcatctattatatatatttgttatatatatataacaaatatatatataatatatataataaatatatatatatttgttatatatataataaatatatatatttgttatatataataaatatatatatttgttatatataacaaatatatataataaatatatatatttgttatatatataactaatatatataacaaatatatatatatttgttatatatataacaaatatagatagatagatagatagatatatagatagatagatagataatatatatatgtatttgtttggtgtttgttccctacaagtcttctcctgacttcactcactaaaactccatgagtgactgggatcccagctgtgtagctagaacacagcccagcacttggcacatagaaattgtaggcagatgcttgttgaatacataatgaagaaaaaaaggaaatgcaccagtgagtgagctgcaaacaactgttaagaaatggacccatttcaagcaaagaaaccatgccttctcaagtccgacagagcttaaaggtaaaaagaaaaagaaaaaaagaaaccacttctgtaatagttacactgtttgtcctcaaccagtttgtcttgagtctgctgcatggctggtcatttcactcctgcaccctgctttcttagtggagttacatttcttcacttaaaactaaaagagctccttttttaggagagttggcctgttcacacagggagatgactgggaggccagcttcaagtttaaaaaatgttatttctgagagcatagtctacatacatggaatccaatgtctgaaatcactcccacaaagttttgtagtgtaacaagtcagggtaactaatgtcactcaccgccatacaaatccatggaatttgtggcacagtgtggaggttagacagttagatgttcctcctttacattgctactggttccctatgtccatccaaacctagaaaaataaataaatctttaataaaaggaacacaggaccagatatcaggggacctggattttaggtatgtctagtttactcactgatatcacaaagacagattttaagttcttaatatatactaagtgttgaaatatcccttagtgctccatcctcatctataaaatagctagatacaaagaagaaataatacggttttatggaatatctttgcaaattaaaatggcagttctcaagttggggttcatggtgttctaggggcccccatgaccactttgagttgtctgagaaatcaaaactattccttatgataaaacaaacaggatttgcctttccccactatgttgatgtttgtattgatggcacaaaaacaatgctagcagtttagtatgaatcaagtcagtggcataaaaacagttttatttaagagatatttaatgaagtaataaaaatcattaatttaaaagaagaggcaaggtgtggtggctctcacctgtaacccagcattttgggaggccgaggcaggaggatcacttgagtccatgagttcaaaagcagcctagacaacacagacagactcccatctctataaaaaataaaaattagcccagcgtggtggtatgagcctgtagtcccagcttcttgggagacggaggtagaaggttcacttgagtcagagaggtcgaggctacagtgagctatgattatgccattgcactccaacctgggcgacaggatgagactctggctctagaaaggtaaaaaaaaaaaaaaaaaaaagaaaaagaaaaaaagaaattggcccagtgcaaagaatctgctaactaaatgattatcttctttaaatttatttttaattgtcaaataaaattgtatatacatgtgatgttacaagattgttttgaaatatgtatacattgtgaaatggttaaatcaagctaattaacaaatgcattgcacctcacatatttatcattttttgtggtgagaacacttaaaatctactctctcagcaattttcaagtataaaataccttgttattaactatagtttaggtcaagtattaaaaattcttcaagagatcagatgggctatttattactagaatgcaaattagacatttttgtggaatttttccaactacattattatagtattgctgttaataaagaatgtactttaatatgatacatatctttgtaagaaatgttaaaatcaagagtagaaataatatagggagaccgggcatggtggttcacacctataatccctgcactttgggaggcccaggtgggcagatcaccggaggtcaggagttcgagaccagcctagccaatatggcgaaaccccgtctctactaaaactacaaaaattagctaagcatggtggtgcatgcctgttaatcccagctactcaggaggctgaggcaggagaatctcttgaacctaggaagcaaaggttgcagtgagccaagattgcaccactccactctagcctgggcgagagagcaagactccatctcaaaacaaaaaagaaaagaaagaaaaaaaaaagggataatatagggcatgtaagagtccactcacatgagaggacacaggaccaagggtcaaaaaaatgacagaaacaaaatagtgtgtctggtacggctggtacagagaaaagaggacgcaaggaattaaggaagaggagagaacagccaaacttttcaggaaagagggaaaggaagccaggagcctaatgtggaagacggagttaaggaagaactaaagccagctttaaatatcatggagaggtaaagtggttggaatttagacaaattccatgggaaacaccaacaggatttgctggtggaacagatgtattctgaaaagagattttatttcatcaagggaatggaattttcttttaaatttagaaatctgtagtttcattttccatataagccacatccatgaaattataatacacatgaactagagtctaaaatctatattctagctaagaactgggtgattgaatttatcttttttttttttttttcaaagaaaccctgggacactcttgataaacagtctcatcacatttgaagttctggatttccagactgaggctgagaaattacataaccagaaatatggttaacttctgagaggcaagctccaggtgaggccagaagctaactcctaattagggccagatatcctgagagttgtaaagtttagaaattaaaataactttttcctctaggatatgattggcaacttctcctttggaaatcatttattttattaaagcagttactattagaagtcattcccagagcctctttcagaaaagcaacaatatttataactgccaactcgtatttattgagtgcttactgccagggacaatactaagtgttttacatggtttctattgtgtaatatttataatagtgcttgtgatgagatagagctccctatttcgcaaagacagaaaagttattttccaagatagagaagttaggtgacttaccaaggtctcacggtgcaaagggtagaagagcatctgattccaaagcccatctcgctaatcgatgcataaccctaaccctaaccctaatgatgtcagtgcccactgagtcaatctcacacaagggcaaggttcagtaaatatttgctgaatagattaagtattaggagaaagttcaacagccttcagcaaaacctgcaatgagaaggtaaggaaaaggtagcaaagccaggacgacccaagctccctcctgcctgattccctttacaactatgcctagtacttccatatgataaattctaattaaatatttctcttatccagccctgtcattcattgcttccaacctctcctagagttttgatagtacacaatataaaattcttctttctctcttatgtatctcttatgtatcttttttctctcttatgtatctcttatgtatctctcttatgtatatgaaggccaaaggtgaacacaacacagtttcagatgggatatctctttccccaaactctcacatcatatctaggagaaggaatagctaatcttttcctgcctaataattgagatcatgaataagtgggacttagagactaaagaaaagatttattctcaccaagtatgttcatgcttcagtcttgtctcagatctgtttttatagggactgtcagatccattttctctcctatttggcccacaaggaagctattagggatgaggcgcattgagattatttccaaaaaatatattggctatgcctagttgtataaccaagttagaatattttggtaataacatgacgctcatttcaaactgcatttgtatactttttgtacaatattatatgtatgtatacatttttaaagaccaggggcaagagcatattaaaactttcccaatttccttttgaggaaagaatctcccagtaacagtgacaaccatggttacccttggttgaacacctgctgtatcctttcaacaaatactctaccaagtaccaggcacaaggaatacaatacagaatgctttgatttggctctgtgtccccacccaaatgtcatctctgaattgtaatccccataatccccacatgtcaagggagggaactggtaggaggtgattggattacgggggcagttttccccatgctgttctcgtaatagtgagtgagttttcacaagatccaatggttacataagtgtttgacagttcctccttcacacactctctctcacccaccaccatataagacacgcctgcttctcctgccatgattttaagtttcctgaggcctccccagccatggggaactgtgagtcaattaaacctcttttctttgtaaattacccagtcttgggcagttcttgatagcaatatgaaaatggactaatacagaggacaagacagagtccttgctctggtgacatcttggtctttctagatgccttatgtatttatttcaaatcctcacagcactcttgtaaagaacattcatttccttattatacaggtaagaaatgttaagtctagagagattaagtagcaagcctgaggtcgtgtaacaaacaagtggtgtaacggggattgcagcccaggtctgtcagattcaaagacaaagactttcccagcatgccatgctgtttcctcagtaattaccttcccaccagcaccagatagacttcagcctttgaggagccagccatttaagggaggactgttacccacagcgtactatatatagggaacctattgataagaaatgtagttgttagtgcttcaagccccaaccaagcttactacattcaccaatttcaatcctcatcaaaggcagggaagagccttcattattccactatcttccacaaccgcagttacccaacagttcagaactttgcagatttgtggaaattccccaagggaagggagaaaaaacctgaatctctgcctttgaatttcagatgtgttgataaccttcttcctatcctatcagggaagatgaaactgatctcactagatatcatttaactatattcggaataatttcaaacctaatatctaggaaaagattggtttgtcagagataatctaaattaagaaggaagacttattacattccaattgaaaccatccattcaattaattcttactaccgacgagggtagaacccattaaagatgagcaggatggccttcaggtacttaattttctctagacagtttttcccaatccacagctcaaatgaagattaaaaaaaaaaaaaaaaaaaccctaagagaacagaacagagaatgtaataacttctgtctctagctattggggcttagtttcctcatctgtgaaaggaggggttaatctaaatgtcccctaccagctctaatagtttatagttttatgaacattatagccttgattattacaggtttctttttccagcatccagatcttttttttttctccagatctttttcctttcaaaatgttcggggaaaataatatcttggaaattcagatggagagaatatcttctttcagatatcaggattagtttagaatttagttcaaataaatatatttttgttccagtatcatttatctgttttttcctttgagctcctgtattagcatgtccgttgtaaggcagtgagcatattattcctttttttacggttatttttgtgcttactttctcctgcccaggattataaattatttgaggacaagagttacatcttattcattctaacattctgcaaagagtcttcctaacacattgttttacacatggaagaagcagtacattgtgctgagttgaattcagaacatgaaaatataatgccagagagacttccagcgataaggaatagaaaataccttaaaatgtacttgaagttagtctagtattctttagactaggatagcagttaccaggtcagatttttgacatgagactgacatgggatctagttgttctatgttgtgtgatttggggcaaattttttatctgtctaaattaactcacattaaaaatgagaatgactatagtacctactcataaggttgtttgagagcacaatgatataatccatgtaaaatgtttaccatggagtaagtcaaatcaaaaccactcccaaaggctaagcattttaattgctattattaaaaatatctatggtacctaaattctaaagagcactgactcattggtcttgtctcacctatgatagtctgtggggttgtttttagcacctaaggtcggaagatcagacttgcaatccacaccccttcattaaacccatggatgtatggtgttatttttgatggcagggaatcacttagaaagggagatggatctctaaataaatgtctatgaacaaggcttttaggagaaagcaggctcaagggaaggggtagtgcaggagactgtgtcagcaatccaactctagtctgtgcctgttggctacatcaacacctccatagcaaagagctttagaggaatttccatgtaataataatttccacactattcttacattgagagaaaaattggcctgcttcattgacaggttgtttggtcccttctgcctgatttctaagaaaaaagtgaatggccatactatttataaagctttacattctatttctacttctttagttttgtttttaaaggaaaagagcatgttctcaatgatttctaaattcacagtatcttctctattcaaattctatttgtattctgcctatcagttcccacttactgcgctccaccgagaaacagggaccttgaaacatcgtttattctttgatgacttcattacctagcacacataaaattggggtttgttctattcctgcttgtaatattgctggataacagggtcagatttttcaggtgctagggcagagggaagagggaagcacacctttttttagaaagtaaaatgaaggtttgaaaacatgcttatgatgcatttatgtgatacccatccagcgcgaactagttttaactttccttgcatgtaaaagggatacaacaaaagtgttctccttttgatgataaagaaaaactcctttttctctaatctttagagatttttctgaagatttgctttcactttaacttcagggccgtaagatgagaagattacatttaatgtagcctactcaagaataaatgattgaaacacaattcagctttaacactcaatgtgtattcttaggaacaagagaaggtgctctcctggtctcctgaaaaaaagtctccttctgacttcttcctacttaagagaagagcacctgccatggaactgtgcttctcatgggcagtgaagtattgtgttagagaaatttcatggcctctgcccagtctcataaatacacctccttatcccagctctcagcacttcccttctgtgtggtgatatgcaatctggtttggttctgatcgagtcattgcctcagccagcctacatgtaaacatgtgaaggagtcacatctgtgggggaaacatgctcatttgtagtgtttgcccatttctgtggtgtaattactccctcgtgcatatttcaaactaccaacataatgtcactgaacacagagtagaacaccctgatgtaacatttcctccttatagatacgactgacacaattaaccttaagagcatagataacagtaaaataattagaaagtaatgagattttagtataattattaactttgttattaatataattcatataactgtaagtttatacaacttaatttttaataatcaatgcgtttgttaataaacacattaataatgtgtttattattattaacaatgtgtttgttaaacgcagttgttactggcttatgaaattcctaaaaacttaacatgtagttgcatggcccagtaagacctgggtccagcataccactgcttttctaggaagatttctcagatgctccagcctgggtgagttgcccctgtgggtgttccgtcacacttcttacattctataataattgcctgatttcttctccaaaccctcttgggagcagggacgtgtccaattggcatatccccagcacttatgtttgtgacactcaacaaatatttgttgaatcgtaggtggaaggaatggtagagcccgtctgatgtaaattacatgcttacttatattctgcaaagtgatcttacagaactgctttaaaccttacaagcaaagggcatatgaaataataatcatgtagtcaggccaagaggattagggcttttttcctctccacactcaaaaatttgctttgtaaagttccttgtaactcctccttcctcaccatttgggaggaaatatcaaggtgttttgctgcctgagaaatgcaaatccttcagggaaaaatatcttctcatgcaatgcaaatgaaaagaatttcttttattgtagaaaagattttaagaagtatgcaatacatccgacagatattctggaaccaagctgtgtgagcatcaggagtaaattttttaaaccttaaaactgacacagtagctggctttttaaaattgaggccaatgaaaagtggacaaaactaaaactgatggcttgccttggttcagtagaacccaaaattctcctaacagagtgctgaacccatccagggacatagagtttgccagagaacttggcctgaggaccattgtaatcaatctttaaggaaagaaacgcatgaatcagggagcaaagaaaaaagagaaaaacaaaatgagaggaaagggaagacaaaagatgactagagaagagattattctaagatctaaggatgaataactgttttgttagaaggcaacccgtaaaaaattaccacactaattaaaaaaaaaactgacatttaaaatgcctttgtagtgagtataataattttatatctaaagaaaaagtcgtcatcaagatgttttaagtttatattcaggaaaccactttttatgctattagataaatgctgttagaaatcccctaaaagtgtgtgaaatgaatttctaaggtgccagttatcttatgtaatagtataatgtagctccttttgctactacttttaatgaaatttttttaacatatttcaactaattctgatttgcttcctaatgatacgtgaatgctcccaggcacacacatttcagtcaccacttccactttgagaaaggccctagctctgtgcttaacctagaccatcattggcagggataggatacaactgctccaatgtacaggtgccgctgtttatcattttgacagattggtgataccaggaagtaaagagcccaagttgtctgccactttgcagtaagcagtggccattgcctgagctctgagcccagctgtctccagcacccacggctctgatagctctcccacgggccaatcaggaagccaatctaactattttgtgtgcaaggtcctcctaactggcttatcaagctcactgagtggctattatcaactgatcaggaaacagtattttgggtctcgttatcactttaaacaaagttgtccatttggctttgctttaatttagcccagtaaatgtagtaaaggaaatagcaaataatttgttttacatggatacatgattcattccttcagtctgaggaagaaatgttcaaccttgattttgaagagataattgatcatttgagataatgcatataaaacacatagcacagtgaagtgtctgtcctatcatagacacttgatgagtgttcattgtctttcctttcctatcttttctttctcattacagaaatctacatgctaattgccttcaataaatgtttgcaaaaggggacgattatgactaaaaattttatttcttcataatctttcattctcaattttttcaaacacatatcatgtgctggtaactcctacagatactgggatacagtaatgaacaaaatgtatgaaaacctattcatcatagagcttaaattattcatgggtaattctgcgtaatccttagatttgatttattaaccattattattctatttaattacagattacttacttaaaataaggcaccattatacctcatgttttcagtgtattcttctatgcatcatatcattctatcttcccaacagctttgagaattggggagaacattgtaaccccaaggtcacacaagtattaggagaaagattaatattaacattccaaacttatagacttgtgtttctgaccttttacaatgttctgaatgtatgtgtctctccaaatttcatatactgaaatcctaacacctaaggtgatggtatttggagatggaggctgtgggaggtaattaagacatctgggtgaagccctcatgggctggattagtagtgcccctgcagaagaggcctgcaggagcttgttagtcctttttgcccttcagccatattcggacacagcaagaaggtgccatctataaagcagagggccctcgccagataccaaatctgttggcactttgatcttggatttcacaacctctataactgtaagaaataaatttctgttgtttataaattacctagtgtaaggcattttgttatagccaccagaatgcactgataacacctattggttactccacagccatttcttgtgaaaataatggctgcacctggacaaatatatggtatccacactaatgaagatacgatagcttctatttccttgagtataaatggaatatatttgaatttcccaagtagtaatctaacagttcattcattgacactgtaatataaattagaatctcataggtaaataaaacattacccttaaaacatcaaatctaattaaatccaggtaacattaactgttacctggatttaatataaaagattagagctctgtttgcaaatttcaatatttgcctatatgagaatagcagcacctttcccccattatggaaacctgctgagtagaaagtgggaagacagaatttttaaaaaccacaggagccgagacgggatttacctgcagccactgcttttcaggttaccagtagtgactttttaaatgtataatcaagctgcaaaagacaatgaagaagataaagaagataaagaggtaaaggtataaagctacatgtgcctccaaaagagtgggcaccttagtttattttaagagaaatacgttaagatgccctaatatttttaaaggaaaaatacttgtatttagaaacctaagacacagcacttaaacctgttatcaccacacctcctcttccttcccatccctccagaattataaaatgtttctcctttcagcccttcctatcctaatgtcagcttctttaatctcagaatgccaacagacttctgagacattatcttagtaatcctcttaagagagaggattcatgagccagatatcttcctaaaatccacaggttttgcaagtcagctaggtggaaggagaattgctttgtacatctgtagcatctgtctgcattgaagcttccaaatactttcccgaattatctaattatcactttcaacatcccttggagagaagcaggcagcggtcaggaggtggtaataccgattctgtttcttaaaggggtagagcgaatgatttgtaccacaataagttggcttatcctgcagcgataacctctaaaaacttctgttctgttgtaaaaagaagccctttagtgtcttaaaatagcattcttctctggaattaaaagcagaggagggtggaacagcttcacaaatacctctaagtaaatgcagttctatctgaatcacgtctctccttggcaggttacaaccaccttcacagtatatctcagggtgggttctttggaacaccagtcttatgagaaccccatgaggaaaccatggtcaaatagttttgggaaacactactgatgtcatcctccctgtcaatgagtctgaccacatgttatcatgatggagcccttgtgaagttacctaatttaactttaataggtggaatctatgatttatataacagccatttgcccttaaaataatattttgtggaaaacatttaagagacatccattagcagggtgtggttggcatgcacctgtggtcccagctactcgggaggctgaggcaagaggatagcctgagcccaggagattgaggctgcagggtgttgtgtttgtgccattgcactccagtctgggcaacggagtgagaccccgtctctaaaataaaattaaaagatttttaaaaggttaaaaaaagaaagaaaagaacaagaaacatcagaccagacattttttcttcaaattttcttatctagaaagcaaaacttctggaaaatacagattatggcatgataaaattaactatcaggtatgtacttttctagacacatggttctgtttttctgccttacatattgtactttatcatcatagtgtatctgtgtggtaaataatattgttattcccatttgacagacgagcaaactgaggctcagagaggaccctgtaaatgttggcatggcaataggctgtcctcagcctcatccatctgcccacctatatatacttgtccttggtaaatgcaatcagtttcagggctttaagtaccatctttaagctgatgatcccaatctccatctccagccataaccaactgatctactgactctcattgaacctatggccctatccatcacattattatttctcaattgtttttttcccttattcaaaatgtaaaatgttgggatacccaagccactgaggaaaaggctaactggtctcttatactaacctagccatggccttcatgagccacaaaactgtgcctaactatactgctgctagagcaaactcagaaaattgagacggtccaaattttctgcccaaaaatttcctttgtcacccacctcgtgactctcatattttaaaaatacttttttcaggataacagattgcttgcttcttagtctgctcaggctgctataacacaatgccatgaactgggtggcttatgaaaaacagaaatttatttgtcacatttctggaggctgggaagtctaagatcaaggctttagcagatttgatgtctggtgaggacctgcatggtgttttatagatgatggcaccttcccactgtgtcctcacatgagacaagggtgctgtccggatcatttgttgttgtttttttaataagggcactaatcctattcttgagggtagagcctaatcacctcccaaaggacctacctcctaattccatcacatctgtgattagatttcaacttatgaattcttggaggacacaaatattcagacacatgtattaaacatcaaattattaatttttactttgtaagtcatctaagttatatgatggatatatgttaaggtatattctcagtataagactaatacaaaagtttttttatcatttctaagcaaaaacaacggcaaagtactcctttgtaaaccattctcattaggttttgtaaaattctgaaaaatagctcttgatccctaggctgggaacttctgtaatggaggggtccttgcgcccagagctcccaagatggccacgggtggcttccaagatggcgacaagcctcttgatctctgacctggggttcttggcctcacagattccaaggaatggaatcttgggccatggggtgagtgttacagctctattagaagccgtgggtcacggaagagaaccgtggaatccagcgactagtgcttagctgaattaggacaaaccgaggcacttagccgtgcaggaacaatggcaagcctttagccccatctggagcggcaaggggcacctcgctggatcaggagcacagtggacacccgcgggatccggaggggtgggagtcagcagtgggtctgcaacggcagcaaacagcagtggtggatggtgagcgaaagctcagctccagccgtaacaaacacagaccagaagagtgtgcagttgcaagatttaatagagtgaaaacagagctgccatacaatgggaggggacccaaagagggtagcccttgctggctggaatgcctgggtttatatcccgatcattgtccctccccctgtgctcttaggcgatagatgattggctatttctttacctcctgttttgcctaattagcattttaagctctctttactacctgatcgggtgtgagctaagttgcaagcctcgtgtttaaaggtggatccggtcaccttcccagctaggcttcaggattcttaatcggcctaggaaatccagctagtcctgtctctcacttccacactaaagggtttcttttatggcacttctgtttttctaagggtatgataggatctctgtttaggggctttcaagatgtgaggttgttgtgacagattgttatgtaggtctccacctgattatgtggccaggtgttgtttccaaagtaattagaagtcagtgttttcctcagttttggtcacagacccagtgatttctgcatggaagctatcttcaacatccaaacctgacctaaataacagaaagctactaggctatattgactaacctatgttctgtaataattaactccctccaaaaaaaaaaaaaaaaaaaattccagcaaacgtgaggtttttccattatgatgaaatatctccctagaacactaatattctttcagggcattcgtgtttctttgatttaacttaacccagtgagccacatttttcccaaagggtgaattaaaaagtccattaactctttcagtacatggcttcatgaaatctcagcaaggccgttagtattgtttcgccttaggctttacattttttaaaagtcagctgtcactttcaaagcaatccagaatagcacactcaacagatccctggagctttggaaatgttaatgccctccatcagcagcgaccttgccagagggaagtgatttaggcactacggagaaaagggcccactatctttatcacatcggtttacaccatcagcttcagaaattgtgtgagagaagaataatcaatagtgtgttaagaccaatctcgaggaatgccaagacaaagtaccgccgctctgcaaaatgctgagttgaaggagaacttttgaatacaacaaaagaaaaattagctgtagtggtaaaacaaaatgaattgtgtctcaagacggaatttgtcattgtgaatggcactcaggagctctctgcgtacttcagtggaatcacatcatatgcgtgatgaaaaatggttgttttagagttagacaacacagaatgaaataacaaaactggaacgaatgcgttgcaagtatactacatgcaagttaaggatcagcccatgtaaataaccccaaaaagtttactgaaggaaaaatatctagaaaaatcatctgctatggagaaatggaagaaatagaataaagttaaacttcatcaaagtttcctgaaaatgttactgcatttcctgtagttctagtaaaggtattatctctcgataaccagcacagagtgtaaagcttctaaaaacagcaaaggaagtgtctccacaccaccctgagtgaaatcactgtggaaaagaactggcagctcagtctctaagatcattacaatacaatgtttgatttcccatagcaatcttaattgtgacatgaacagctgtcaacaacaaaattagaggaagctgttattatatggatttcatccacatttgcttgtcctatttctataccactgctcaagagagtgtttttaaagaattcttccagtagagattttcattactcaaaggggagttactgaaattatttggctttatgtgctatacaatgaaataatttgtcatgataacaggaatcccaaacggatgtttatagaatgccaaattcaagtatgtaaaagtgagatacaattcatttaatcctgaaatcatcctgtggagtaactattgcaatccctatttttagtacagttgattctctttattgtagttatgttctataaagtcactgcaaacattgacttagcaaatactgaaccgttgcagcaatgagaaatacaaggttaggctcctgcaagccactgggcacaacagtttcatcaaccaatcaatatgtagccttgtgttatgtgtgtttctgtgaaaagacaccttatttaatatatattgttgattcattaacattgaactcatagcactataactcaggcttgaagtttgtctaacatacatatttttgctataagacacattacacatcttgtggttaggaaagcttgacagtacttcagcccgatgcttggggaccattttaaacattgaaatcaacaagaaaaagcacaaaaatgtgaaaaacattgtactacatagaccacaaagagaacacttgtttacagtctgagagctgaaataaggagagtgtcttctccaacctcagctgggaacatgactcagattttttggcactgtgtctctatgtccatgagagtgctgtgagtattaattctggggttacaaataaattttaatgagtaagcaaatttgcaaatatgtatctaccaataataagattgactgtgtatgctgaaactatgagtcagggattatagttggtcactgtgtatctgtctgggtaattctttctgttatattagtggttatacttgtttacatttcaaaattagagtttattggaggtaaaagtttcataagaaatgtggacaccattgcattgcacatttctgcttcatgaatttaggagaaaactcattgtatagctgtttttacttttcaatggttcttccaggtctttcagggatgtggtcagcccaaacctgctccagccctcagatctgcccgctcagctcctgaaaattttaatacacgtttcaggccctacaatcctgaggaaagaccaacaactgctgcaggcacaagcttggaccggctggtgagtattcacagattgataaccatggcggatgctttgttttaccaaggtcattctttgaaactcccaggagattctggaaaagtttgttataagagtcatctcatgcttatatctgcctctgttcttaattagaatattgaaaagtaatgggatctttcttttgggtcatgtattggattatttaagaaatctattaatccattaagaaactattaatgcatgtatgcagtgaccacattttcaacttcttatttctcatgaaatattaatttgaaaactaagttgccagttcttccagagatataattgcaatagcacatttcttactcatctgcttcagttcttttctgaaaatggttatgtattcaattatgatataatgcaagtttattatgacttcttatttgcaaagttttctgtttgaaagaccttgcccggaaaccccaaatcaatgttactatcatttttttttcttttttatgtgtctttaaaaagttggaatccttagaattagtcactctttgagctgtttagatgtgtgtcaggggacttagtgatatccatcatcaaagcagtttataatactcggaaaatacaaccataaacatagtaaatacaatttttaaatgtgttttaaagaccaaattttgccatttaaaaaagctcataatttcaaagaaatactgcctgattatttttaattcaatttcttccatttgtagtactgtaaacactttatatacctacaattgttagtgctattaatgttgctttgccaattatcttgatgtaaaattaacagataaaatccttaatgtcataaagcacttgaaccacatctgactgtgtcatataaacttagatctcaaagactgccagttatgaaaatacttttattagtcactgttataaattgctttatgattttagttaatatccttctatagtgtagaactcataagattatattggttgaatttggcctcaaagtaagtacatctcagcatttctgtctataaaaatcaaatgtgcttacaacctaaaggcctatccatgaagtatcaaaataaaggggtaactaactgttacattttgttataaatttattgccatttattagcaaataaaaccttctctctagtgtagatatttgtagttgctgcaaccttctactttacctggcttatatctattcttttttttttcccttgagacggggcttcactctgccccaggctggagtgcagtgtcatgatcatggctcactgcaaacttgacctgctgggctcaagtgatcctcctaccttagcttactgagtagctgagaccacaggcatacaccaccatgcccagctttttatttttttgtagaggcgtggttttgccatgttgtccaggctggtctcgaactcttgagctcaagcaatccacctgcctcgacctcccaaagtgctgggattacaggcatgagccaacgtgctcagcggcttacatctattctctattgcagtttcaggaaaagtttaaaaatagtcaccatttttcttttaaacaaccaattagattccaccaaataactagtcagctgttttaaagaaatgatggttttcattagattatattgtttaaattttactttacaaattgcattgtatatcaagatctttctaaccagaggacaaatggtgagtatgggtttggtcccttttttcccatttttgctggctctaacttagttattggaacaattcagtcttttctgaatttttgtaaaatctaatttaagaacaggagtacagtgtgagatgaataagttctaaagatctgaggtactacattgtgcctgcagctaacaatagtgtattgttcacttaaaaaaaaactgttaagagggtagatgtcatgttaagtatccttaccacaataaaataagaagttttaaaagaactgggtacattttgcacttagttaaaattgcactgaatttgaataatataatgatatgtatggcaactaattaattttttccctctgaaacagagaagccgttttccttcatccccgggagaaataaacacacacccttaaacaggggaagtagagcaagaaaaatatgtttctaaagacaatgtttttgcagcttagcataaactaagtaaagcatcaacacttcgagaattttctctggtgtttaaaatctgatggacatgaaaattgagatttgaaccttttataaaggaactttattggtaatgttcaaaatgctctagctataaaggtctcgagagtatagacaagtagcaaacagaatgaaaatcttctaccttttgcacccctcaaaaatatattttatccatctttttctgaaaatgattggtaatggttaaacgtatcatcacaagtaaaagccaaggaccagactctgtgcctaagtatttaaatcaataagccaattttattctaaaacattctcagacagcatgtagcatttacttcctcaaaggtgtggcttcaggctctgtaagtgaaaattgcagttttactgatttttttattaaattctgatcccttcccaaatggtaagaattagtgacgtgtaatgcacagccagccataagcccactttgctcagctcctgagaacaaggcactgtttgcgcatcaaacggagctataccgaggttattcctgagagacacgagttaggtccaaagctaataacagagtctcagcagccattggctctcctgaggccttcgtcctttggggttccaatatagctctgaacactggaaagttgggggagttatccttggccagactccagtccaacagtcaaacacgctcatctttaagaaggatgcactgcgaaactatccagatgggcctgtcatccattacagcctatttaggctgtttataaacaagtctcatattacctactcctgttttaattttccctggaaaagatgtttcctgaatatttataagaagcatgtgtctgagaaaaggaggataattggaaaagatttctcttcatttcttgaagtgtttcagcagaaaaatgcttccaaggacgatatcaaaacactactccaatcaccccaccccttttgccaaaatgaaaataactataaagcacttggagagttacttcttagtgccatttaaattagtacctgtggtaataactttgggccctgttggtaaatgttcttatatcagttattctaaagctatttttttaatgtgaactggtcgttatggggtttgttttaaaaataaaactaccaaccccaagctgagtaaactgctgctataccttatataaaataattgaaaacaaaactctctcttaaaaaatacaccagttccatcatttaacatcttattatatttataaggaacttataaattcttttgtatctctagggaacatttccatttgctcctctaaagttatatacacataagaagcagttgaggtagtcagaagctttcagacatactaccctaaagtggtttgtgttatccaagaatgagtgaatgtatttttataaatttagctgctcatggaaagccaactcatctgagtctatcgcagtccctaccgccaacagccatgatttgttgaggatactaatgttatcaactgcagtaattcagttaacagagtcatcctaccatcacgttgctttcttgtcaccaacaaactccccttagaagcccctctgtcctagctgactattaatgactttcaatcaaacaggccagagattattgtttgtactcaggaagagactggttatgttcctttattcttaaatgtgtactctgcaaattctcttacataatttgatgtgaaactataattttttaaaagacggttccaattcactggaaatgtcaagtataaaaataaatcagcacaaaatagctcgatttttaagatctgagcatcaaaaggtatttcaaattagcctctgtaaaaggcaattagttgtacagctcagaaaattagagcacaacatgttctacagctcacagacgcacttggacagggagtgtcagttactttattccagctgattcattagagtaaaaatggactgtgcatggtgtatcttagaggaatatattttataaaagtaaatttaaaaaaaaagccaggtttggaaattaactcaacaagttggtgatgacttagagccataaatctccagtaagtattcaacactgtactgtggatgtggatttctcaaatatcctactggtcattctgagggaatttggggtggggatgggtggaatgccaaccaacaaagctcaactttgtgcctgttctgtgctattatgtatagaataatctctttttctttttcctttaaatttgttttcctcttgcttcccagaggactgtgtggcggactatgcagcatagtgtaagcattggtcttattcttcctctcattcccatttgtctttgtacagtcattccggagagtccctgagaaattcctcctccactatccctttccaaattatctggagtggattgaatactgcacatagccaacttgtttagtcatttcctctctgcttgtgatttatggttaacaaccattttcatattcttttccaatggccaagttttcaatctaatcttggtggaagaccagctcatcgaatggctgatttaaattctgtcccaatgttcagacgatgcgtagtccgcctggaaaactagctcttccctgttagaatatattggcctttttcttcttgtgctaataagaacaaaccaacatcagccctcatgcataaggtgctaatgtttccattagctgagacatagaaaattcaagggattaaaaaataggttgtttgcttttcgttttctacttgaatttcctgatatctttcagagcattcagagcatttggagagggaacattggatattttttacttgaaagattacccccaatatggggctgaggacaagaacactcaggctatcttacttgactatatcaaccaaaataatcagttatctaatctggtttccacaataccattgcatgctaataacacttttttttttttttgagatggaatcttacttcttccacctcccaggttcaagtgattcacctgccttggcctcccgagtagctgggattacaggtgcacaccaccacacccagataatttttgtattcttagtagagacggagtttcaccatgttttccaggctggtcttgaacttctggcatcaagtgatccatccgtctgggcctcccaaagtgctgggattacaggcgagagccactgtgtccagccctgataacacttcttaaatacatgcactctacatggtatcatggactgaggaaggaaggtgactctcacctgaggggcacatacttatttgtgcagcacacctgtgacatcatagtgttaactgtttggccttaaatccaggcagtgataacacaatgtctaaaatcccttctttgaaatcatgtttttaaaaagaaattgtcccctgagtactatccccattcattattcctgagatcatatgcccatatccatatgccctgagaccagggcaatttgggtgaagaaagttaggaggtaaatctggaacaggaacgctgcagaaaggaagaccttgagaaggggacagggaagacaaatagctcaagggctcctgacactaagagggaaaggggaggggaaaacatcatgggtgggacaagtcagggttctgttcgattggtcccattgataactaaagtggcttcagttaagtcagtagtgtctgccctttccaacacaatctcttgggagctccaggttttcctgcagctggtccagttcagtttccttatctaatagttatcatgacccttgtagctttcctgaagagttatcacttccttgaacatactggaatgaatacatatcataacatccctgtgtgtctgctggacttccctacttgtccctataaccttatctaggccaaaacaaacaaacaacacaaaaaccagatgtctgttttgtatatgaatcttccaaaaatacactgtaacttttgaaattcatcggtaggtcactggtgacaaacatgttgttaatattattacatacatatttaagtacttacaaaagatcatcaagatatgcaacttttttaattgttctgaaacaaaatggacaaagcagctaacattctggcattatttcctgcctgatggttagtaccagtttcagtaaaatgctggtgataaaaatgttcttccatgcctctttggggctgttttggtgcgatttagaaactgttggttataagaaatcaggaaactgtctgttgttcattttaaattgccatggcatttcattgtcacctcaaaggattctgcacccagctaaatccactagtttgcatttcaaaaggatgtcaggctgtgcttaagaaactgctttattatctagaccttcagccactgtgtttaggtgaaactgatatttcccaccttccaccccaacacagacacacacgaagacacacacgcacacgcgcacgcacacacacacacacacacacatgcactcaccctcagtcttcgcttggcctgaacaaaaaaagtaaaacctcaataacaacagtaagctagattctccactttaattagttttctaaagataaatgggtcaaggccagattggctttcagcctccgctgcagctgaataaattatgtcccattcaccccagcaaacaaatggctactgcttcatccacttcaggttgtgaacgacccggtcttgcctgaacctgctttatctatttgctgcgaaaccccactgagacaccccagtttcattttcaatgaacccttggtaataacagcagcaaaatgcagtgagctttcaaagcagggagaaaataaaaaaacgttaaaaccaaaccacccaacgtattctgtctcggtttctgctcttctccgggcaacatcagcagcatgtggtagcagagagagccgcctgtcacaggcttctttccatttaggaggctgtgattgataaggcccaagtggggaacatcataagacacatatataaaatgatggcttatctccaggatattctgcttattccatggagtggaaggatgcacgaatctaattcaatggtatgcactgttggaaacctggatggaactcctgcccttatgtggatttttcagttcacacccaatgggcagtgaactatttttacatccctgagaagctattcttttgggcatgtgtaagaatagtgaaaatagaaggcacatagacctctctttcagtcctggcaaagttgtgtttaattgcacagggctgtataccctggggagaaggaagagtacactcactctggctacgtaactccctgggagatactaaagcccagtccacatcactgctttaagacatgttcagagaatcatatggattctgacaacgaaataatgttatgcaacatgttttggaaggggaacaattttgcacaacttaatattaagtgtgagttatattaaatcatattgggggcgatttgttaacaaaactcttttcaactctggattaaactctcctttatcctcagaaacacttaagcaagagctttggtgacctctgtatcataaaaaatgaaatgttacactttcagagccaaaatagggctattagagattttatatctattttatggcatgttgatatgcttattttctgcttcaggctttaaaatttctttcagaattcctagacttcagctaaacccaaattgatgcattcggtagatatcaatctatcaataaattattgattgagttattctctgttgcatagcacttagtaaaactagctgctatgtacaatctacattatagcatgttgttagtgctggcgtcatcaaaaggcaagtgactgtttagaaaagccgttactttccaagtcagttagacatgctatgtcttctccagagaacagtacatagtatagaggctcatggaatattaatattagcatacaataagtgggagtttgattttgcaatctcagattgactatgccaaaaaagaatatgtagaaggcatattaacaaatgaataatcattggccaaatatgcaaattaaaaacattaaacatctgtagcgtccttaatataggccatgtctaatagctcattttcccttcttaagccagaactttctgcccaaaccttgaacaaattaaacagaagctttgttgtcagttatgaaccagtcagatgcaaaagtccatctgcgcactcgtttcacggtaactgtcctttattctgctatgtaattggtgttttggtagattgattatggaagtctggatagacaagccacactaaactgctcaaaccatacctttaaaaatatttgttcatgagcctcatcagttgacatagatcttttattaaattattgaatagattaaagaaccttttccttgtcatggaaaatctgcgacaatattttctcttagctgtctgagatatttgcaccacaactcccaaatgtgatgttcatgcttatgagagatagagctgaagaaataggatatttcataaataccagttttgatgtatttgctgtataatcaatcagcttctaacagactctggggcctatggaatacattttaaaggactgggaatttggctattcccataacatactcggacactctttactgctagcaataaacctcagacataaacattgtagagaaaaaacagatgaaaaggaacccatctgagtgaaaattgacttcccttcataactgttaaaggtagaaagctatttgcaatacacaataactttattactaagttcattcacagtcattatcatcaaaggctctgacttcatgggtattttcttatacccataacactggctgagctatcgaaaaataaaaagtcaggttgatagtcaatgaatgaaccaccaccagcagcagctccattatattgcttactaacaaataatttgttggaagttggtttgtgtgatctctgtagaagcttttcctatgctgtattgatccagatggaccaggccaggcaaggccacacctataaacagtccccaaaatggcccacaacaacacaagtttatttcttgtatgtgccaagtgttcattatgcattggctgtgagtcagctacatgtggtcatcacccttactccagcatccggggtgacagagcagccattatctggaggttcacctgtcacaatggcaggggaaatggagaatgtggcaaaggtggctgttcatgtctctacctggaagggtcacatcatactgatcacatctcattggccaaagcaagtcacattatcaagccatcaggaagtcagggacatatgttcctatgtgcctcacatagagagagaaaaaggacatgttagtgaacagtaacattatcgaccacaaacactatgatgaaggcaagatttttaaattgataaaaatccatgtcattactttctccaaccctaagacaaaccttacatgaaaaggaacagaaaaatcagtctttcctttattcaccatatttattgtgcactaacatgaaccatgcgtaggtgactagaccataatcgaagaactcacaacactttagggcaaacttgtccaacccacagcccatggcctgcatgtggcccaggatggctttgaatgcggcccaacacaaattcgtaaacatcctgaaaacattatgagatttttttttagctcatcagccatctttagtgttagtatatcttatgtgtgtcccaagacaattcctcttcttccaaaaaacggcccagggaagccaaaagattggacacccccactttagaggatgacaggcaaaaataattataatttaaatcagaccatgctcttgtaaagattgccctgcaaatgaaccaactcttctatggtcttttgaaagaactaacttaaaaaaaaaaatttagaatcctaggagaaatctaagttcttattagagagggggtatctacattgtcctacaaaaccatcatcctttttcggtcaggctgattttcagcatcggatgccaacggagcttacctgaactttgagttcaatcatcattcaaccagagcaaaggatcccaccccaaatctgaaggcagtgtctcaaaggaggatacagaagttgttgccaagaaataggagaaaagtggcaataaagaaacagaatgggccgggcgcggtggctcacgcctgtaatcccagcactttgggaggccgaggcgggcggatcacgaggtcaggagatcgagaccatcccggctaaaacggtgaaaccccgtctctactaaaaatacaaaaaattagccgggcgtagtggcgggcgcctgtagtcccagctacttgggaggctgaggcaggagaatggcgtgaacccgggaggcagagcttgcagtgagccgagatcccgccactgcactccagcctgggcgacagagcgagactccgtctcaaaaaaaaaaaaaaaaaagaatgagcaaaaaccttttactactggcatgtagatgtctttcagatccagacaatatgtattttaaatgaggctttgatattgcacattgtgagagctgctcttgtatgacttcatgtcatgtttgcttaggcaaagcgatttttctgcttttctttctgggccaaactggctgcagcaaatcaaattgttctccctttctgtctctttcatacatcatcatttaaaatcaccaagaattcacattctggaacctgctgttgtcttcttgtacaatatcagttaatttctgaacagccttcatcgaaggagaacactttttacaggttaatcagggaaattgcactggctgacagcaacagcaaacttatccatgtcagtgatagtctcaggaatgtgtgtgtcattggcttctgcgtggaattatttgcaaaattgtagagctttgattcagctggaagaaaacttagaatacaaattcataaattatttatgcatgatgaggcaggaaaccaatgactttgtaaattttattctaagggattttgacctcagaaaactccccaaagcagccagcattcatttctgtgaaaaacactcatctctgtacttgaaaaagctaagcatttcctttgcttgttctttgcagctccttgaatgctagaacaaaagggtaaacacaaagcgtccagaagagctctgagaagaaaacatagaggcagcaaactgccctaattgatctactcacataaaatccaaaaacccagaggctatctttagtgcaagacatgtctgcacaaaaatgtttccagttactcaggaaaatcaaatcttctttatgcaaaatgtcttcaaggaacaagaagtatttcattaggattttaatggtgagggctcaagtgaaaggatcctcatgctctcttttgtcaagttttttttgacaaaatgaataaaattaaaagctttttacagtataatcattttttaaagtttcctttctccatgattttggagaatgagaagtaaaatcaatatttaggaatttttttaagaagctgactttcaataacttggatcgtagtatgacaaggaagggtatagtgtatgtgagtgtgagagtgtgtgtgtgcatgtgtgtgcatgtgtgtgtgtttcttttttaattactctccactctttgtgcccaataacaataggtggacaactcagagattgttacaattatttaccaaattgtagccaaagaatgctatttttatataaatgtttgtgattcatcactactttttaaaattcaggaacactcagttgttgtgaacaaaatgtgagtagcagcttccaatagctcctaatggcacacatgaattggcaccgctctcggcttcatggaagagtagagggaagaagataagagtatcctttccagaacaggccccaaatcttatgtatttttactgatttttgtcttatctgtttgctctatcaattactgaaagagagattttcactatgcgagtagacctatttttctttgttttgcagtagctcccctttatccatggaggctatgttccaagacccccagtgcatgcctgaaaccacccatagtaccaaaccctatatatactgtttttttcctatacatacatacctatgataaagtttcatttataaattaggcacagggagaaattaacaataactaataataaaataggacagttataacacactgtaataaaagttattgaatatcatctctcgtgcgtgcgctctctaaatatcttattgtgtaatactcacccttcttgcaattaagaagaggcagggcaggatagcatgagatttcatcacactactcagaatggtgcacagtgtaaaacttgtgaatggtttgtttctagaattgtccatttaatatttttgaactgcatttgaaaccacagaaagctgtggtttcagttactcatggtcagctgcagtctgaaaatattaaatggaaaattctagaaacaaatgtttatggatgatgtatatatttcacatctatatttatagttaaaacttttcttgtgaattgagctttatcagtatatatagtgatttcctttctctactaactgctgccttaaagtctctttctttccaatattaatgtagttacaccaaatttttaaaaatatttaactgaaatatcttttttcattttactttcaacatttctgaacccttatgttttaaatgtgtctcttataaacatcacatagctagatttattttaaaatccagaataacaatctttttatttcaattggaacacttagttcacctaaatgtactagaaatattgatatttatttcttccatctcattttgtgatttctatttgtctcatctttttagtcttctttttcttcttctttcttgtgggtcaattgaggatattttcttacttcactctttttcttttagtgtttggaacctaatactgtagtttttattcttctaataattacccttgaaattttaacatgcatcctaacttatcaaagtccaagtttaattaatacatcaatacctttccctcttttgtaacaatacaagaggaccttagaacaccttaattctgataattctcctcccaacttatatgctgttattatgggataatttcgttctgtcttatgttgtgtgtgttttacacaaaacaaaagttaagattgttattaccattttatactggaacttttaatatacaatcaaccacattttaccactttctttggttatcattccttttgcgtaaaaccatccatcagagtgacttccttggtctggaatacacattataagttttcctttactgagagttttatttgaaaatgtctttttgccctcattcttgaaagacatttgtgctgaactgtaattctaggtcaacagttattttctccaggtgcactgatgcttatatttcactatctcctggtttccactgctgctgttgagaagtttgctatcagttctcccttttaagtaatctgtattttctttcaagctgcttttagggtctcctttgttgttatataatttcgtcataatgtgtaggtatagatttctttttttattaattttgcttaggatgtattgggcttcctgaatttcatgattggtttctttgattgttctggaaaattctaagccattatgtcttcaaatattgcttcaccgtctttcactctctttctctactcatccaataactgactggacatgtgagactgtctcactccatcctccacatctcttaacctttctttctttcttgccacattcagaataatgtatttagctggtaataatgtatttacttctcagttgatttagtctctcaggtttattaaacagctaattaaattattttatttggcattaaacccagccacttagtttttaacgtcaatgattttatttttctagtacttaatgaattaattttcagatatgcttggtcctgtgttcaatagtatccgcctcctcatcacatttctaaattctaccttttccattttaaacatgttattttttactttgtgtctgatattctaatatctgaagagtttgctggtctcatctggtatttctgcagtttcttacaaatggtgctttatttccttatagatgtcatgttttcttggtttctgttgtgggttttttttgtgtgagtttatattccttggaaattaatcaatggaaagtctgggtggcctgtgttgaaaggtatttctatttcatcttatcctaaggattttcccttgggaaccccggctgtatgtggtgggttagtgatactggctcgtcactttagggaagccctgtattttactctcctgtccttgcccaccctgcaaatctgaggccatcaaggcttaaggtcatctgggtctgaggaatgtcctttggaccaaatccattcttagtactcttgttttcttttctgggtccccattttcacttagtttggagcctttgaaagtttgttactttcttgccaacttgttgactcctacatgctctatttcatgttgcagtgttagctgattttaggaaatgtgcaggaaaatacacatggaggcatgtacaaggtaacttccttcaccaactctgagttaagattgttttttaaacttttattttagattcaggggtacacatgcaggtttgttatataggtaaattgcatgtcacaaaggtttagtgtacagattatttcgccaaccagataataaccctagtagctaataggtagtgtttctatcttcgccttcctccatctcgcccccatcaagtagaccctggtgtcttttgttcctctcttttgtgtccatgtgttttcgtcatttactgcccacttataagtgagaacatgtagtatttgattttctgttcctgtgttaggataggaacagatagtggcctccagttctatccatgtagctgcaaaatacatgacctcattgtttatggctgcgtagtatttcatggtgtatatgtaccacattttctttatccgttctaccactgatggacatgtaggttgattccatgcctttgctattatgaattttgctgcgatgaacatacatgtacatgtgtctttgtggtagaatgatttgtattcctttgggaacatacctagtaatgggattgctgggtcaaatggtaattctgctttgaattctttgagaaattgccacgctgcttttcataatggctaaactaatttacactcccacctgcaatgtattaacatccccttttctccacaacctcaccagcatcatttgacttggtggcacgtcataccattttagagcagagcattggaacggttattttttgagttctctgtttctgataaatattctaggaagccctatttcattgggccatgtggtagttggtactattggttaatattgttccaggttcagccctaaacttccagtccacaaaggcaatagcccatctcagcagccccagagctccccaggcctgagcctatggaccctaggcaccacatagtttcactccaatacctaagctcttggtgctgcaaacttctccagaacccttactgttgggcttctttcatgaactattttcactaaaagatgtcacctatatccgtaaacactgaccttcagagaggcaaactcaggtacatcctttattttttctccttgctggcacctagaaagattctccttcgtacattacttaccaactgatatggttttgctgtatctccacccaaatttcatctgaattgtagctcccataattcccacgtgttgtgggagggacccggtgagagataattgaatcatgggggcagtttcccccatactgttcacgagactgtgaggaagtctcatgagatctgatggttttataagaggtttccccttttgcttggctcacattctctcttgtctgccaccatgtaagacatgtctttcaccttccaccatgattgtgaggcctccccagtcacgtggaactgtgagtccattaagcctctttttctttataaattacccagtctcaggtatgtcttagcagcagtgtgaaagcagacgactacacctacccaggccaatcaggcagagaagaggtaccaggactagacaaatccctggaatgcctggggcagggggagtctttacagaatacctttcatgggcagtgtgtctcgtacaactacttaatcaattgctattgtggaatattatgctccagactgcggtgattactgttttcagcccagttaaaatatcccttttatggaatttgctttataataatagcaatagtaataaaaaatagatttttaatttaataaaaatagaaattaaaaaataagaaaacaaaaataatatgtgcattctatttttcttaaaagaaaagcactttttagatggagatacaaaattggccatatttgtggcagcctcaggtgctaggctccacaaaagcagcagggttggtcacacggtgcggttctgctgtgggttgcagaaccagagtgaactaaactctgaaattggcagtttctccttcagaccacccagaagtctgcccaggccaaaactctggacctgatgggctagtgaagcatctagtatatagcagctagatagactggtctggcacacatgtgtattttgtttcatttatttattcatgcatttattccctgcctcagacagacagggagcaagtgaaggtagagagagaaaagaacagcctcataaaacctgcatccatgtggtccaaatgaggatgacgggattgcgaaagaagccggctccacacagtctagggatgtggctcccttaacttcctcttctcatccctcccaacccctgagcggagcctgccccagcccaccagatgcacagccccttttaatttgcacatggcacagcataaatgccaaattcaaagctttgcaagcacacaagccaagttcaaaatcctgactatgtgattgtgtgctaattacctaatctcatctcattttcggatctgtaaaatcttatttgtaatgatgatagaagccaatgtgcataaagctcctagctcagccattgtctgtactcagcctagatattcttaacaccagtgataataatagcaataacaatcatagattaagcttagctgttattcttattaatcatattaataaatacaaagtcaaatgccacatattctcacttctaaatgggagctaaataacgtgtgcatatggacataaagtgtggagtaataggcactggagggaaagggtaggagggtgggagggtgccaagagatgagaatataatgggtgcaatacaatgtacaatattcatggcataattacactgaaaacccagatttcatcactatgcaatgtattcatgtaacaagattgcacttgaaccctttaaacttatacaaatagaaaaatctcaagaacatttaagtacaaagatttaaattattcgataggatttcaagtagattttttaaaagatttttcatttattcagtgactcttcaactcaaagcctgtaggtaaacacccttgccccagccctagtctttacaggaagtggctgatatggcttcctgctgcagcatttaagatgagctaaagctactaaataaagcttttctcggcacatttaggactagtcgctgaggactagaagagaactgcaagctaatgctggcttccggcattgttgtcgaataaagttaacactggagcttctctccaagttacagccacatagcaagatgacaatgaaaagtcccagggtgaacatttgggaagctgataagagattcaagttacatgaaggtatttgggaaggatgcagctaaatggtggatgaaaataacctagaggaatgatggcacacagagaggcaggggacccatggcctctccagtgactgatttctgagagcagcgtacatgcctgtggcctcaggtcaccaccgaggaccatctatgaaagccttaaaaaaaaaaaaaaaaaaactcaagccagacaaggtagaaatactggtagaggacatgaaaaccccaaaataggtgattgaattgaatgtgaaggtgaacagcatttgaaatagcctttttaaaaaaactcccttgaaggtgaacacagggacaagttaccaactgtaatttaactgtaaaatgatcagcgcttcgagagtaggtttgactatggggaatgacagccacaagaagaatcttgcagctatttttatcttccctcatcttgacacctccccttttaaaagaataagagaaacagaggcacaaagttaagacttacggcacaaagatagcagataagaggcacagagataagggactgaggaaccagaacaagacctgggttttttgtttttttttttaatttctgttctagatttatgtccacccattgtcctatctcagaaaatgcagcatagttccagattgaagcagaatctgtgtggcagcctatagtcgttcaccaaatactaataaggatacgccacgtttgtgacatgcgtgaggatagacaaagggttttcacatcccatatctcatttgtaaaacttgaaacaactggaaccagcaatttgatgtttctcttgaagagactcccagggccgaatgttctgttcccaggggcctaacgttagaatcctcgtggtgtctgtgatgtttctattgccgtcaaaggtcaaacaagaggtgaacagacattttagggatttactgctattttgtctcttctttgtcgtccacagtactttcataagtgcctctgtttggggaaaagaaaagggaaggaagggaggagaggagggagggagggagaaaggaggaagaggagaagagaagaaagaagaaagatatgttcctttctgacaccaggactatttttagtgcccagagcaacttcagagaattctatgatgaagcctggagaagaacgcggctcactcatttgtgctcactccaaggggagtaaagaaaggaacttggtgaaaggcagggcagagggcagtcagtctggacgccagtaactactgtgtgttcccagaacgttaaatcaactatgcatctgagtttgcttttcattaaatcactgttatattctcaaagactgctgatcatgggaatttgggattcaaggtcctcattttataagcgcttcctatatactaatagtataatatcaagtaaattattttcggttgaactgatgattaggagtaaaagctatggctctattgatttaaaacaataagaagctttcagcataagttatttaaaaggctcatgggaattgtaaaaagcccttccaggattactggcttttggttaaaatccctattacatatttttgtcttctgggttcaaataattgcattttcttggattgaggtcagctccttcccaacccttttgatccgtgtgacccgaagagctctttggtttaccatgtttggctttgagctgactcacgccaaggctaaaagcaagataacttgtttgggtaagcagagcaagacgacaatgagaccagagcctgatccttagaagctctgaccatgacctccttccctcaaagacgctccttcgtggtggtcacatggggaagccagtaagatagcatccagccaggcatgcagattgacattactaccagggacaagcaattccaaacatttccagaatttgctctacattcagggatgcttagagttggaagggatgttaacatccatctccatgccctcactttaccagtgagaacactagaatccagaaagatgaaataactaaaatcactttgactgtatttatttatattttcttccactaagatcaggtatttttggtatgcttgtgcacacacacacacacacacacacacacacacaggcacatatattccaaaatagagaattatcttaccttatttatcttccctcatcttgactcctctccttttaaaataataggagaaacagaggcacaaagttaagatttatggcacaaggacagcatatcagaagtgcagagataaggagccagaacaagacctaggttttttatttctggaacagaaataaaattatttcacaaaattataatcacaaagaaaaaaagtagaatcagactccttggatccactgtccactttcacaaacaggatggatcctcttttctgacagactttattttcttagaacagttttagtttcacatcaaaagtctgcccccacgtaaatacagcctccccaaccatcacaagatgttcggtttgttaccatcaataaacctacattgactatccttttcatccaaactcatttaaaattcactgttaagaggaattctatggcctacatgttgtcactttgcagtgaaaacacagaaaatgtgctggaaactttagtgagtcctttaacctttcctcttttagttaaatggcgggaagcaacacagtgagtgaaagtaaaggagatttcgaagagtctttccagcttgcaaacacgggcactctgtgagtaaggaaaattaagtcagagtaacttgttccctcctcctatgagacaatctattatagaaatgcaagcgtgggaaaaggagggtctacctccagctcccccactggtattttatcaacaataacgttctcaagggacttttacagctaaatattttggtagtttagcgtctatcagcaccaacatgagacagcaaatattctcaggatacttttgggactcccatattccaaggcatagaaaggggaatttgttatctttttctccacatgtatgatttcatgcataattttaaaaataagggccactgccttctgctggagcctggctgttcacgtagctgtaacggttttactagttgtgtgtttgtaaaagtgcttttccccctctgtgtcagcaaactgcatggcggacggggcttggagacttggaatttcgtggagatgattaattacagagcatctcattgcagatgtttttctcttctcccttttgtgggccttttgcgtctctttcccagctcttctcttcttctctatcctctgcacccaccatgtcccccatctctacctcacagctgtggcttctctcaggaaatgctaggccacaacacaggaaaaatggtgttttcatatcacggttcgtttactgcagtcagagcaaaaaacgacagcaaaacattctaaaaatgccaagcacttggaggaatgtctgctcacgaaactgacactttactctgacccaggtccccttttcaagagtttcacttttacagtaacactgaggtggtcacattgactaaaaatatagattcaaaagtgagtgggtcggagtatttttgtgagaggtttttcgtctttgttttttcactttattaacaggaagtgtgatacccagtaaaaaaaatcactgccccttataaaatggaatctaagtgcaaagagtttcacctagttttctctttccttaaacagcttcagtgcctccttttcttagggcaggagtttagctgagagattttctaggagaggaaacagggccacattgcacacctggagatggtaaacctgccttcttcatccaagcatgcttcctcccccttcccctccgattttgttgggagaaaaaataggaaagggtgatctttcctgcttcctggagatcgcctacaaagccaacagtagagaaggatctgtggctgttgtctcaaaggattcctctgcacattagaccagcattcggaatatgtgggactcggatcatttacatgagaaacttattaaaatactgattcccaagggccaacccagggccacactaagtcagccagtggggtacaggggacagcaaatctgtatttttaacaagttcgcctgtgatcctgatagataccacctcacatgctaagtggactgctactgctttgagaacctaccttttccatctttccatgcccgatgccaatgtgttcaatgcatgtttcttggaagaatgactactcttaattagacatgtaaaatgacttcgtggctcctacatggaaggattcaccctaaagtgaggtttccagtggagagagggaaaagccacacgaagacttcctggggatgctggaacaaagctttgctttctggctgttctgtcgctgtcctgtcgttggtctcactcatggcagctgccgtctgacatcactgctctgtgtttgtcaggagcagacgtgaagagagaccccatccacagccagcagcatggccctgcctcctgcaagtctttctaggaagcaattgtatataaattataaacaaacaaataatatttctgaaccttatgttagtcactgcactgagtatttcagggaaaggaaagggggctcattccagtctgttgctccacgtccgctggggaagtgggcagcctgctgtgggaggagatgctggctggggagcccctgcatcactatgtgaccttcgacaggtcactgcccatcaccaagccttcgtttgctcatcgttaaaaccaggggtgaactgcagaggccctgcagtccctttgagcgacaggactgtaagcttctgtgtgagtgtgaaatgtgtttgctgtgacccctctgaacattgaccaatgggtccccatcaactctggagctcctgaggaagaaccccggggggggctgaaatggagttggtgagatacttcccactgacactggagttctcagctttatttcccttttgaaagagctggttagtatcttttagagtaagatttgtatttctttcttgcccaaaatggagccagagagggacaaaataaagaaactaaaatgtcctcaagaatatccaaaaagaacagaagtgcaggaaaatgatgcttaaaatttaagctcctgaaaacatttggcaaaacgctgggttctccctgcatgttcaacgttaggaattttcacatgagttcacagtgttcccagggcccaccgcaccctgggcccctcacatcttccacctcgaaggatgtcgttcccagcagcagatctgtgcctcgcagtaccgtctgcagctgccatttgcttagtctgggagatgtccaattcctccctcagaagagaatcacgctttcattttccctttgaggtagcatgtcccaaattacacagccaaggtcttcatcccaggggggaggtttattctccacaggatctgcagacagtgagaaaatgcatctgatcttgaaaactgtggttgaacaattgtgtaaatgtaattgaaattcatgtttttccagatgaaaatggacctccattcacaacatgggattgaatgggtttaggagattcagaaaatcttgggttgtctgataatttcccaatattgctttacttctcctcctcctcttcctcctcctccttcctcctactcctcctcctcctcttctcttaccttggtcctatttgggacaaaaaaaaaatccctgggtcagaaattttaccctttcccataaacatgactttttgaacctcccaagaggcagaaacgaagccaaatgtgattactcagcctctaaagtttcatcatgtagtgattcatcaaaggagctgaaggtactgcgcattgctgaacttgaatatgccttctgagaggctcctaccatgttgctttcatgaagaaatagtgatccttgaaagggaatttcacactggaacagagcaactgtgctgcctgctttctctgtgttccctcgatcaggactgataactccctgcataagtttaatcccacctttcctcttcttctctctctcacattagcaattcttatggaaacgatgcaacccttgcctatgttatgcctgcctagtaataatttttaggatcattttcaaagatcctggggccagcaaaatttttaccgtttaaagtctgtttggccactggccaagtgaccttgggcgagtcagttaatttctctgagcctctaactcaggaactctcagtcttgactgtacatgaaaattacctgggaaacattaaatactgatgcctgggcctcgtatttagagatgttgatctgtttggcttgggactgacccagcatctgtatttggaaagcttcctaaagcatgtccttggggtgcagccaaggttgctagccacttccccaagtccttgtttatcaaaatgtgattcctaaactggcagcatcagtatcacctgttaaaaaaatgaagaatcacaggtcctaccccaggcctgcagcatcagaacctgcatttcaacaagatcccaggtgattcgtaggtacatcatgctaagagaagcacagctcaaatccttgtctgttaaaggtggatgataatagtcaatatgcaatgagctctgtgctccatgtttttccctgtgtaatctcaaaaaggtacagaggagaaactgcatattcacctatatatctcttgagaccttagcctatttcaaaaagctctggatacgagatctagtgggtttgttgggttgattgctgtccttttatgtggttttcttaagaggctgattgttacattgatataaccatataagactgttctacgagtttagtatcttcctctgatctcagaaattgggcctccctccaaatatttaataaaaaaatttgcctcctttttctatcacattttagattgatttggagggtgctacatcaactctaactggcagatttaagaaactgtatgcagtgatttttaggatggggactagtacaataggtaaaccagagttggggtcagctagtcagacaagtttctttgcagcaatcagcaaactatgacctacgggccgagccacctattttaataaataaagctttattggaacacagccctgctcattcatttagatattgtctaatgctgtactgacagtacaatagcagcacttagtcatctcgatagagaccctatggtctgcaaagcctaaaataatactacctatcctttcagagaggaagtttgcccgtccctgatttacagcaacccctaaatgaggccagggttgagtgattgctgaccatctgggcccatatttttagttggttccatagcccagtgtacacccctaatcccaagcagattttaagcagctgtgtggttacatggagtcaggcagagggcccagaactgatctatctgcattgtagccacaaataagaacaaagagaggttcatccttgtccacggacagcagcatttgtctgtcaagttgttggaagtattgcttgagtgtccacctaaaatggacccttcataaattcatgcatttccaaatagtatgagaaaggatcctagtatgaaaattctgagttaaacctgggaatacaaagatttttaggcaagatggaaagcaaggatcactacttaggaaaagtaaaaggtgaattaatttgggtaccagtctttttcaagcaagagatttcttcctcagggaaagttttaagcattggaatatagatattaagccaattttggattatatcaaagagttcgtcaactaaaaacatgtgctcttctctctctttttttcttctcgtcaataagcgatggagaaatctaaagtcatgtaagattttatttctgttctccatctgagtctcagtcattgcaaactatgaggcagtaatgctttgtgcaacaggaattaaagaagggagaggtggataagagcaggctggaagaatctccccgaacaggttctagaaactggacattcctttgactattacccgatattcaaaaatttaattttttcttttataattcttttgggccccttttctcatccttttttggctttggtttcttccaataagtgcttatgaggccaagaagttggtcactgggggctttaacaaggcccatggatggcagctggattcagctgaactgtagtaattagccatcacctaatcttattcaaatggtgctcctagatctgcaatgtgataaattgtgaaagttccaagtagggggaataaaagaacaaaagaaagatactagcagtcttgggtctgacggattgctcaaattatattcttgctgttccattttgcaagtttttatcaaaatggaaaatgcgaagtctttgcctaatgtctctgtacatagtttttgttgccagtttattctctctggtgtggggctggctcagccgttggtctctggcatggagataccaaaatgcagctaatctgccttctgagtagagctcaaaacatgtgatttaaaatcttatgatagtttcatagaaataataatgccgttgtgtcgaattgttgcaagaaatagattattttcgaaaaggtttttgtttcctgtaatgttctggaattttttataaacaaaatcagtttggtggttttcactgaattgaccagtaatgagttttgctatgagcgaatttgatgtcaggagattgcaagagaagtaacagatgtgaggatctctgtttacaagaaagacacttttctctttggccactgcctgtgagttatgagagaggttaacattttcttttctctgtatgtttacatgaagtttctggaaatcattgcgaggattctgtacatgacaggattttcccaggggcgatagatgagggatttagagatgaaattggtctgtgcatcagggatgggaaaggattccagggtcttcatctgctttatgaattaatatcggtatacattaccctcttaatatagtgctgagccaggaagtcttgtgagccacctaagttagctgtgaaatactcagggcgtcccttaattttttactataaatttcttccacttcatttctaactttgaagttttaggtaaagatagtttctcaactcatattttgcccttttccagattatgcattagatgcagtcatggccataaatctcactaatggccagtgctgtacggcatcttatggtcagcatctgagtgtgcaggctctctgtgctaatcctgggattccagtaagtcataaaaacagcggcttaagaaagtttgcatttttcccctcttgtcaaactaagataaacccaattttagaagaggtacagttcctatcccttcctggtgaatcctaaaaggaaatcaatacatcaatgcattgtcctttagttgcactttgtacattttcctgagaacttatggccaaattagtaaatgaaatgtgtaagacattgggcagttttgcaatgcacttcaagtcatctgtcttaatccctgcaataaccctaagagtagggcattctctgtcttgctagtcaggaaactgaggtccatggaagctaagtatgtttccctgggattgcacaactaagtagcagaggtaggattcaagttcggatcctctgactccaattaccattccctttccactgcaacaggctgctcatgtgtaggggagcatgcaatgaagatagccagtgaagctgagtccaaatgcatgatggagaagcctgtgcaactattaggatggagaaactattaagatggtgggaaaggagaatgggtgtacagagagcagagaaggagagagaaaggtcattttaaaaaaatgaaatgacaactttgagtcaagccccttatagaagagctcaccctctttctgttttctgatgctccccacattgcctttatcaagatttggaaagatatattgaaacttggaaggtatagggtatcttctgtagttccctctatattgttttattacctagaaagagccagagggtgaatatgttagactttgcaacccagtggtctctgtcacagccattcaactctgacatttttatcttgaacgcagccatggacaatgcataaacacatgagcatggctgtgcttcactaacgtttatttacaaagcagcagccagctggagaccactgtttgctggctcctgccttaaaacagtgacttccaacctcagctgtacattacaaccacctggggaacagcagaaaataccagtgccccctgattcttctctacaataaccaaatctttctaaagtagagtgcaggtatcaatatagatgtttaaagcatgccatgaaattctagtgtaaaagtaagatggaggaccactgtcctagattctgaaacagtggccttctcattatggttcctgggacaacagcatcagcattccctggcaacttgttagacatcgagttctcaagccccattccagacctacggaaactgaaactccaagtggggccccaaaattgtgttaacaagccctccaggtggtgccaaagcacaacccagtttgagaagcacaagtctgggacctagaaaataaggattcagccccagagcccttgcttgagtgtcttcctgagcacatcaggcgtaatgttctagagccagccctggaccttccatcggaaatccagctttaagctctgccctttacttcccctccctaagccccagagtcttcatctataaaaagagtaatattaatagttatacctaatttatagctaattgatggtgattgggtgattaaaggtatgtgaaggcagtcaaactattagacaccatgcaaatgcaactatttattgtgattgtaactaacccttcagaggtagaagtacatgcagttattactcatgggcttggtccatgactctcagtccaggagtgtgctgcggcccaaagggttactactaagcataatctagaaagtacttaagagtgagttgtcttatccttaccaaaaccatggtggttctggccctctggagggcaacaacgctataaagggaagaaaacaggatcagaaagaagtccctatggagataaggtgatagagaggatactaccatatgaaagcaggaaaaagcctttcaaattaaggtggataggatatgctgaatgtccacaaacccttataggaagtagacaaagtaaaccatgtatcctcctgggatctttttccaggagtctccgagccacactgggtggtacaccttgatatataatccttgccaagaagtagtatcaggtacaatcacaaacatattcaaaaaggtccagagacctttacgaataacacacataatttgttccttagacaatctgggacacttcagaggcaaatttacagtcttttaggtttgacatctagtaggataaatagttgccataaaatgtcccttaaacactgttttagaatgaatatacaatcctgaaagaatcaggatctaacaaacagtgggttgattcttgagttcttgtgagaagaaaaccaagacactttgcaagctatctgttgttttatatgtgtgtggatttgaactgcatgtttctgaaataataaagaccttttgggaatcaactatcttatagagactccagagttattatctgaactttagggagaacatccatgccaaaatcagcaccatctgttaaattccctcatcgttctcttcctgtcttactgaaagaccctgctctcttcactgttgttgtgatttttttttttttttttccttcttgtttggtcatctgcagcataaagggtgtagagaggagagtcagagagaagtgtgtcaatctttacttggacagaagcccaggaagtattagttagacattttcttatgtagattggagagtcatttttgtgagtaaaatgccctgcaaagcattttgctggtagatgctcggaaaatgttgaggcaggttaaaatgagccatgacacacccgagccgcaggtgtagcatttagagtccagtgaggggggattacctcctgttctcctgctagctttgctgaaattgtttaatcccaaaggataaatccaggctgcttttctcagggccatataactgccttagtacatagagctgttgaaatatgaaccaagcagggtgtgaactagctcaaaatatgctgatttccagatgttctttgattctgtcaaacactgattgcccccaaagaccatcctgagttgtggctgccagtgattcctcatgtttctttccatgatcaaggcaataattttaaagccccgtagtctttcttatgagcctgtgtctgggtcttgtctaggtcatattttacttctcagtatgaaaatgcagagtctcactggattgcgctgtaaaatatctgcacgtcggtagcggttttttaatttgttgctcttcccaggatggagaacctttctgaattatgaacgaagggttggtgctcaatatagtgaccttccgtgaaagagaggttgtggaatatctgctttctctgcaacaacaacaacaacaacaaaagaaaggaaaaaacaaggaaagtaaatgtgagcatgttttagggaaagtaatcaaaatccaaaatcattgaatttatgtttacagaaggaaaaaaaaatcatttgcgaagcagacttatcactcacactattattgcattccaaaacttcattctcttaagaattaaaaaaataaataaatccagagtgtgaatatattggggatcaaaaatgctaatgcttctaggaggttcttttgaatttgttttatgatatctcagtaaaataaaggcttatagaaacccttctaactggtgggttaaatgtctaccactagaaaggagataccacaaggaggaaagaatttttacacctccttctactttcaccctgttcagagacaaatctgtggccaccagcctcagcatcccctgagcctttgaaccaacacatttgccctcatttcttatgaggagaaatgatacagaactctttggagagaactcttcagaagacctggatctgggttcacatgggggctttgactcattggcagggattttcatgtattgaagccttgatattctcatctgtaggatgcagtaaatagcgcctgatgaggaaagggccatcgtcaaataaaaatataaattttatttcatctaaattcacaacctggttaggggtgagggcagagtcaggacttggagctgccagggctagtaacatagatagtacatttaattcatgatatacattttttttcttttttttttccttttttgaggtggagtctccctctttcacccaggctggagtgcagtggcgcaatctcagctcaccacaacctccacctcctgggttcaagcgattctcctgcctcagcctcccaagtagctgggattacaggtgtgcaccaccacatctggctaatttttgtattttaggcagagacagtgtttcatcatgttggccaggctggtcttgatctcccgacctcaagtgatctacctgtcttggcctcccaaagtgctgggattacaggcgtaattcatgatatacttaaaaaggtagttagctgtgtttttcaaagtaatcagatctacatttaaataataatatccaacgggagaagacacagaaagccctcagaactgggcctagtacacagtgaggcacctgtgaacattcacacccattttccctcctcttcacgcctgtgccatctgccaagtcctccatctcatgaaacacctgaggcattccatgaccttcgagggcacacgctaagtttggacaaaggcaattcgcacacgttaagaagactttctgccctagtgattgctgctgcatcctttcacttgtctctgcattgcagtggatttctttccgtgagcattgtgattgaggttcttccttagcaacaatcgttttaaaaaatagaaatcacacttagatggtaaattctctcttttgggtcacagatgtgggagataatcacagcctcttccagggattactaattagtcaattcctagtaatctccagggattactaattaccagagattcctaatctgcttctgggtgtggctgacaccagaaagtttgggggaacccacaagcagcacccaatgcaaatggggacagagaacccactgcttcaggagcagagatgaccaatcctgcttgccagcaccatctctgcagagagcagaaactcctggctccctctgcttgcctccctctaccccaagtgacatccttgagttcacgccactcctgcagagagttactgcatctaccagattcaataattacaccatatttggtcctgaggttttctgaccagccatggtccatttttcccaagtgctccatcatgacagcaatctattgagggcaagtgtgctctgagaaaactgtactggtgatggccagcctctactgagacctaaccatctgccatgaatgaatatattcattcatttaatccagataaaaatcctgaattttacagttgaggaaatggagtccgagtggccagaagaaatttcatgaattttagaagtctgtagtaaacccatgtaaaatgcctcgaggagagcccaggcaggaactggtttctctgtcacatacatgaggctgaattagggactgagtcatggtgggagatggctgatgttttggaaatggccctaatatcgagctggtcagctttctatcttgccattgcccatagctggagaagggagtgaggccatgatctctgtctggaatgaggcattgtgctctagccattgacctagctgggtaaaccctgaatcagttagttaaaggctattaccaagggttcagtgtgaaggagtgttattttaggagttttccttttttttttttaagagacggggtcttgctctgtcatccaggctagagtgaagtggcgcaaacacagctccgtgcagcctcaacctcctgggctcaagcagtcctccggcctcagccccacaagtagctaagactactggtatgtgccaccacacccaactaatttttatatttttatagagacaagagttttgccatgttgtccagggtggtcttgaactcctgagctcagcaacttgcctgcctccgcctcccaaagtgctgggattacaggcgtgagccatcgcacccggcctattttaggagttttctttcctaatcactcccttcctaacacccgctgtcattcataagttacgcgatgtaacttatctctttgactgctcactcggggcctgtgatagtcagggatacagcctcaggaaatttactgctaaagagaaaataagttgaatgtgaatattttgcaacttagggtcactgttatgttagaactctgagaacaggaatgcatgaaaagatcaagggtggaagggggatgatctttgtaggtcaaagtagtaaaataaaagtgagctgaaatggagtgagatgtagtcctttggctctaaattttctaagaggaatgatctatggaaactaaaatctgcacaatttttaagtctgcaacctgcatactttcctttttttttttttttttttttttttttttgagacagagttttgctcttgttgcccaggctggagtgcaatggcacgatctgggcttgcctcaacctccaacttccgggttcaagcaattctcctgcttcagcctccccagtagctgggattacaggcatgcaccaccacacccagctaattttgtatttttagtagagacactgtttctctgtgttggtcagtctggtctcaaactcccgatctcaggtgatccacccgcctcaccctcccaaagtgctgggattacaggcttgagccagcgcaccagcctaatttctaagtttgcttaaagatataaatcatgagaaaattctcatttctccataaggtggtatccactcagttgcttataggtatcaaaaaggtaaagaatggttaaacggcaactgggagaaacttaaaactcctggtaatagcaggactgggatttgggggaaatcattttaattgtggagtagtcatgcattactggaaaataatccatcactaactgtggatgttgcttgttacctatgtaactcctctgaagaacattcccaaaaatttagaaaaaaaaaatctaccaattatcaagaattagaaattaaaaaataaaaaacccaaaggaaagccatggagctacattaaaatcattccattcccacagctctgtttgtgcaaattaaaagaccaaaattctggaggcatcacacaattatttggccttggggagatccttcttctttaaaggctataaaattacattcatcctgaacacctccaaaggcatgtatatattgtgatagatacatgtgtatacatgatgtgtaactatagaggtcactatgtatataaagccaaagaagggttctacgtaaataagactttaaatagtgtcatggtacttaaatggaaccactgtataagattcttaagtttcaattacaaatattaacagtattaacagtttcataaatggagacaaagaacactcgtttcttttcgtttacaatgaaaaatgagaaaaggattatccagtgtgcaaatatttgctgcacgggaatatttaatacatttctgtataaaaggttttaatatgcgccccttgctaacattaccaaatcatattaaaagtatttagtacttcaaatagtctttagtatctctggcctcattactgagaaacatctggaaggcaataggaaagaaaggtaacactggcattatcttctattgttacctcttgcttcttaggtattaatttgtaaaatgaggggaaaatcctttccaaatgcacaggttatcattattgaacgacaagataaaataatagctaatagctaatatttgttgagtattgacttccttctaggcacttctatactaacaggttctgtaattaacttcattgggcagatgaaaaaatcctatttgaaatctccttctcaactcaggctagtagtagtttccttttgcctcttagcttgttccctaatgatgcagtaaatatcatgttaaagattgttactataggctgggtgcagtaggtcacgcttataatcccagcactttgggataccaaagcaggcggatcacttgaggccaggagtttgagaccagcctggccaacatggtgaaaccctgtctctactaaaaatacaaaaaattagccagatgtggtggcgtgcacctgtaatcccagctccttgggaggctgaggcaggagaattgcttaaccggggaggtggaggttgccgtgagacgagatcacaccactgcactccagcctgggcaacaaaagcaaaactccgtctcaaaaaaaaaaaaaaaaagattgttactatgctaaagaatatatcatcaagatgaaccttaaatttttattggatttggtctaatattttcaaacaaaatggcagctcattttttaaaattcaaaggaaaatatctttcataacttgaataaatctcaaaccaatttggaaaatggataaggattacagtgacatatgatttccccgagtaaggtttcagttcacagaccagcaattaatgaatgatattaataatgcattaggactgacaatagaaatcattttatacctcacattgtaaaactgagtcaaaggtaaataagttatgtaatgtaggaaatatctgggaattagtaataagacactgataattcggggagagttaaaggtgtaccataaaacagtgtttctcaaagtagggttcccatatcactgcattggaatcactcaaatactgtaaaatgcagatcatgtgtgccaccacagggattctgcatcaacatctgccttttaaaataaacctcccagatgcttcttctcactataataaagcactttgaagaactactatttatttcgttccagtagctgaaagtatactttttggttatttaatagaaagcactactgtgagttgaattgcgtcccccaaaaagatatgtcgaagtcctaacttccactacctgcgaatgagaccttaattgagaatagggtctttgcagatgtaaccaataggtcgcataggaataggatgagccttgaatccaatgactggcttcctaataagaagggaatttggacacggagacccagaggaggcacatacagaggaagaacaccgtgtaaagacagaggcagagatggcagtgatgcagccgtcggtcaaaggatgcccaggagccaccagatgttaggagagagcagtgcacagatcctccctctgaacctccagaaagaaccaacctggtcaataccttcagactccgggcatccagaagtgtgagagaatacatttctgttgttttaagtcaccccgttgtgggactttcctggcagccccgggaaactacacgtgcgcaaagctaagaactggaatcccacggggaaattctttctccatccgtcactccctggtgcactttcttctctggccctcagtgttgggaactttatcaggaggttgcctcctgcacctcggggtcccttgtgcttctccctcctgtctctctcgtaagcccatcctcagtcctagactgtctcgccagctccccgttcaatacttcaaagagcagctgtccagggttgcagctgattttgcctgacactctcccaaaagagatttgagggatttcctgattcactggatggccaatgtcaccctgaagtatgaggtttttcacaaattaaactggaaaacatatctgaaaatctcatgccctgccagaactgattaaaagtgagaaaggcagagaataaagtaacacagaagtgatccttgtcatttttgccagattacatttcccccatgtagcaacgaggtgtctatcactccgggatcatccacttcgagggcaggctgagtgaaggtcattttggtttttattgattctatggctctggcattactcataaggatttacggtatttaacccaccaggagaagccctgaactataaatgactctccttttgccaggagagcctgctgcatcataagtgacaccggctacatggattccttcacagccatctctaatgaagcccgcagcctttgcctccgcacaaaagcacacggcctctcatttcatggggctgatccctcctttggctctgaatcagcacgaggttgtttagcttactaagtagggtaatccagatacagggacagaaaaagaactgagtgcataagactcatgctgttcctttcacgtcagcatcctccaggaccaaaactgggaataagaaaatgaaagtcgaagagcatgaaatagggaaaatagaaaattaaggctaggattattaaggcttatgaagtggtctcgcatgtgttacaaggggctcaggacacaacagaggcacaggaaatatatttgttgaagaataagggaatgaatcaactttgagagcttgtttaaaacttgttattgttgttaactttttttttgaggcaggatcttgctctgtggcccagcctggagttcagtggtgcaatcacagctcactgcagcctcaacttccccaggctcaggtgatcctcccacctcagcctcctgagtacctgggactacagacgtgtgtcatcaggcccagctaatttttgtattttttgtagagaccaggtctcactatgttgcccaggctggtgtcgaactcctgggctcaagtgagcctcccgcctcagcctcccaaagttttgggattacaggtgtgagtcactgtgcctggcccatcattattattttaactaaaaacttttcctcctcagaaaagaattaaggatgttttaaacacagggctaatgtttattgacggtgttctcacaaccaataatttgtgaacccaggactaaaatgggctcagaggcaaaaagaaaaaaatcaacaatattgatcttatctttatggaaaattttgatattttatttatcacataagcaaatgcctcccatgcctcctaggccctgccctgtgtgaacctttagaaatgtaaagaatgttttgttaaggggagaatgtgaacattcaggtttgaattaacaatgaattaggaaggaaaagccccttggaaccaaggaaggagtcttccacatgagcttgaaatgaaacaacaatctccacgaagcagtcttagtctcacaggagggatgattttcaattcacagacttttctttccccagaatctggaaatttgagtttgccgcactcataaatgcttttttgcacatatgtgcatgcaaaagcatcctgaagcttcatgactgataattttactcttcgtgactggtcattgccccgaaatgagtcaaggacatgtctgcagagaatatcagagcaacagaccgaatcccttcccaggagtatctccagcccccgctaacaccgagcatttattgtttgcacactatttttagtatttggacactgacactatctgcaactatttaaccctttctttgtcgatatgctttgtcactaataggcaactctgtctctataaggataaaaattacacttgaaaagattctactagtggaagcccatggtacttattcaatatattctggattaatccatgaattaactgtaaattcctctgctttggcttttctctttgttgaattaaagttgttcctgttttatcctaagctctcagaacattccaagaaatttccttttttggaaaaatatgggctcctagcagtcaagtgggactgggatatgaaaataaaatattcttaaattaccactactattattacatttataaaacaagtctattaactggtctatatttatagaatctcaaacgtttgaagcagataataaaattcaccctgtttctcaatttaaaatctgctagcaaaaagcacttagtcgaattatttcaaatttgtcagactataatgtctcagaagacacctgcaggtcaatatttttctgtctttcttaacctgacaccaagttttatatatatatcttgccctgtaatagtatctaatacagggctgtgctccctactttaagaaaactgagatccaaaaatctgattttgggggggaaaagaaaaagtcatacttactttgcaaaagaatttaaatagcaagctccctctgagtacttaaaatatgattcaatttaccaaatcgttactagtgcatggcagagaatgtcctgttcatctacttttatttagggctcctcagatctaagaacatgaacatgaaagaacatgcccattgcagagttacgatccttctctaaaaggggcatagtgccatctacatgcttaatgaaaaacacgtgggtctaagtttgctagaggctcaggcagacccagctctgggaatcaagaggtacagtgtaggaaagctgttcagctctcttgagaacatccacctgtcagggctggctcctggacatatgcgacaggttgttgttattgttggtatcattattatttttgctaaagagcactgtagcttcctaggattgctacaacaaagtaccacaaacggagtggcttaatacaagagaaatgtattgtctcagttctgaagcctagacgtctgaaattaaggtagcagcagaagcatgcgccccctgaaggatctaggggagagtctatttcaggccttctctaagcttctagtgaaacttctagaactagaagcttctctaagcttctagtggatttcccaacaaccctggaaaatccttggcttgcagctgtagcacttgagcctctgccttcctcatcacatggcatttccctgcatgtctgtgtctgtggtcttgtcttataaggacaccagtcatattgggttaagatcccactttattctggtatgagcccatcttaactaattacctctgcaaagacgttatttctcaccttccatactgaggttcctgggattaagacttccaggtaatgttttaggaaacataattcaacccataacaggcatttatgaatttgcagactgttgaggatggggggagtgtgagttcttaatctcattacatgttgaatgctgcgctatgtaagattcctctgataggaaccagcatcttgcttcatgatgttccactcatgtggatggatgttctgaagtttcacttctaacaagaatcactggccgggcacggtggctcacgcctctaatcccaccacattgggaggcccaggtgggtgaatcacaaggtcaggagtttgagaccagcctggccaacatgataaaacccgtctctactaaaaatacaaaaaaaatagctgggcgtagtggcgggcacctgtaatcccaggtatgcggaaggctgaggcagggaattgcttgaacctgggaggcggaggttgcagtgagccgagatcatgctactgcactccggcccgggcaacagagcaagactcctctcaaaaaaaaaaaaaaaaaaattcactgcaatacctatgtcaccctttggcgtgggaggtaggacaccatggagacagggggaggtcttgatgggagagtgaaggagggatgagactaagcatgaaaacaaaaatgaagagagcttacctggcaagtaagaagtaaagagagtgacacttccagagatgactgtaagctttgtctctcactgctcaacatcctacactttcatctagttcattattttccacagcagcctttccacccatagcataatactaacaggggtgaacagaaagaagcatcatgagtataattttccttttttcttcttcaatacctagtttgtttacatgtcattttgttcgttggaggtgagctcaaggaactgggggtgatgttatatttgagcatttcagatgcacgattcgagagttcctgaacactgctatctgaactgtagtgttgatcatggtctcttgttcttcccatatccaggatggttcttctgaaccacccagatcatgttcttctcatacccaaaatggtcttttgggagtcctgctgatttttgattggaaataaattaagtgacaaagtccaaaacctctgcaacttcttgtaggaaagatgatcaaaatgaaacaactgtcctgaaagctcccctagttttcaaatataacttttcaggactatgtgctttgatggagtatgatatacttgacagacagatttttggtcagcataatttcctttcagaagttacccagccaaatatcatgactaataatttcatactaaaacagaaattgaatttttctttgagatgaaaatgaatccactagtattttttaaatcacctatagacagaaattgatttgacataatgtaatatgattttttaaaataatttaggaatatgaatgaggccattggaagtaaggtctttccttttgttttccttactcactatgatttattcaaaagtgatgaaaaggtaccttgttatcaaacataaatgtagagatttggatgaggacttcttttaaataaagctacacaaaaaactgcagtggaaatatactccacatttaatcaagctacttccttgcataacaaccatgtttgggatagtttgggtgaaacctgaagaggcccgttaaatggttcagttgttcaccaaagcgggtgggtacccgatgtgcgagaggcagatgttacgaaaagcatgcggacagcatctatctcccgtcactgcccaggttgatcaggttctatgcagccgttcatctgattccagtcattgccaagtgccatgaaggacattactgcatcataaaatatagcctggagttagacatcgtcctaatttctaacttcccctgcccgactggttggttgaatgggtttcttttagcctataagggccttaggattctcctacacttctaccaaaatgagctttctaaaagagtatatggtacaatatcctcttatggaacatatactcttatggagtaatgtcacagtatatggcattgaccttttgccattcacctgtccccactaccttcccctgcataacatactttgtgacacaagtatttcactacaactaatgtgatcttctagaccagcacttctccaaagtcagagtttttgcaaatcacctgaagatcttgttcaaatgtaggtgctagttcaggaggcctgaggtgaggaccgagattttgcctttctgacaaactcccagataaggccaatgctgctagtttcctcgagtgggaaggatctaggaaactcccctatgtattcctgttcctatatctttgttcacattcttccttcaacctggaatttcttccctttcttcctagattttcatattcatccttagaaaccctgccttagtagctactccttgaagtggtctaggatggggctttctgtatcacaaatgcttcctcctctgaactcctatagcacacagtggctggaccaccctctgacactgctaattttatctttagctactttctcatgcatacatcttgaatccctgattaaatgtttagccccttgaggacaatctcatcatgttcactcctggcctttcccttaaatctcagatttgcaattccaaccacctgctgccttattagaatccaaattcaacagagcaaaaacgaaacaccctatcttcctcctcagaaaacttgttcagtctcaggtactcccttctcagagagttgcatttatttattttacaaatacctgtttgttttaacaaatacatgtgcctacgatggaccaggcacatagtgatgaatggagcagacgtgttttcatgatgcttgtctgaaacctgtggaacctcgaaaagccccagtcacctacaacttaaaagctgtgcacttctggaggctcaaccacccaaggtagaaactgcagggtcatcaccaatttcaccttctaacttaccttccacaaccatctgttgtgttataaatttctatctgtgccgccacagaaatgcctctcctacatgagcactcccttctttcccatttctcttgccactgtcctagaaatgtggccatcctctctggttccagtgatggcacttgtctccctactccctactcatcccttttggtttcagcttcttcatctccaactttttttgacaccaaccctgaagttatcattctccagaaacatccatctcatcacagcacttatggacttacaaagatagatggatccacattgcctgtggaattaaaccccaccttcatagcatcaagttcaatgtctctataatctatcctccactgacttttccagcttcccatcctcacacactatcccctatttctactgtgtctgagcaaacatgtgctagtctccaaatggccctgctctttgaaggctgcttgcctttggtcaacctagaagtcctctcctaattctccaactgtcaaaatgcaacagttccttaaggttcaactcaaaagccacctcatccaagaaagcttcctctgccataagtaaccacttccatggcatttcctttgtaactgtgtcacatgccctttgccacacagtctcgggtgattcttaactatgtatctatctgtctttacctccactaggtgttaagactatgtttatctaacccagtcggtgacgaacaaaatttcccgaaatccaagggaagatgttcccaacaattcgagtttgttgactgggatgatggaattgtacttctttgattcctcaatgctgagcacaaaatcctactctcggaagatgtgcaaagaaaaaatatatatatatacatatatatatatcttttgtgtgtgtgtgtgtgtttatgtgtgcagtgtgtgtgtaaacctttcatctttggtatctttgaaataggctctctccaacttcatacagcctgatgattgcatcccatcgtgcccctgtcagtggaagtccttcctgtcagagccaattgccaaggcagagtttttcaatcttggtcacatattagaatcacttggagagtttcgaaaaatctcagtgctcagtctgcaccccaggtggactaacttcatcagagtctctgtggtccagacttaggcatcagtatgtttaaagctgctcagatgattccaatatgcacccaagggtcaaaactactgtgctggagaatatttcaatttcagacttagtcataggaatatacaaagcagcagccacagcatataggacaattttaagggactcatctgaccccagacatctctcttggttgcccattgtggtacccacaatgagaaaacagaattctcttttgagtatagtattatctccagaaggcattgttaaatacatacataaatacatgagatatgaatatatataatatgatactcataatatgtgtgtatgtatcatattatatatgcaaatatgttccctggaaagagtaatctatccatcttccagctgtgtgcagaatgaaaagcaaattcccttttgtgaaagatgaggccctggaaaggaaggtctggggcacacagatggcattagggcatcctcccagtcagttctgagaagctagagagcacagtgggaatatctgatatctcagtagaacatgagggggtgagagggaaagagaggcacagtaaaggaaattggcattgggagaggacttccaccaacaaacttggctttctcaggttggccagggatgacgctgccctgaatctctgaagtttatagactttgattttcaaaaattaattactgggtaggggaaggggaagattttagatgagtgggtaagaaaatacccaggacctgggggaataaagtctcagctatactaaacttcctgagccttgaaagcaatactgaaaagattcctaaataaaaaggttagcagcatccagtcaaagccaaaagaaactgaggagaaggaacctcgtaaaaataaaaagtcatgaggaaaagtgtatatcggtggcaatttttccccaagcttacaaaaaacaccacctggggacagagaaccacggtgatccctctacactctcctgcctaatgagaatttctgaaagcaaagtatgcctagagtgagtccccatgaggtagtaatttataaagctgcccctacaccatgctgattctgaaagagactggttttctagtgtaccagagccttttgtggaaaaacaaagcaataggaaagaacttgaataacggaggcctccacagagatgagatgacacatcggggtctgtgattgcacctcagattcactcaaccacaatcttctctgagaagcctacttccttattctcataaactaagctgagcagtaatcatcctttgccttgatgggaagatctgctaattacccacagctctggagaaatgcaaatctgtggctatgtcatggatctgatctgccttctatgaccttaaccccccaccctaactccttctgtctcggatttaaacaaattaactagacatgaaacagaaagaggctgttacttaagggaattggatcctcggagcatatactcctgaatttcccttatgggtttgagtcagcagtgatgtctcagagacattccagatgacttcaaggaggcaagggcagactggtaattaaaccacaccaatcaggaaggcttagaaatagagaacaaagggcaaggagaggagagagaagaaggcaaaaaaaaaaaaaaaaaaaagaaaaagaaaaaaaataaaagaaaatagaacgaagaagcaggaaaccagagtcctggaaatgctttttcacatgttctacccactcctctctctgtctgtgttaacgaagctcctggaaagagatgtgtgctcgcctctgtataaagcagtgaggcacagaaagaatggtgtgagctgaggccaaccaggtcttaggtctgcgtgagcctggtggagcaactcaagtcagtgcaggaagaaggcagtgtgggaacagggctggtgagagtgggactgggctctcttccaggatcccaggctcaccccaccttaaccccaaatgctacaacctcatggggctgcatgtcttctctgtgcccctgctagtccactctcctctcttctccagcctgcccattgctggagggctgaggatatgaattacatccctgggcccccatgtctgctgactccagttaaccttggccattgggaggcactgtaggagctcctagaggagagtgaggccccaacattcattctcggggcttcctcactgtgaggttgcttcagactagctgagcacctcaacggaaggtcacaattcccctctgctggctagtccagagctctttccctcccccatacttcagtccttcaggccttagggtggtaactttgctccatgttactcacctcaggttctgccctattccttatggcttttctacactctgctgtcacctgtatatcaagtaccttattgaactatccttaattattgcccaagttgacttgtgctgtcagtttcattctaagacccaactgatctagcccactaactcaagatagaccagaattatgtctttattcttccatggtggggcaaccttcaaggtggcttagctactggggcattcacctgtatgtaaaaatgtctacagagaagtggctactggtggaatctgcttagtatctggagaactgtatgtcctttagctaaggaaaacacaagtgcttttctcttggtctaaagtcactttacagctcatgcagaggtggtctctgcagtgcaccaagagatataactgacagtaacgtgtgtcagggagggattcccttccttcctcagtgctaaggagagaaaaagaagtagatacgacttacaaggaagggagggagacatgagtttgcccctgtgggtcaccttccatcacagagcgcgactttcttctgctgaaccacccagcaatgggaacacactgtgcatggcatcgaagttcaagaccaccgacaagcaaaaatgagtgcggctttgcatttactgcctggaaacccatttcatcatttaatccaaaacctaatttttttagaattcaatgtttaaacaaatcatgagtgtttgatgtgacatgagattgctttatcctctctcctccccagttcctcatgaaaatgagatgctgcacctcatttggggatttgggagagaaaataaaacaaaacaatctggatctaggtcagcagaaagcctgtttgttcagcgtaaagaggcctctccactaattaacactttcctgagaaaaaagagtgaaagtcgtgtgcgaggagcatatatatatatatacacacacacacacattcctctttaaatggcaccatttcagattcagtaaaatagcacttaccccttcaaattggaatagtgatcacacatactgaaaattaaaattctggaaagcttcaatgctgaaaatttcatccagtcacctgacagagctaattaaatttcttgggctgttgattagtatttattaaattacggaactaaagctttaactctgccattcttgcttcaataattaagaagttgtggagagagagcaataaccaaggtgtcagcttgctgactcttccaaaaagtggtactcagaactttatccaactcatgccacgaatccagtgatactgaagaaaaaaaaatgcaaatctagagtagcataaaatatgctttctttcctttttaattgtgcaaacactgtggtcatataataacatgcacaatgaatttgcacccatggctacatgtgcttgataaagacaacatcatggttctttgcaacaatgaacatttcctcttacagatgcttagcttcggaggcatcttgtacagaataacatattctgttcttttcccacatgctcatctagtcaaacttctgctctccaaggaatgaataagttctgatggactccacatcagtctttatgtaagattttttctgaaaattatggggctctctccataatccagcagtcaactgaaagaatatctattgagtgtctaccatgtgttcaacactcagctcactgtcaaaaaagatacaaaaaaaaaaacaagataccattctttcccaggggcatcaagatgttttatagagataatctatatccaaatgaaacaagaaacaaaccaaatgcatgagatactgataaaataaagtgcttatttgtgtgataggatgatcaaaataaatttcactttcaggagtgccttccagctccaacactttccaatgctatgtgtagcacaaaaaatagccgaagaattcaactaaaggttctggaaggtgtgttctcatcatgagcatgccctcagcacagtccctgctattcggtaagctctaggcaaatgctgaatgaatcgatatgcaaatgagtgcaaaatgaaaagaatgcagacagcaagatgaattggcattatctgagaaggcttcagacctgagactgctcttaaaccaagctgcaaggcagagcttacaaattgtcagccatcagtgttaatctatctatacagatgtgtttcattcagcccatgctgtgatgatgatggtggtggggatgacggtgatgatgatcatgatgaagacaaggatggaagtggagagagaattttaaaaccaggagattccatgttcaaatccatatatttctattgtaaaacaaactctacctctcctggctcctgtgtccatgtggcatgatgccaaggccagtggctcttctttttttttttttgagacagagtctcactcttgttgcccaggctggagtccagtggtatgttctcaactcactccaacctctgcctcccagattgaagctattctcctgcctcagccccccaagtagctgggattacaggcacccaccaccacacctggctaatttttgtatttttagtagagacagggtttcaccatttggtcaggctggtctcaaactcctgacctcaaatgatcctcccgcgtcggcctcccaaagtgctgggattacaggggtgagccacggcgcccggccgtggctcttctctttcttcggccatcgtcctccagggttgcaccatgttccaccctctcagtcttcttcccaaccaaggccaagtgtcagttaccttttattttcatgcatgcactattgctttcttctggaagagaaaataatccccatacacatcgtactgaaagtgtaaaaatgcaaaagtagtccatgagggagtcatgtttcaagggaaaagtgtgagactatctcttgtgaaaatgaatgaggaaatgaaatgatgaaattgtatgctattaatatcaatctaaatgtgtctatgaaaagaacagaaattgcttccctacattatcagttgctaccttctcagtgaggccttccatgagcatccacctccacacatgcttccagtccccccctccactttagttttcactttagcacatgccatgtatatttttattgtataattctttttttaacttaattttaagttctgggatacatgcgcaggacatgcaggtttgttacataggtaaacgtgtgccatagtggtttgctgcacctatgaacccatcacctaggtattaaaccccgcatgcattagctatttatcctgatgctctccctccccctgcccccacaacaggccccagtgtgtattgttcccctccatgtgtccatgtatttttattgttcagctcccacttataagtgagaaaatgctgtttggttttctgttcctgtgttagctccatccatgtccctgcaaaggacatgtccctgcagctccatccatgtccctgcaaaggacatgatcttgttcctttgtctggctgcatagtattccatgctgtacatgtaccatattttctttatccagtctatccttgatgggcatttaggttgattccatgtctttgctattgtaaatagtgctgtaatgaacatacgcgtgcatgtgtctttataaccggatgatttatattcctttgggtgtatacccagtaatgggattgctgagtcaaatggcatttctggttctaggtctttgaggaatcaccacactctcttccacaatgctatatattttactggtttatttcatttgttgttggaatcttgtaatgcaaatgtaggctccataaaggaaggggtttttgccctcttttgttcactacttcatccctggtacctaggagagtacctgaaaaagagtagatgtttgatgaatgaacaaacaaactcagctcgcttctctaatttactttatctgcatgatctgcctgaaaggatgaagcagctgtggataggctaagagaagagccatcactcctggtgaaggaagttacttctggcaagtaacataagcaaaggcttgagctggcagggagcacgtggaaagggaaatagggctctgtgagaagtagagcctaattaaaatgaaaaatgtagctgggcatggtggcatgcatctgtaatccaagctacttggaaggttgaggcgggagggttgtttgagcccgggagttcaaagctgcagtgagctaggattgcaccactggactctggcctgaacaacagagtgagaccctgtctcaaaaaaagaaaaggtaaaaatgaaataatgcatttaaaatggaaaatgtgtcatggagttgccagttaagaatccatgattgatagatgtgaacaagacaccactcgtctgtcccctgtcatcaatctggaccattgcccaccccacctggctttcccagcgccatacctgtgtatccttctggaccccacctgggctgttctagcacccttcaatgattctccagaaaaaatactaaactgctcacagtagactataaaaccctgtaggatctcctggcccacttctctggccccaactcctgcctctccaacatatgcactttgcctttcagttgcaccaaactaactactttccaaacccttagtgggtttggtccacatgagcctttcaacatgggctccatctgattgggagccccaacaccagctcactcttcaagatcagctcagagagacagagagacccctgtgggagcttctccctagagcccctacttggcagacccaggacccctactctgtacctctggaccatctgatgctccgcgggtaatacttatccatcagaagctgcatgcatcgcctgtaagatacagcgtgaacacacaattctgcggcactcttggccaactgatggtacccaggccttgagaatgcctccctcgctccttgaaccctccctagaaattgattggttttctcattaagtggtcacagccctaaggtaccaccaccatgtgtctattttcactggtcctgagttaacctgttatgccctatcccctttactgtggtgtaagtgcccttaccttttcccatttgatctcagtttaattaactttgggtcactggtttctgctcttgaaaatacatactctacactcagctttcattcttctcaactcagttcttgtcaatgttgacatcacgttgtactactgtctgtttttatgtctatacctccacagaagagaaagctccttgaaagtagaaccgatgtcttttcatctttgtagccccaatgcctaatgcggtatcttgcacagagaaaacccttaatgaatgtttgttgactgaatgcatgaacacatgcagcgatacagccattgccattggtctttaagagaaaggaccatggcactttgggaagccgaggagggtgaattacctgacatcaggagttcgagaccagcctgaccagtatggtgaaaccccatctctactaaaaatacaaaaattagcctggtgtggtggcatgcacctgtagttccagctactcaggaggctgagacaggagaatcacttgaacccggaagcagaggttgcagtgagctgagatagtgccaccgcactccagcctaggcgacagagcaagactccgtcaaaaaaaaaaaaaaagaaaaaggaaaaaaagaaaaaggaccatgaattaagttatggcagcagtactacatattcaaaaaactaagtaaagaaaataaagacagattttttttaattactgcaatcagattcattggtcatgagaacctgacctataggcttagaagaagtgaaaagatggatataaaaagctagactaaatctgaaaattaaaagacctttcagagaaagaaaacaaagttgaagtcacagggttgagcttgccctggagagatcacactgtctactctttaaccccatgggtctgagttttcagatttcccgtgtatcaggatgagttggggatacaagttaagagtgcgaatctccagactgcaggtctagtacctgtgtctgtactgagagcacattgtgtgaacaccttggcatggtgaccccaggaccacctatgccttaaccatttttgatcagggaaaagctcttttccttgtaaagatgactacagagtttccatgattttctaggatactcagcatgtttttcctgaaatcctctttttcatcatgttttaggaaagcctgttctaatggctttgttttcagaaaaaaactgtttttaaaatgtcaagcgaaagagatttctaagtgtctcttcttgttgtggagtcacctttttggaccaaaaaaagtaaaatcaagttctggacaaaagttctagctcctctgaagtttgtcctttcctctcgaccatataaataatggagaaggggaacttactggtatatctcatttaggcacttggataaataacaccccactttcagttatctttggaaaaaacattgagaaaccctcttacctttttgaggacaaaagaagcaaattgaaaatgcactaggccttttttaaatatttgtgatttggcttgaaaaagaaggtcggttttccacataggaaataatttgaagaaataaaatgaaaactattttcaaaagactgtttaactttcctttaattatactaaaaagaataataaagagcatgaagcatattggaatttgtcatttatggatcaccatggcatagtataaaaattcagaagtagcttctaatgagaaaaatacaaaaaataatatcagtgaattttatatttattaatctaggggaaaaattgagaggttagggttccattctgttcagaaagactcacagtgtaacctcacatgccagcatgatcattatactatgactttccagtgcatcaggaataaaacataaggctcgtcaaagaagtaatagaaaagcaacctaatattgaggctaacttgacacaaatcattctaattatttacattcagagctccttttgctgagacctttttttttttgaagagataaaggctattttctaaataccactgcttagctaccaaatctattaacagaaagcccctggcgtttgatctttcagattccagtgtgcttccagtactgtttttatacttatctgcaataaaaaggtgattcctccaagcgctttggatttggttgaatcagatttactgtctggcttctcaaccttattcccaagtacaatgtaataggaaaatgcaaagccctttcaagtccccatgggttcctatggcagggtggtgaaaattttgttttctttactacttttcatttcataagagaaatagtctcaaggagaggatttctaatgcaatgttgttagatacagaccattaaatatgtagggctggctttccagcctacatatgcagccctatgggaaaactctccctttgtcatggaaacccaggggaggagttggtctgtgctgttttatgaataaaaaatccagaaggggaactctttttccattttaaagccaggaggagtttttaggactttcattttttcacacttgcctgttagagaaatggcataagttttatggtattgtgcatctagaatgttcttagcaccacctgaaaattattatttccgctgatagttaagacagatgatagatgactgatcgatgatagatgattgattgattgattgattcagggacagtataatccactgttatacataaccagaagcataattgggcaaatagcatttgattcatctgtctttggacctcctaaaggaagatgggctgatttaaaatgttatcttgaaaaatgtatagtcttgtatttgtttggagggttctagacataggcattgttagaaatggtttagaaaattaggaaaggctactcaaaccatagtggcgttaaaaaaaaggccaagaattaggaaattgtttgtagggctgctagaatcacaatgatgttggagaaggtctagaacattagcatggactgataattcagggaagagtaccaagatttccagagtgctatcctcctccccccaaatatattttccatcttttttgaaatgagtgagacctaccaataggcacagggcttttcaaatgcattcacactctccagttcaccagttctgttgtaatggttaatttgagactgcaggctctgggcccccactgccaaggctcaaaaccaggccctactacttgtgctatgtgatcaaggccaagagacttcactcttcactgcctcagtgtgttcactgttcttgtgaggttgtggtgattaaacaataagataggagtgatgggtgtagcatggggccagccacttagtgaggatttgatgacatctcactaaacaaaaaggtcaccatagaaatgcaattctcagttattgcatctgtaaagttgagacatcaacagctacctttcaacattttttacaaattggaggcaattatggatttggttgctgagtgtccaataggtatggtagccatcactgttgttatcataatttttatcaacacctgtctcactccttgttgtacaggtcaagaaaacccaactagatcatagcttcttgaagacaagcaggcttcatgggatactacctgcatagttgcacaaggcccagtgtttagaagtacctgacactctgtagttgccacgttcaaattcctaataatatttaaacagggaaccctgcattttcattttgcactgggctctacaaattacgtagctgatcctgaggacagggactgtttctaacttggttttataaactttgtcttccaggcacagttctttatacacagtaggtttgcattagatgtttcttgaagtgaatgggcattgccactaattaataataactgaacatgaaaatcatttattcaatgcccactttcggaaatccaggctcctcctgagcttataaagtccttttgtggacaggcctttggccaataacaagaatcaatggtgacaataatcgttccaagtaaatcttgtaaatgtagaaatggattgagtatttgcaggatgtacttcataaattcagacaggaaggttggttaaatgtttaaaattgttgtttggaacagattaaagggtgcaaaaaatgttagcaaaatcacttgggaaaggtggtttctaatgtttttaatattggcacagttagtaactgactttaaatccttccttgatcaacataaaaagacatttcaagggaaaggaaataaatggtaatgccattaaccatcacacattgtagaagtacctattataaaaaatcctttctaagttttactgttctggatctaagcttatttcatagaaatacagaattaaatactacacttgatttcattttggaatattaatgagactgaaataagctttaaatttttctttgactcattaagctggaaagtcaaagtgctaaaaatacatacttttgcttcaacataggctgaaatggatacaaagaattttgtgtcagggggagtttaacttagagtaaaaggacctatcgggggaaatttgaagcaattgtaatgtagaatttggctattatacataaacatatgtctatattcatcatgtagctttacttgtcagaaaatatctatcttaaaacttgtacagtcagaaaaagtatcaataacataaaatttcacagcccccttttagaactatggccttaacattttgtagggaaataaagctttggttaaccttggctctggtagacctcattaaaataacagcctgtcagtttcaagtttaaaataacagggttgtcagttttatatgcagtggaacaatctacagttttattctcggggataagactggtaagggggtgaaaggtggacaaagactggacaacactgccatctggtggttataatgaaggtggcctctaaatgcctggagacgaggctggaccatcttgaaggaaaagagggtgacgtcagcctgctttaagcaagtcactgttcgactttttgatagccttttgcctttaaaatgtaggtacatgcccagagcctagatgcaatttataatctcaaagttacagtaaatcaataataaactctgctctttggtaatctttaatccctgcatatccatgatttgagaaaattaattttcaagagaatgaaatcttgtgaaaagaattagattcaacaaaaactttattttactttaagttctgggatacatgtgcagaacgtgcaggtttggtacataggtatacatgtgccatggtggtttgctgcacctatcagcccatcatctacgttttaagccccacatgcattacgtatttgtcctaatgctctccttccccttgcccccaccccccgacaggccctggtgtgtgatgttgcccttcccgtgtccatgtgttctcgttagattcaacgaaaactttaaaaaatattttcctttattaaaaccaccacatatctggtgttttattgcatgagtatcttgtgagaaattcatcaaactgatgatatatgatttgtttacttttctggatgattattaaacttcagtaaaaataaataaatgcaaaccaaaaaaagctgttcataggcaaaattttgatggctgtcacaaagctggatggaacatgttcccatttatataaactgaagcaattctagacataggctggattcaaacagacttctactgtaacctaacttcgattcagttctttcctgctgtacttcggacagttgactgggggtatggagcaggggcaggagagtgaggtcagagaaaaatgagttctgttgatttgaaatgcaacctactcaaaaagttcagaagaagatactgaactctctaatgttgagctaatagcccacctttagttcattcagacaacaacccctagcctaggaaccatgctcaacccctctcagtagcaactggccccctctcctgacgtgcttaggaaggaccttagaccatgccctcaatatggtagccaccagccatacatggctattgaccactagggatgtgctgtagacagaactgagatgagctctaagcgaaaaacccacaacagattttgaaacctgtgccatctaacatggcagccattaacaatgtgtgactattgagcaatggagatgtccggtggaatgaactgagatggactgtaagtataaaatacaaactaggctttaaagacttagtaccagaaaataataaagaatatacaatatctcatttaaatgtttcgtgttcactatgtattgaaacaatgttttgaataagttgtgttaaacaaaacataacattgaagttagcttcaacttactttttttaaaatgtggcaactagaaaatttaaaattacacctgtagctcctttgtggcttacatgatgtttctactggatattgctgccttcaggctctcattgcttcttcgaacaggatggccattttgctattttacaagttgttttctctctcactggagctaaagtgggctgcctatgacacttctgcagcttgtaggagactaagaggacccatttaggttattggatgcttatgatgcaaaggtgaaagtcaagcaaaattatgtcacctgggtctaatcataagcagagtaaatcgtactccctggttggtgccccatggggtaaattggatctttaaggtaaccagatggctctcaggaacaggtaatttacctcaccggggtaagaacttgatttgcaagaaagaatacagtttagtcccccaatgccatatgtccccatggtgacatttgtactcattaagtacttccagttccaagtgccctagcaatgtatgaactttctttctcccttattgtaaaatattgattttacttctcacaccctacaacccttaaatgtgtgagccatttttaatgctcgtttatgtgtatatatcatctttcctccactgggtggttaattgaaggcaggaccacgtcccttaaatcactgtatgcccaggaccttaaaaaggcccagtacattgtagatacgaatcaagtgtgtgtgcctgcctgtgtgcagctgtgtgtgggggtgggggtgtttagttggagtgactatccataaacagaccctaagcaaccaattatctataatatagggaagcttacaaggaagatgcccctccctatggcagtaaacttattttgcaaataagggcatgtcgaatttacatgtcatttacaatttcatttgaagacccagaatttgaacttgcccttctgcctactctgccgattgttcatttattcattcgctattattgaatacaaccaaaaaccaggcattgtgctaggagatgggacacacatctgctaggaggtggtgagcacaaaggacagaggccctgcccctatgtcacctgcagctgggagggaggcccacaaccatgatgaataggcaaatctttatggtaggtaaaaccaaacggatctctgtgagcacatattctggggaggtcctagttgaaacccatagaaagactttcagctaaatcatactcttctctccaatgtgtagactttacatttgagtaagagttcatagacagccttgggtgctgtggtttacattcttagacatatttattagtatctcatcctattgttcctagaattcccttaggctaaaatctttggtatttgaactcgaaccagttcccagttaaacccaggaagaaaaaaggcagatcattgcattatagcataaatataacacaagaaatgtaaaagtagcatttattatgcaccacacaatgcaagtctacatagttaagtacaaatcaaatcatatatgcccaaaagacatttatatgcttttggctgcctattccataaaagatttatggcaatccgtctctaccctaaatggctttagaatttagataaatctgatttccacctactagttgctgaatattttcctatgctgcatctaaattacttttccaatgtgtgtacatccttgtgggtactctcactgttggatggaatcatgtttgcaatatcttacgtaagataagtaagatatcatgctcagtgacaccactcttgggtgagcaaaaggtgtttcttgtttcctggtaagttccaaatgtctgtaggcttcagagaaacagaccagaatacacatctatttctcagcttcggtgtggaagaataaagccaccaaactgttggaattaaataacgaattctaaaatattcaggaatgcctaaacttgaagtgaaatgctttgcaatgcctcctcccccttttttaattagcagacttacttgtcctggatttcattccctgaagatgaaatttcaatattttcagagtaacttcaggtagctatgagcttaactgaatcactgtggtatgccaatcacaggtagaaatagagatggaaattctctatgagtttcctaagtatcatcaaaggccctgtgaaggggttgtacatttgaagtaagagttggcaaagaatctgaatttttcagcaaaactaaatgttcaaacattaaactttttctcacattggcaaaattgagctattaaatattggagtggtctctggcagttttccaaatcagggctaatttccaggttagtcctatacaaaggggtcaatcctatgccactagcatcatcttgttagctatatcaggaaattgaggaaatatgggggaaatttgcctttcaaaccacaaagaacttccaaaaggtttcattccataatgatgatagaatagatgatggtaggagcagaggtcaggtttaaaataaaatatccaaaatgcttcaaggtgccttatataactgctagaaatactgaattcattctcttcttttgaaagcgcacttgagatcttccaatccagcattatgaagaccgcatatctaatgacctaatttagaatcagcacttgtcacaatccatgctctaaatcatggcaagttccttggggatttctgcctctatacagcaaaaataatgcctgagaaaagatagaggccgaagttagccaccaaggagaatagagctgttctccaaagcagagagcgagagagcagatgggacagacctttggtcagcagcgaatcaaaaggagcatttaccaggggctaggcagagaaaaacagaatccactcacaatttgaaaccaggtagagcttgcaaaggaacaaagccaggcaagagagaaaagttgagggctcagtctcaatgccaagagaggaggaagaataagaatgtgtttctgctatgtgctcaagccctgttcataaagacccagaactgcctagcgaggggagatgacttggcttaggtcaaagcaacaaatcccaagtcctccttcattgatatctgtcattagaaacatttaaatagagtctaaatgagcctgtcaagaatgctctagaagcgttggactgactgtgagagctctgctaagcctttaaattccataattcagcaataaaactactcctttaaatcattgctatttctcagtcttgaaaagtaaatagtgccacatttgaggtaccttgctgcaaagcaatactttgacttggtctggattcccaaagaacaaatgacttcttgtgtttttcttttcactattgaattcaatagatattagttcaatgtcagactgtgtcatctctcaaggacgtataggatgcctactgcacttaatgccatagggaatgaggcacaatcagaacatcaggtacaaacatgaagatttgaaagtttgttgttgttttcttaaaatctgctgcaaaaatctaacctgaacagcagtaggaagatatttctgatgtctcccacatttatcccaatttgaggaccaggattttgcctgaaaaggaccccatctatcttttcaggggcatgcatgcccttaatatggtgtgatcagctatccaagaaactccaagcctaaaaccagacaggattattcagactgaacttttcaacacattctcaattccctacgaaactcaacaaaactaagcattgtgttttcaaaccttcaaagattcacttcctacttttttaaaatttttatttatatccttcttagtctttcctacaaaacatgtgtttgtcaacttgggagtaatgttaaaagtaccggccgggcaccatggctcacacctgtaatcccagcactttgggaggctgaggcgggcggatcatgaggtcaaaagatcaagaccatcctggccaacatggtgaaaccccatctctactaaaaatacaaaaattagctgggcatggtgacacacgtctgtagtcccagctactcgggaagctgaagcaggagaatcgcttgaacccaggaggcgggggttgcagtgagccgagatcgcaccactgcactccagcctggtgacagagcaagactctgtctcaaaaaaaaaaaaaaaaaaagtaccacaccaccgcgaaaatatatgtcatgtggaaacagactagaaattatcattgaactccctgggaacatatgatagagcccaaaatgttggagtggttttaggttgaatagtgtcttgagggctctgtaaaatgctgggtgtaacatatggtcaaagtcggctttagattcactgacaaactgcattcaacagaaccctgctatcatccccaagacttatttagaagtttcctgaaagaaaacatgttattagtacaagcaatttctccaccaagcattacaaaacctacccaaacattacattacagaggggccaatctgagacatgaaaaatgacaccaaagagtttcataaacacagaataaagggaaaactgatattctagtgaagacagtgctaaaagccattatcagaagatatggattacatcctctaagaatacgagggagggagattgtgtttatagatatttggccatgtcagaaaaaaaaaatattctacctgagacttaggaactttaaatactctcctccagagtgcatgtgtttcccgagggagtgagagaagctgtgaacaggtacattcacagaccttgtttggttgctgaaggagtatgcatgacttgaattctgatgcaggctcacacagtgaatcaaatgatttggtgctgtcagaaaagaccattcttctctagagtaaagctggatgaggtcactgtctccaaaactggattatattaaattcttaggttgcaaaaattgttttgtgtatggtgactttcccttaacttgaccaagtaaaacggccttgtccctgagcaaaaaccagcctgccttcatgtctttaaacagattgttttccaaagcttacaaatgacctccagcctataaaatattcacattggtttttttccttcaatatttattatttagagtgtagccctttaaatattcatcatatttttctaaagatatggtatatattatttacatctggtcacattatattttcatagtgatgaaatggacacattggaatctttctgaagtcaggaacaaatagggtattgggccagatgcacacaacaggtagccagtgaggtggatttgcgtccagagatgattgagggaaaatggcaggtggccttctcacagtgactactcaggaaagatccagaggaaataaagggtccagggtagatggacttggggcctcctgtgggtaggtagacagccatgggctgaaggagaaagtcaaatatgtctcatcagagaattcacatgggatacaaaagcaataatggagttcacaaacacaactcagaattcaacaggtcacctccttagaaaaccaaagggaaggtgttggaatgtgtttatgaggattgcaaagaccctttaagatgggatttattccatttttaattaatttctcatgctttttccttaagccaaggtttttgaggtcccccaggtgtccatcttacctgtgtaaattacaactggaatgacatttaagacaatagtagtctggaatcctaattagaagattggggggatcatctgagatctctctctctctcttgctctgggggtaatcgggtcaaggaaaatgagttttggtgtttttttgttttttggggttttttttccctaaaagcctgaatgaatttgtccatgcctcctttactctctaaagttacatttggaaagaagtcgctggcaggtaatcaatcatttttgaaatcttacttcccttagcagatcatcagcaatgctgttcgtgtatttattcatttgacaaatatttatgaagcactggtacacacaaagctctgtttactgagtctctggctgtggagcagttattccctgggagccaagaagtacagctgttctttagcaaatgagtagctgaagattagagtggtggctaaaagccatggcttctacatggacaaaatcatcctgttcttggaggctaaaacttgggaggctgtaatgcattatttttgtttttgatccctgggtgaaacttattaattattctgcttcctaatctttcccatgacaagagttcagcaaccacaaaagaacaaatagcagcgaagccttatttgcttgagaaggaatatggtggtgttcccagggagggaatttccagacaaattaatatgtgctcccatagccctttgcttagctaggactataatgtttgttccttgtctgttacccctactaggcagtgctacaaacccttcaaggatagagactgtgtacaagtcatattttgcattcccagagtctactataaaacctgtcttataaaaggcacgttagaagtgtttaatgaaggaatactagccacaaaagccttttttcttatttaaccaatgttttggaactttttctgaactgtactacattttcttgtctcattaaatcgatttcgttgaatgttattgaatttttacttgctaagtcactgatttaaaatatatggtatgagtccctgtgctatagactggcgatctgcaaacatttttggtcttgcacctctatcagcaaaatattccgaatgataaacaaccagagtacctataaatatttatacataaattgtaacataagcactactgaattaacacattcagtacctcatgaaatttacataaaaacagaaacttttgaaagatgagaaaaagatattcttttttatttctattttgtaatgttccagatgtatcaagaataagaggaatatgatgcctgccattatattgtttacttgtgcttgctttgtttgaaatgaaagaaatccaaagtttcttttcaaaagctatttaagtcctattccattgaatgagttagttaaaactaattaatctaatccataaatgccttagccagtacatatgctggatcaatacaccagcagcaagttaatggtggtggaggtgccaatgctgcccctccccactatgaaagtcttactctgtccctaagataattgagaaatggcgatccctgtacggactgattgaaatatcaatctctagattaaatattaggaaagcttaattcctcttgtatttttataaagatagaaataggaattctaatcctgaatcacattgaatctcttgcacacccccagagatgcacacacactcctgtcaccaacccaacacacacacttcaaaaaccatagttatcaactatggccatagtaagcctagtggttaagagtaatgattccagcatctgcatttgaatttgaatctcatctccaccatttactagatgtgtggcaagttttttagcctttctaaggcctgtttcctttttgtataagggtgtaatgataatattttagcaccgtcagagttgtgaagatcgaatgcacgtgagggcctcagctcagtgaaagctcacagttaatccccatttctttgagtcaattactgccctctgctgaacccagcagttgccatgtgccctgacaacaaagtcttgtctctttcccaacttttcattatttttaactttttcaatactgaaatggtggggaaaaaaatagtaaaatgaacatccatataacccccatacagattcaataatggttgactattttgctattttcaagtaagtaaaagatgcagtgacacattatccctaagtatctcagcgtgaatctcctaaaagcaaggacagtctcctatacagccacaacatcatgatcacacttaagaaaattagcacttattcaataatatcaactactatttattcaacattcaaaattatcaaagttcttacttacagctgggtccctacctccaaatccaggagtcagtttctcttccttccttcctttctcttccttctttccttccctccctccttccttcctttctcttttttccttctctttgtttctttcttgcttgcttactttcttgctttcttctttcacttgccctcttttgaagcattaaggccagttgtctcatataatatctcatcactggggggaggagccaagatggccgaataggaacagctccagtctacagctcccagcgtgagtgacgcagaagacgggtgatttctgcatttccaactgaggtaccaggttcatctcactagggagtgccagacagtgggcgcaggtcagtgggtgcgcgcaccgtgcgcgagccgaagcagggcgaggcattgcctcacttgggaagcgcaaggggtcagggagttccctttccgagtcaaagaaaggggtgactgacggcacctggaaaatcgggtcactcccacccgaatactgcacttttccgacgggcttaaaaaacggcgcaccacgagagtatatcccgcacctggctcggagggtcctacgcccacggagtctcgctgattgctagcacagcagtctgagatcaaactgcaaggcggcagcgaggctgggggaggggcgcccgccattgcccaggcttgattaggtaaacaaagcagcctggaagctcgaactgggtggagcccaccacagctcaaggaggcctgcctgcctctgtaggctccacctctgggggcagggcacaaacaaacaaaaagacagcagtaacctctgcagacttaaatgtccctgtctgacagctttgaagagagcagtggttctcccagcaggcagctggagatctgagaatgggcagactgcctcctcaagtgggtccctgacccctgacccccaagcagcctaactgggaggcaccccccagcaggagcacactgacacctcacacggcagggtattccaacagacctgcagctgagggtcctatctgttagaaggaaaactaaaaaacagaaaggacatccacaccaaaaccccatctgtacatcaccatcatcaaagaccaaaagtagataaaaccacaaaaatggagaaaaaacagaacagaaaaactggaaactctaaaaagcagagcgcctctcctcctccaaaggaacgcagttcctcaccagcaatggaacaaagctggatggagaatgactttgacgagctgagagaagaaggcttcagacgatcaaattactctgagctacgggaggacattcaaaccaaaggcaaagaagttgaaaactttgaaaaaaatttagaagaatgtataactagaataaccaatacagagaagtgcttaaaggagctgatggagctgaaaaccaaggctcgagaactacgtgaaaaatgcagaagcctcaggagccgatgagatcaattggaagaaagcgtatcagcaatggaagatgaaatgaattaaatgaagcgagaacggaagtttagagaaaaaagaataaaaagaaatgatcaaagcctccaagaaatatgggactatgtgaaaagaccaaatctacgtctgattggcgtacctgaaagtgatggggagaatggaaccaagttggaaaacactctgcaggatattatccaggagaacttccccaatctagcaaggcaggccaacattcacattcaggaaatacagagaacgccacaaagatactcctcgagaagaggaacttcaagacacataattgtcagattcaccaaatttgaaatgaaggaaaaaatgttaagggcagccagagagaaaggtcgggttaccctcaaagggaagcccatcagactaacagcggatctctcggcagaaaccctacaagccagaagagagtgggggccaatattcaacattcttaaacaaaagaattttcaacccagaatttcatatccagccaaactaagcttcataagtgaaggagaaataaaatactttacagacaagcaaatgctgagagattttgtcaccaccagtcctgccctaaaagagctcctgaaggaagcgctaaacatggaaaggaacaaccgataccagccactgcaaaatcatgccaaagtgtaaagaccatcgagactaggaagaaactgcatcaactaacgagcaaaatcaccagctaacatcataatgacaggatcaaattcacacataacaatattaactttaaatgtaaatggactaaatgctccaattaaaagacacagactggcaaattggatgaagagtcaagacccatcagtgtgctgtattcaggaaacccatctcacgtgcagagacccacataggctcaaaataaaaggatggaggaagatctaccaagcaaatggaaaacaaaaaaaggcaggggttgcaatcctagtctctgataaaacagactttaaaccaacaaagatcaaaagagacaaggccattacataatggtaaagggatcaattcaacaagaagagctaactgtcctaaatatatatgcacccaatacaggagcaccaagattcataaagcaagtcctgagtgacctacaaagagacttagactcccacacattaataatgggagactttaacaccccactgtcaacattagacagttcaacgagacagaaagtcaacaaggaaacccaggaattgaactcagctctgcaccaagcggacctaatagacatctacagaactctccaccccaaatcaacagaatatacatttttttcagcaccacaccacacctattccaaaattgaccacatacttggaagtaaagctctcctcagcaaatgtaaaagaacagaaattataacaaactatctctcagaccacagtgcaatcaaactagaactcaggattaagaatctcactcaaaactgctcaactacatggaaactgaacaacctgctcctgaatgactactgggtacataacgaaatgaaggcagaaataaagatgttctttgaaaccaacgagaacaaagacacaacataccagaatctctgggacgcattcaaagcagtgtgtagaaggaaatttatagcactaaatgcccacaagagacagcaggaaagatccaaaattgacaccctaacatcacaattaaaagaactagaaaagcaagagcaaacacattcaaaagctagcagaaggcaagaaataactaaaatcagagcagaactgaaggaaatagagacacaaaaaattaatgaatccaggagctggttttttgaaaggatcaacaaaattgatagacttctagcaagactaataaagaaaaaaagagagaagaatcaagtagacacaataaaaaaataagggggatatcaccaccgatcccacagaaatacaaactaccatcagagaatactacaaacacctctatgcaaataaactagaaaatctagaagaaatggataaattccttgacacatacactctcccaagactaaaccaggaagaaattgaatctctgaatagaccaataacaggatctgaaattgtggcaataatcaatagcttaccaaccaaaaagagtccagaaccagatggattcacagccgaattctaccagaggtacaaggaggaactggtaccattccttctgaaactattccaatcaatagaaaaagagggaatcctccctaactcattttatgaggccagcatcattctgataccaaagccaggcagagacacaacaaaaaaagagaattttagaccaatatccttgatgaacattgatgcaaaaatcctcaataaaatactggcaaaatgaatccagcagcacatcaaaaagcttatccaccatgatcaagtgggcttcatccctgggatgcaaggctggttcaatatacgcaaatcaataaatgtaatccagcatataaacagagccaaagacaaaaaccacatgattatctcaatagatgcagaaaaagcctttgacaaaattcaacaacccttcatgctaaaaactctcaataaattaggtattgatgggacgtatttcaaaataataagagctatctatgacaaacccacagccaatatcatactgaatgggcaaaaactggaagcattccctttgaaaactggcacaagacagggatgccctctctcaccactcctattcaacatagtgttggaagttctggccagggcaattaggcaggagaaggaaataaagggtattcaattaggaaaagaggaagtcaaattgtccctgtttgcagacgacatgattatatatctggaaaaccccattgtctcagcccaaaatctccttaagctgataagcaacttcagcaaagtctcaggatacaaaatcaatgtagaaaaatcacaagcattcttatacaccaacaacagacaaacagagagccaaatcatgagtgaactcccattcacaattgcttcaaagagaattaaatacctaggaatccaacttacaagggatatgaaggacctcttcaaggagaactacaaaccactgctcaaggaaataaaagaggatacaaacaaatggaagaacattccatgctcatgggtaggaagaatcaatatcgtgaaaatggccatactgcccaaggtaatttacagattcaatgccatccccatcaagctaccaatgacttccttcacagaattggaaaaaactactttaaagttcatatggaaccaaaaaagagcccgcatcgccaagacaatcctaagccaaaagaacaaagctggagacatcacactacctgacttcaaactatactacaaggctacagtaaccaaaacagcatggtactggtaccaaaacagagatatagatcaatggaacagaacagagccctcagaaataacgcagcatatctacaactatctgatctttgacaaacctgagaaaaacaagcaatggggaaaggattccctatttaataaatggtgctgggaaaactggctagccatatgtagaaagctgaaactggatcccttccttacacattatacaaaaatcaattcaagatggattaaagacttaaacattagacctaaaaccataaaaaccctagaagaaaacctaggcattaccattcaggacataggcatgggcaaggacttcatgtctaaaacaccaaaagcaatggcaacaaaagacacaattgacaaatgggatctaattaaagagcttctgcacagcaaaagaaactaccatcagagtgaacaggcaacctacaaaatgggagaaaatttttgcaacctactcatctgacaaagggctaatatccagaatctacaatgaactcaaacaaatttacaagaaaaaaacaaacaaccccatcaaaaagtgggcaaaggacatgaacagacacttctcaaaagaagacatttatgcagccaaaaaacacatgaaaaaatgctcatcatcactggccatcagagaaatgcaaatcaaaaccacaatgagataccatctcacagcagttagaatggcaatcattaaaaagtcaggaaacaacaggtgctggagaggatgtggagaaataggaacacttttacactgttggtgggactgtaaactagttcaaccattgtggaagtcagtgtggcgattcctcagggatctagaactggtaataccatttgacccagccatcccattactgggtatatacccaaaggactataaatcatgctgctataaagacacatgcacacgtatgtttactgtggcattattcacaatagcaaagacttggaaccaacccaaatgtccaacaatgatagactggattaagaaattgtggcacatatacaccatggaatactatgcagccataaaaaatgatgagttcatgtcctttgtagggacatggatgaaactggaaatcatcattctcagtaaactatcacaagaacaaaaaaccaaacaccgcatattctcactcataagtgggaattgaacaatgagaacacatggacaaaggaaggggaacatcacactctggggactgttgtggggtggggggagacgtgagggatagcattgggagatatacctaatgctagatgacgagttagtgggtgcagtgcaccagcatggcacatgtatacatatgtaactaacctgcacaatgtgcacatgtaccctaaaacttaaagtataataataaaataataataataataataatatctcatcactggatgtgtctgattatttatggtgttacttagttttttcctctattgccagtatttcctgtaaactgatttttttaagtcagaaacttgatgggattcaggtgaaatatttggagcaagattaattcttaggtgaatttgtcacagaagagtacttagatagttctttctggtcattggctttgctattctgtttttagcaatcattccaccttgtcaccttcctccctcttttgtctaattttacagtactgtaatggtaggtatgagaaggatgccctctcttcctaatagagtcaagtgttcatggtccttttgacaggtcttaaactaagagtgtttgtctctactgacatcagaagttgcaattatcagaaatcagaatcagctccagataaatcctaaaagagggctcatgtttttcctatggaccccaacagtatatgtttggatcagtttccagagacataacagtagttgttgtttaacttccagaatctatcaatagcatagatgaaaaaagtaatacttaaatattactgggattactaatattacagcattactaatacaatattggagcgatcgtaaatactgttcacaagtattggtaagagttcatttgtcctagaatagctcatccaggaatcagagaaaggaaattgttctaaattttgtattttatcccaagtccttgttcccatctggtgtgttattaatgaattagggctcactgtcattgtcagtaatatatttgtactaagagtgtttgttaacataaagcttaattcacagttgtgtgcacttaagtttccaggaaaaaaaaccaaaaaaacaaaaaaacaaaaacctcaggtccggagctacagcagagcagttacatatattattcagaaatataaataaataaaatgagaaaaacatttctaaatgatgtgcaagttgaaaggccttcctgatattgaaaaataaactgccatcattcagatataaatgaatcaaaggcatgttcttttccagtggctaatagtgtccattttttcagccgtctgcctcaccatcaccgtctgcaggtgaattggccagtgtttccgtgcagaatgttaaaacggcatctacatttctcactgctcctttgatgttatctccttcaactgcacaatgaaaacgcacagctactgaaatgccagagggaacacactctgattataaatgtgctggggtaaacaatgagagaaaacccacatccccatcatcgcgacgggctcctcacttagccaaatacaaccccacagttttctcccacccctcttgggacgatgaacacacagtattgtgaccccagctaatttgtgttaaccatacagtctatgaccttgtaatagaatgggacaattcaatccattatcttaaccaacatttattgagcatgtactgtgtgcttagacctgtgtgaccaactaatcctggtttacctgggacgttcccattttagtgctgaaaactcgtcaccctggaatcccctaagctgtggcaaataggactattagtcacttgacccatactggacactgtggataaagataaattacaaccctatttctgccaacaaaaagcatgttgtctaaaagagaatcagaaaaataagccaattattagagtttggagtgatcagtagttagaatcatcaagagggcatagcgcagcgcagaaagctgaatctaaatctaagctggggacccaagaacgcaccccgaagaagacaacgtttgagaataatttaaagaatgagtagtgcaacatccaccattaaattctgcacatactgaaaggagacacctgtggggcggcatgcaactttgttctttatctgagtctcaaaatctgtgtatctggtttagattcccataacgtggaggtaggattgtagtacaaaatcagaagaaagagaatgctcattcttagtttattttattatgggacagaataaacctgacagtatttcagtcctaaaggtcgtggtcattttctgaaccagatataaatataaaacatgtatttctttctctgaggattgttttgaaaagagtaagaatgagtggcctattgtgggcacgcctttaatggaggttagggcaccaaagtggacactacgtagaacaaataaaatgtgagaaattgtttttcacattttcacattttactttgaaaaaaaagtcaaacttaactgaaaattgcattttttgaaaaattttatactcttcatctagctttgccggatattaaaaagttgccacatttaccttttctctttttctttatacatctgtatatttattgttattcttgattattactgagctgttgtagagcaagttgtggaaattatacccctttcattttaaatcctctagcgtgtgtctcccaagagtacagtattctcctgtgttaccacagtatgattttatgtccaggaaatttaacactacataatactattatctaatagagagccagcatacaaattttgcccactatcacaataatgtcttttattggcaattatccttctgacctagcatttagtccagagccctctgctgcatttggctatcatgtctcttattcttcatctggaaggactcttcagctttttcttgtcttttatgatggacatttttgatgagtagaggccagctggttttcagaatgcccctgagtttcggtttgtctgatatgtcctcatgattagattcagattataaatttggggctgcctaagtgatgtgtccatcttgggacatcacatcaggaggaacaagtgaccaatttgtccccttgcttcatcacttgatgaaggtggcagcctgccaagtttccacactgtaaaattactagttttccttttgtaattaataaataatctgtgttactaggtactttgagattctgtaaatatcccattccccatcaaatgttgactcaacatttttttacgtctgtattcgtttgctaaggccgtcataacaaagtaccacaaactgagttacttaaaacaacagacatttactatcccacagttctggggctggaagtctgaaatcaaggtgtcggcggggttgggtccttctgagggctaggaggaaaggatcccttctagacctctctccttcgcttgtaaatgggcatcttcttcctgtgtctcttcatattttctttcctctgtgtgtgtctgtgtgctcaaatttcccctttttatcagcacatatcatattgagtgagggcccacccacatgacttcactttaacttctttagctctgtcatgaccctatctcaaaataaagtcacattctgaggtaccaagggttaggaatttaacacgttaaggggaggaaaagaattcaattcataacagatgcattccagccatctctggactttcccaatgttcattatgaagccaaaatgaaattaaattcctcttcctaccctttctgcaagtgaaaagtcagtgttcagcctgaagacacttaagatgctggcactaagcttttcctggccatccatccacagggctgtgaattttacacttacccgtatttagaatgacttctctttcagttctagagatttttaagagggtttggtttattgcttaccacccatgtgtgtgctctaagggcctgtcatttgcactagagcataagtaccagcagctgaattagtggcaatatttattttttgcagaaacaaggagtccattgggaaaagtatttatctcttggtgcatttgttttggtacagttgtctgacatgcaagcaaatgaattctagagactatacttggggtgttcacaatagggactctcagcaggagagggacccgaagccaggcgtgatgcttcgtaagtttttaattcaaaggattgaaggacagaaaagatggaaaacaaaaagccaattacctgagaactctcgtctagaggaggactgagggagaggaaaggaggctttcccgggcaataaaccctgcagtgcagtgtctctctcttaaaactgttaaagagttcctgctggtcatatcacaggttctataaccctcgcctgcgtacgtccttgtgtagaaatggggaaagcctgagcagaatactcacttgctttccttggtttcttgatcaggtcacagacataaaagagaaattgaagctctctaaaaaggtctggtcagcattaccctacactatctgcaaggacgagagcgtgacagcgggcacgtccaacgaggaggaatgctggaacgggcacagcaaagccaggtgagggtgactcgatgtgtgcatggatgggggcacagcacacccagccttggaagactctcctggcacaactctacaaacctgtttatgcaaaaagcaacagagggtggagggacaagtcatcacttagcaacagctgttgagagtgacaggtttgatgggcacctgggagcacttactcttaaggtgccattaagcgtggaatcctcattcagaatgtcttgcctctggatgaggacagaggaatggtggcagatgccaggtttcagataccctgagatcacaaagagccctttcatgttcacttaatggctttaagatactgaagttatttttatccatagttaaatttccagggctctttttttcatcaaaagttaaataggaaatgaaaattcaactgtttttttcactcttgttggaaaaaaaattgaagtgttcattggcaacgtaacagaaaatgtctgagggacactgagaaatggttctaataggcaacacactttgggaagtcccatcggaacctcctgacaagagacagcagttttcatcattctgctctgctgaccagtgctgtggggacttgatatggaatttctgaatttgttgattcagcccagaaacgggcttggcctggattttcatagggtggggaggctggatgggaggactggttgggagttggcaggcagggcaggacacgaggacaggaatctgccaaagccctcagcaatggggttgcaagcgggtaaagtagctggtaaattggactcaagggatctttgaggattgaccagtgggtggagatgctaagaggggagtctgttctggggcttgactgagcagtttcaagcatatgaagcagctgtgatcaaaaggaaacaagaaggtgtgtggttgccaggagcggtggctcacgcctgtaatcccaacactttggggggccaaggtgggaagatagcttgagcccaagagtttgaaaccagcctgagcaacattgtgaaaccatgtctctacaaaaataaatataaatctttggctattaatataaagtgcatggctattaagttgagaagaaactgcagaagttaagcaggaggtgcaagggaggtgcacgttaggtgttatttcttaccctgctgagttgcattttttagcatctgttgctttattagtccattctcatgctgctataaagaacttccctgagactgggtaatttataaaggaaagaggcttgattgacccacagttccctatagctggggaggcctcaggaaacttacaatcatggcagaagacaaaggcgaagcaggtgccttcctcacaaggtggcaggagagagaagtacaagtaaagggggaagaggcccttataaaagcaccacatctcatgagaactcactcactatcatgagaacagcatgagggaaaccacccccttgatccaaggtcctgttctcaacacatagggattatggggattgcaattcaagatgggaattggtggggacacagagccaaaccataccaattgctaatgacattattaaccataccaggaagagtttagcaaggtgaaagcaagatacctacacaaagagctctaaccatttcaaaatgctcaaaatatcaatatcaaatcatagatcatgagaaggaaattagttatgatattaacaacatgccactaaaaaatatttagcattttaccagtgtctggctttttagctaggagacctttggccagaaaattcagctatgaattaacagcttctagtgtgtattttcccgatgactgtacagaaagacactgtgaagaatggccagatggcctaatgaataaaatgcttggttttttgagcttctctgtttcccatctgtgtttacctttaagccttggctaacataaagcctgggttttgaactgctattcccacagattgtcacacaggttgctgatattagtccatatgcaatttcttacaaaaggaaatatttttttaaaaaaaggccatgggcgaagttaggggaagagactaaacactaccaagaatatgaatggggaatataaagaccactgaagttagagctggaggagatcaggatggcagacaagttcctcattgtgcagattaagaactcagacagggtaaacaattagtccactgttacccaatgaacaagggtgaaagctgggaatctcccaaatcctagcccagtattttttttatggcaataccctacctcttaagcaaacaacagctaaatactgtcctccccaagttaggagaacaaatgagacagatcctaagtgctataaaagcttcagtggttctacagcattcattgagtcagtccaccagtccatcagcagtatgattaagtactccctgtgtcccaggctctgtgcaaggccctgtagattaagtgctgtaagatggcaatgggaggccaaggcaggcagatcacctgaggtcaggagttcgagaccatcctagccaagatacagaaaccctgtctctactaaaaatacaaaaattagctgggtgtggtggcacatgcctgtagtcccagctacttaggaagctaaggcaggagaatcgcttgaacccaggaaaaggaggttgcagtgagccaagatcataccactgcactccagcctgggtgacagagtgagactccatctcaaaaaaaaaaaaaaatggcaatgggatcaatacctgaaaaggtacagtgactggggtgagcccagtgaacctggaaacatcagtaccctactgctagactgcaggtttaggaacggaccacactggtagagaaacacctggatcagtcctcaggaaaaagatttaaatttcatcctgagatcaatgggaagccattggaagattttatgcaggtgggaaaatgatccagtttaatgcaatgaaatcacttgtaggaatagtccagaatttggtccaataaaatatatcttttattatgcataagtatattattaaaagatgaagctgtcaaatatttgtgattcaaattatgtacccattgaacaattacaattccatggtttcctttagttcttttttttaattattccactagcagggaatcctaatattatatttttatatactagcatagtaaatggatcaccaataaagacttgctgaattaaatgtaattgaagctttcttcttatccaaatattaattcatctagaaaaacatcaaagaaatttttcacttaaatttactaaactattttgtaagaatccatttataatgcagataataacattttttcacacttttgaattatgagttttaagatgacaggtctttttaattgtttaggaatggttgttaaaaaaagaaaagaaaaagaaagaaaagttacttttatcacctatgtgaaataaaagaactagaaactttatttgtagaaaatctggccagaggcaatgactcacacctgtaatcccaacactttgagaagctgaggcaggaggatcacttgagctcaagagtttaagactagcctgggcagcctgtaatcccagcactttgggaggccaaggcgggcggatgatgaggtcagcagatcgagaccatcctggctaacatggtgaaaccccgtctctactaaaaaatacaaaaaattagctgggtgtggtggtgggtgcctgtagtcccagctactcgggaggctgaggcaggagaatggcatgagcctgggaggcagagcttgcagtgagcagagatcacaccactgcactccagcctgggcgagagagcaagactctgtctcaaaaaaaaaaaaagaaaagaaaagaaagaaagactagcctgggcaacatagtgagaccctgtctctacaaaaaatattaaagtagctaggcatggtggcaggcgcctataatcttaactactcagaaggctgaggcaggaggatcacttaagcccaggaatttgaggctgcagtaagctattattgtgccactgtactccagcctgagcaacagagtgagattctatctctaaaaaataaaaataaaaaataagaagaaataatttttttaaaaaatccatcacgtattaatagatatgaagcagagatgcttattagaactgatagagattgtcatgcctgaagtttataaactcaagcctgtgtgataggtctccaataaaccagacatttcttcctctctttctgttttatccatcagactctttcggccacatttttctgtttgtacccgctcctgcagccttttgtcctatctaagtgtttaatcaggcttgtcttccatcaccttatttttcctgattactttctgaatcttgctccatagctctctaccgtacttccttgattcagaaacatacctatttcaaatgttaacatttctgacatcaaaatgactcttacagtagatatgtctatttactccagtgattatcttattttttaaaaagctgttattaagtaatggcaccagttgaaattgatgatgacttcaaatagaacaggatacacagcagtatgggtgctgtggcagtctgcagggtgcaatctgcagtgttgagactgtggttaagggtgtgtaagcagtggctcccctaaggtttgaacccactttcatccccctgctcccccaagtcactccaccctcacccatctctgacagatctcactctgcctctgtagctcaacaggtctgcaacaggaggcagggtaagaggagactctgccctttgatgggaggaaattgcaagtgtgcccaatcacagtgacctgatcagcatttaaattttcattctgaaaacaagaatgggttaaacaaagtggttaagggaatgtcttccctgcttcctctttctcctgggacaatgtgaagatcaatgagataatctcaatacaaatagtttgtaatcctaaaacagtgcttctcaaactttagggtgcaggctaaactcttggagatcttattaaaatgcagattctgattcagtaagtgctatggattgactgtttgtgtcccccgaaaattcatagttgaaatcctcaccccttgtgcaatcatctttggaggtggggactttgggagataattaggtcttgagggtgcagccctcattaatgggattactacccttgtaagaggagacatgagtttctctctctctctctctctctctctctctctctctgccgtgtgaggacacaacaaggcagccatcagcaaactaggaagagagccctaatcagacacaggatatgccagcaccttggtcttggacaccatggtcccaagaattgtgagaaataaatgtgcattgtttaaactgcccagtctgtgggatttttgtcatagaagcccaagctaagacggtaagtctagggtagaacctgagtgagattcagcatttctaacaagcttttaggtgatgcagttattgttgatccagggaccacttggagtagcaaggcttgaaggcaggattgccagatctagcacataaagataatagacaacaaatggaacacacttatactaaaaaaaggattcgttgttcacctgaaattcacatttaattggcaaccatgtgttttatctggtgttttaaatgtccctattaacatgtaagatattacctttttcagtccacacacaagcctcagggagcatgttgcaattttgggggtttcttcactgatacccttgatgtttcctttaatggggcttttcttatattaaaaataacaacagcaatatgagctaggagttcacgtcgttcaattataacatcacccactaatgatagacaggttatggacaaggttgaagtcttctcaacaatgaattgcataggcttcacatgtgcatcaggagagaattttaagttagaaatacagcacagccttcgcaatgcagaatatcatccacacaaacctctggtctttaatagtgccattttgatacatggcaaggatgaatactttgtatctttggtcagcattttattcaattagtgtcttagctcaaaaaataccacagatataatagactaaacaacagaaatttatttctcatagttctagaggctgggaagtccaagatcagggtgccggcagattgggttctcttcctggcttatagacaatggcctccttactgtagccttagagagacagagagtcctggttcctttctcttataagggagctagtatgagaaatcatctaccctcatgatctcattcaaccgtaagagggtacctaagaggtaccaaaggccctatctccaggtaccatcacactggggattagggcttcaacatgtggattttggtggcacacagacattgtgttcagaatcacatcctacttatcagaagagctaatacaggatttttcttagagttcatggcaatgtctgtcacttgagaaagacagcctagtcgtcttcagtgaccagcaggagcaagtgtaatttctactccttctatttttcacttacctaagcaacttctcaggggtaaatgtgagaagacacagcaacattctgactccactcagacaaataggaactgaaaggaagctagtaagttacagaggaaaatcgataataatctagaaggccaaagggaaaaaaattaaagactcatggtgcaggttacaaatctaggcctcccaaagttcctggggtgaactgagagaccctaggaggacatttgcagtcatcagtcatccctgagaagggcgttctgggcagtcggtggccataatgagctgtctgtacagaagctagaaaagaatgattagataggaggcaggaaagcataggcttggagggaaataaagcttttatatggttagcatatacaggttagaactttgtcaggcagcagcaaaagaaaaaataaagccctaatggtgttcaaataggcccttacctttttgctcataaagaggcagattcttgcttttttagaacatagccatgttaaactgcatcacctctaacttcttgtagcattgttttctcttcacgcagaccctttttccaaactcagagggattaaaaagaaaaggagagtatgacagacaatgagacagggcaggaaaaatgaaagccagtctgagagccaagtcccactggcacacatgttatctgataggacataaattatttcagagccttcagaggtcttgagtcagtcatttccagactcctccctctcccccataaaactgacaaaacagctttctgacgttgctccttgtaaggcagtgttgagctttcactgtgtcctttctttaaaatgctttctgggaggaggctatcaaggagctggctgagggacaaaattaatcggacccgttggaaacatggcttttgcagggagcccctgctgtttttcaaggcacctgatcctgacagaaatattgtgtccccaaggaaatccttcccaaggccaagaggtaaacacagtaaattgtaagaaataggaaaagtagaaaaatctagaaaatagatcagtcactctcatcacagagtgtgggttgactaaccaacgaaaacagcaagtcatgactgggtaagtctaaacagatggaaggagatggaatgatgcacgatgatggcaaatctgtcaaagatagtgacttggccgtcttgaggacaatattgttttaacctaattgtggggtgtggcccaaagcactctaactgcattttaaagaactgtaaaatatccaatatataccaagtcaaacaccttggaaaggtgggtgtattcatccgttctcacactgctataaagaaataactgagagtgggtaacttataaagaaaagaggtttaattgtctcacagttccacaggctgtataggaagcatggctggggaggcctcaggaaacttacaaccatggtggaaggcgaagggaaagcagacatgtcttacatggctggagcaggaggaagagagggaagggggtggtgccacacaattttaaacaaccagctctcgagagaaatctatcatgagaacaacaccaaaggggaaacccacccccatgatccaatcacctcccaccatcacccatctccaacattggagattaaaatttgacatgagatttgaacacaaatccaaaccatatcagtgggaattctgtcttaggaaagaactggctactgtcaagccaggtgttctaaaatgcccacttcccttcttcagacacacttgaagagagaggaccccataaagtcttcctgactgtcctggcagggaggaagctgtgtgaacctcttgcaaatgggaaaaaaaaaataaatgttaggcagagctggctgcaaataggaagaagggagcatgtttcttgttcacaacatggcattcctgaaaactggctcgtgagtctttttttcctttctggtctgtagtttgctaactgcaggtctactaagaaagaatgggtttggggagttcctgccaatgaattaagaggccaagtcaaagaattttgctcctgcttactgctgcaatcaatgagctatgtgttctccaaaagcatccccaaaccatttcctgcctcacattctccaactggaaaagagccacagcaaattctttttctgaacatgaattcaggctttaaaatttcagattctgctaccgtcatccactcacaagaaattagtttggcaatttggggagccatgttaacaacttaattttcataagactacattaaaattgcataattatataaagtagctaaatgacttgtccatggtcacactgcggggtcccagagagatcacaggtgacccagtcatacatagcccttatgcgcttaaccgtattttgatgtcagatctcatgaagtcccctagtgcctcagacaaccctagcttaatgatcttcaagaatttataattacacttaaagcagaaggtcacagtttacgttgaataatccaactttccatccaagaaaaatggaaagggaaaaaagtaattcttatcaagaactttagtaaagttataactaaaacttgaatttttaacattgtggtgaaatataccaaacataaaaacatgtaccattgtacgatgaatagttttgtggcattaagtgcagtcacgtggttgtgcaaccatcatcaccatccatccacagaacttttttatcttcctaaactgaaactctgtacccattaaacataaattccctcccctctacccccaggccctgctgaccaccattctattttctgtctctttgaatttgcctattttaggtacctcatataagtggaatcataaaatatttgtccttttgtgactgtcttatttcacttactataatgtcctcaaggttcatctatgtggtatcacatgtcaattttcttcctttctaaggctgaattatatttccactctatgtgtataccatattttatttctccattcatccataaatggacacctttcaccttttggttattatgaatggtactgtgagcagaggtatataaatatctgctcaagtccttgcctttcattctttgggatatcccaaagatatctgtatacttctcttcacagtaccattattcatgtatataataatgagatttgaaagccaatagttctgagaaataaggcactagcaaggaaggttagcctggtggtgcttagtaggggtgtcatgaatccaagtagcagctgtaataataatatatgtattattcatatatataataataatggtactatgaacattggttcttggtacttggggtgtgtatatatgcaattgctggatcatatggtaattctatttttaatttttttttttttttttttttttttttttggagatggagtttagctcttgtggcccaggctggagtgcaatggccgtgatctcagctcaccacaacctccgcatcccaggttcaagtgattctcctgtctcagcctcccaagtagctggaattacaggcatgcgccaccacgcgtggctaattttgtatttttagtagagatggggtttctccatgttggtcaggctggtctcgaactctcgacctcaggtgatccaccctcttggtcaggctggtctcgaactctcgacctcaggtgatccaccctcttggtcaggctggtctcgaactctcgacctcaggtgatccaccctcttggtcaggctggtctcgaactctcgacctcaggtgatccaccctcttggtcaggctggtctcgaactctcgacctcaggtgatccaccctcctcggcctcccaaagtgctgggattataggtgtgagccactgcacccggccctgtttttaattttttgaggaattgccatgcagttttctgcagcaactacaccatgtcacattcccaagagcagtgcacagggttccaatctctccacatttttaccaacacttgttattttttgtttgtttattttaaattatagccatcctaatatgtgggaagtttaaaacttagatttttaagaaatcttctagaagaggttgctgatagcataggcttgtagtcccttatttgagacccttgaaaccacatgtgtttcagaatccataacttcttagatttcagaaaatgaccacagtgaatatgctatatattacatcgtatctccagtggggtctggggttgcaatccacaatcaaacatattagtatttctgcagcaaaatgtattaaaattcacactgagtgagataaatgaggactataattaaccttgtttcagacgagatgaagttttgctaacaagcagattgaaggaaaaaatggggggtcttgaattttggcactgcacatagggatttacatctacttagatgagtaaaactcttaagcctgcttaacatgaatgaataggtagcttagaatttgaagagatgtgtattgagtggagctcatttgtggcaacaaacagtactgaaattgctttcgctttacccttctcattgtgccttgaggcagtagcagtcaggggaagaatcatgcacctgagaagaagcccagaccggcacccaagctccccatttctccccattcctcccttagctcctacttggattcatgacacccccaccaagcaccaccaggctaaccttccttgctagtgcctcacttctcagacctactggcttttaaatttcattaaatcttgagagtcatgtgacctactcccccaatatgcagtgccttacatcaaaacagctaccagcattaacgtgatgatgagaaatactaagcacattcacatatcaacagggtctttctggaagcattggtttaactgtcaggagtgatgttgaatgttgagaatagcgggggctgtggttggctgctgggaaacttctgtggggatggtcctgtttaatatctctcagatgacaagaactgtcaattctacccacagggctggatgtatcagccctctcacccccaaatttccataggactcttctaccctaatcggttctaatgtttggatgtagtcaaggacactcacatttataatatgcagttagatgcaaagaaaaataattctgtaaaactgccaaagatttagttcctagccatgctcttccagaacagaaggcaaccaaaatgaggaagctgtgcttggctgttcatgaatgccacccacttgcccagggcaagccgcattggcaaaccatgacatccctgctcaactctccaggttgtcctcacttctggcttctcccaaggctggatccaccaggtaaacttgcatccagccttggaacatgggctctctgtgccaaaattctccttctatgtctcccagggatatgatggtgcaaaaacaggatgctgtcatgtcaaaaaactgtgcaaaacccaataaaaggaataacattgtgggctcaaagacatatctattcttgcaggacaggagtgttatgtaaagaaaccaaatgtgagagggaagaaataaatgggctcatgaggtcctcatgctgagtggggctttcacagaccctttccgggggtcgcacaatggacatctatagatttagattcaggacttacctctggagtgacaaaatgaccatttttattttcagctattttaggtttaagttttcacaatgtctccaaagtcatcttttgaatacaccaaaaggagaaaaggctcttgaggatacggatgcgctgttacttgtttttattgtaagcagctgagcatcagtaggcacagttagaggctgggtttacttggcagtctcttattgttcctggatgttcagactcccaggggtagcattcccatgtaagctattgcagtgagcttctgataaatgactctcagctaaccatgcagtgcacacagcatctgaaagaaacaaagctcgcctctgactcagcataggtacaactgcaggagtcatttcccaaaatgtagaggagcaatgccagaatcgaccatcacctctcagctctggtgtcagcaaaagatgggctgcacctgctattgtttattccaataggctgtaataattaggtagagctcacggagcctggctcatataattgcctgtcagtaatagtcaatccaatggcatattttagaagttacatcaggaaaacagtctcaggatcaaacaggaatttatttgcatatgagatatagtaaaaggcaggacagaagttatgctttatggcaaaagaaagagatatgagtccacggcttttaaaattttctatgaggccattttttagagcagtaaatacttaaagcttcatggaaaagaatttacaatgcactctgtgtgttttattattcattatttagtgagcattgtgaagtcgattttgttcaagatatggatgaagacatggagcttattcatgggacctctgatttaaaatgagtaaaccaattcatacacaaacacatcaagcatagattcaatacctgaaaaatagcttaaataccaaagtttctctgtgtagttcttcttttggaggttgatggatagagcttttggtttccagaacttggaaaatcacttgcaggaagggaagaatttcaagcatatggatattatgcaagaatatgtagataggaataataaaatagaggaaaagatgttttttgagctttcaagcaacaacagtagagcaagtaaaagaataacagtaatggcaattaggtagggctgtcccaggcctgtagagggccagagctggatgtcctgattccctgtcagacccaatcttcatcaatccactgtggccctggccctccaggaccctctacaagctatatcatctgggctcccttgcccaccagcttccagttggatcagccaatgggaggcagcagctggaggtcaagaggcgggactaaaggggtcagggcatcctgccccggtcccctccctgataggtcttggtttggcagttactgtgtctttgggtgcctctctgtggtatcagttcttgttcattccactaacaacttcttccctttatcccctggggccccctctcctgtggccagccccagggcgcttcacctctctgggctggtttcctttaacttgtccacacgtttataaatagcgtcttctttaaactctctttattacccctttgagtgtgctgtctgtttcttaccaggacacagacaaatatagcaccttggtaggaattagaaaaacgcacccagatgggtgcatgggggttcattatgttattgtctttactttaacatgtattgaagttttctaaaataaaaagagtaccaaaaagaaaagaataaaggcacgtcttttggtggatggtgccctgcaggggtgtagcttggtgaccacagaagtgaggctggatttcagcaccaactcactcctgcagcttcaaggggtgagtttgtgcagtgcacgaaatgcccaaccaaacctggcccccttacaaaagggtgggcagatccctgaaagctgggaaatatcttgaggagaaagtgaggataggcctgggtctttaagggtatttgggacttaaatgggaaattgcactatgcaaggaaaacctgtaggacaggaaggcatgggatggctacagtgagttgactctataagacaaggagggtccctggagagagtatgagaaattagaagtgggtggagaccctttgattgctgagctataacatgtgaattctagttgatgatcctccaggcagtctggggcagtgtttttgcactggggctccagagctagactgggagtaagtcatggttttgccagctattagctctgtgactttgcacatttgcttattctcactaagcctcagttttctgtttcataaaacaaggataaaatactccccatctcctagatttgctgttgggctgaatttaaagatgtgcgtcaaatgttttactgcagtgcctggtagttattggacattagctactatcctcaaaagtttttaaagagaagggtgatatgatgaaagcaatattttttgaaaactaatcatacagcatgtgcaggatgctctagagaggaaagaagggcattggggaggtcactttgaggctacaggggggtgtctctccagtgagagaaatgggaaatgggaaaatagaagcaagcataagaagctctgtgagaagaggaagaggactggaagatggacagattgtgagagtaaggagtcagagagggccccaagcacatttccaagatctttagcctccacttatataaatacccctaggcagcttaggcagctcacattgaaggactgacaattttgacattttggtacaagggaaagaaatgtgaaactcagaatcatttgattttacccttctgttttactgaacattggtaaatctacctaatcgaacccaagattctattacaaaataaaaaccctaatagacacctcaatcattccagtaaccactgcttacttctgaaatgtccccaaagcaggtttttcatatccagaatttcttctgattaagatctgaggtagggcctctgcagttgagaatgggcatcctcacagagaactctcttgaatcatatgtaatttataagcccagttcttactaccaaaattagcagaactgaggaaggcattgaatccttgacctaagctaacatttgggatggagggaggaaagagtcattaatgttaagtagtggtgatgtggtttggctgtgtcccctcccaaatcccatcttgacttgtagttccataatccccaagtgtcatgagagggaactggtgggaggtaattgaatcatgggggctgttaccccatgctgctgttctcatgatagtgagttctcacaacatctgatggttttataaggggcatttcccccttttacttggcacttctcttgcctgccaccatgtgagatgtgcctttgctcctcttccaccatgattgtgaggtctctccagctatgtggaactgtgaatctattaaacctctttttctttctaaattacccagtctcaggtatgtatgtttcagtgtgagaacagactaatacaagtggtttcttataggtccccaatttcgcatttatctgtaggcagacctacctaagaactcagtgccatttaaaaaaaaaaaaaaaactagtctgaggctattttagccacatcttcatctgaaaaaatgtattccatgttttcactatttggcattttttttccaggaactagatccagtttttgccaggtgtcttggctgactgtcagagacagtcatctggttttgcatggcagcatctggttttacagtttctgtggcatctccctgaggtgttctctcactctctgccttgcagatacttgcctgagatcatgaatgatgggctcaccaaccagatcaacaatcccgaggtggatgtggacatcactcggcctgacactttcatcagacagcagattatggctctccgtgtgatgaccaacaaactaaaaaacgcctacaatggcaatgatgtcaatttccaggacacaagtaagaaaatccttcccagcaccagaaattttcaaagtaaaaaatggttttagaagatgatgccctgactttcttcaagagcaatatgcccttttaatttattctcattcttcctcaggctgtgattcttgttatagtcttttggacagagagctctgatccacaaaacataggatacgaataaaatcataaattccacaacacaaggaataattgcaatggattacattcagccataccaaagctgaaattgagtttcatctaccagttgattcattaatgacaaaacagcaaagtaattttttcactttctcctgtcctcatcactattcacatctgacccaaacttctgccctgttcccaccaaaagaagaaagctcagcagattgcttagacaagcctaagctagaatccctgtcttattctttattaattagagtctctacaaattactctacttcttgagtctcaggttcctcttctatagaatgggaagcatccctgcttcagaggcttttagaagcctcatttgaggagctatgatagtgtctggtgggtagatgtagctgactacatcatttccctctctatccagctatgcacatacacaacccatagacatttatatctgaaatattgagagaaattgtaaaattctagtgcaatattacacacgactatttcattaaggatcaaagaagcatcaaaaattatttggaagactattaagtgaacattgacatgaaactatatatgggttttgtctgagtagtttcaagatgactaactacaaaaaaagagttttttctgtcattgttgcttgttgctttttaaaaatattacccttacaaagagaattcccaggacaaggattcttgaacataagatgtgaagttgccagtgattctgtaatttggtcactgaatcataagatgatgcttgtgtgcttggattaatgagatagaaagaaataagttacagatagaagacctcaagtcatttcagtcatagttatcagcctaccaagttatcccctgcaaaaaatttttgtgctttattccattttaaagaactcaaaaaaatgattttctaaacacagaataattaccaacccaatggacgttatggctgtaaaattcctcaaaataatcccattatctctcctccttttactaaacccctcctttcctcttcagaagagaacattacacaggtttcagccattgttgcttcacccttgttagcacttagcctcacacctctcattttatccattgtcttctgtattaaataaagtgctctatcatctagagagtggctgttggaatgaataattcaagatacataagaattagttggtttggctttgttgcttctcactcctctctgacctaaagaggttatgcacatatcaagctgcaaagctcagggaatggccaggaggcagagatcttactccatttcccctcaaaagaaaataaaatcaacaattaagaggatccctgagttctaacccaagcaccaaatgtggccctctattttaggctggtgtctgtcatacaaaccattatcacatcttataagcatcagcatccttattgctttgaacatttttttaagttactcatcccaccccttaatatttgcatttgtgattccttttcaaaaagagatggggccattattttttccagccaaaatctcctgtcatatttgcttcccacattttttaatattctaaatcattttaataatatctctgtaaaggttgtattacttcttgttcatgacaccagtgttcagaacaattcccttagcaattctgatatctctgaatttaattaacaggaattttcccccttgtaaaggccactaaaggtaaatcagagaaaatgttgaaaacctagtatagtgtattgaagtgatcttatctggtatttagatgtcccattaaaaaaagaaactgtgctcattctctaattgtgtctttctcattcaagaggacattagaagagtccctacactgccccagatttacttaagtagcatccagcagctaaggatggccctggtttctcaggagcagctcaacagagcatcaccacttcggactagcagggaggagtttagggacattggttggaaatcattgagcaagtgagagaaatagctaatgtccttacaaagcttccagtttcctgagcccttccaggaacatcatttctcctaacagatagatgttattactctcatttttacgggtgaggaaacggagcctcagtaagtctaactggcttaccctggtgcatttaaataacaaatgtcagggtacattccaggtcgcctttgctgtaggaaccatgttttttccatcaggcatcattggcagcactgggtttggtgtcctcgagcactctagtgatttgtcttcacacactctctccaaggtcaatattgtcatctgtatttgtttaagtgaggaaactgcaaaagttgagtaactgcccaaagcacatttatttattcagcaagtatttgttgagcacttgctgtatgccaggggccactgaagaccttagaggtacagaaatgaacaggatttaccaaatctctaccctctcaaagattatgtcctcagttaacattcttgagaaggagataaacagtaagcaagtgaacaggcacgtaaataataccacctccaagcggtgaaaagtactttcataaagctagtaattggcagcctgatctgggccaggtttgagtgacaggatttgtcaaacaagaaggaatcaagccttgagaagtggaaatagggaagaaagcaagttgggcaggaagggacgatgctaccctgggtcgacatactctgtgggtaccaaggccttggtttcaagcagagaatggccaactgtttctgtcaagggccgtatattaaatatgttaatctttgagggccacatcgtctctgccaccactaccccacactgctggtctaacgtgataatatgtatgtgaacgggtagttggattctaataaaacttcatatatggatgctgaaatgtgaatttcacatacactttttacatgtcataaaatattcttcacttgatttttttcaaacacttaaaactataaaaaccaccaggtacagaggcacatgcctatagtcccagctacttaggaggctaaggcaggaagatcacttaggcccaggagtttggggctgcagtgagttatgatggcgccactacactccagcctgggcaacagagccagaccctatgattgattgattgattgatagatagatagatagatagatagataatagactttatggatatctataaaatatatacttttatgtaaataaaccattttggagttatggaccatacaaaagcaagcagcaggtcatagtttgtcaacttctggtttaaagggacaagctggctgggacagagtccagccttgctctcaggagaacacaggtggggaaaaggtggacaaaagtcatattgatagagacctctcactactattgctgctgctcctctcatttcctatttgtagaacttgttttcctctatttttcttttaaaatcctttaaaaagcatggtatcttcctagagcaatggctctgagtataaaaagagcaaagaatggaatttcttaaacttaagtactggccagaagaaatgtctaaggccaacatggtaggtgtggcctccccttgagtctggggttcacacattccttgggttgcataactcaggtatcagttgatattgttcttcaaacacctatttctgtacagtccacccactcatcacaccactgcctattaaaaacaatcctgttgggtagggtgggggaccatggatggggagattttgcctcccaccaccatgccccatatctgctgagctctgtttccactctttcctggttggttgtattagtccgttttcatactgctataaagaactgcccgagactgggtaatttataaaggaaagtggttaattaactcacagttcagcatggctggggaggcctcaggaaaattacaatcatggtggaaggcgaaggggaagcaaaagaccttcttcacaaggtgacaggaaagagaagtgccaagccgtgggggaagagccccttaaaaaaccatcagatctcgtgagaactcactcactatcacgagaacaggatgggggaaaccaccaccatgattgaattacctccacatggcctctcccctgacaggtggggattatggggattacaattcaagatgagatttgggtggggccacaaagcctaaacatatcagtggtctaactttctttttcaatctttccacactaggtgatgaatccagtggctcagggagtggcagtgggtgcatggatgacgtgtgtcccacggagtttgagtttgtcaccacagaggcccccgcagtggatcccgaccggagagaggtggactcttctgcagcccagcgtggccactccctgctctcctggtctctcacctgcattgtcctggcactgcagagactgtgcagataatcttgggtttttggtcagatgaaactgcattttagctatctgaatggccaactcacttcttttcttacactcttggacaatggaccatgccacaaaaacttaccgttttctatgagaagagagcagtaatgcaatctgcctccctttttgttttcccaaagagtaccgggtgccagactgaactgcttcctctttccttcagctatctgtggggaccttgtttattctagagagaattcttactcaaatttttcgtaccaggagattttcttaccttcatttgcttttatgctgcagaagtaaaggaatctcacgttgtgagggttttttttttctcattt

SEQ ID NO: 93 - DNA, 55383 bp, Homo sapiens
ggaacagctgcagccggcgctgggcccgcctggaatgcgggaacaggctgcacaccaggacttttatggaaacttgctgctggagacggcggcggcggcggcggcagcggcagccagaggactcccagcggctggagcagaagtgttagcggccagagctcccagacccctacccacagccaggcgggacgcgcacagtccctccacgcggaaagaagtaccttcgccggtcaccggctcctgcagggtgagaagagttgggggaacgtgggctggggggagtggagacggaggtgtcgggtcccctggtgggggcgggggcgggaacggcggctgcagagaggcgctcggggtctgcggcttctggccgtgctccgctgcagctccggagggcgccgggcgccatacagctgtggtccgcgctggccccggcccgggcgaaccctgccttggagccgcatcctgcgggctcggcggggtgcctaccaggggctgccccagggtctgaaagtgtcggccggccttgggcttctggttgcaatgtctttgccctgctcccctgcgccttgtcggctgagtttcgggtgcgttccctactgtagggagggagccctctgtgagcggagtgggtgccgatccctcggctgaacccttggggtccttagggaagttcagtgccgtcccccaccacttgccccagccgcggtctccgtctctgccagcagtgccagttaagaaatcctttctgatcggtctctgtggaagatggggagaaatatgatttaacagcctattactccccccccacacccccgcatatccccccactcctgtctccaacccttttttttttttttttcgtgattctgcccgaggtgggatgctgggggttgagcaactagggctggaagtttacgaagtttacgtagtttaagtgagtgaagaatgtagtcacctcttgagaactccctttgcctatatgcttttgaaaacgccaaaccattccagctgtttgtaaattgtgaaacgttctacaaatgcattagcattggcatttataaagaaaatgacgaagttgagaggttatagttggttactgcagtgacttagagatgctcattttatagttattaaagcacaacgtgaaccaagttggcagagagataacaaggtaaaaatagcataaggatatgtcctaacaaaatgtccttggtgaagacacaggtagagaaaagaagccataataaagaaattagttccctgaccaaaacaacgggaatatcattcatcgttaaattttgttaatgaattcatgtagcagcggcccattggccttcgagtcacaacataactatgtcttaggtaatgtgattaaataaacttaagtatttatacttaagttcatatcttagtcacacgttatttatatcttagtcacacgttattgagtggaccacataatttcccccgctaaacattatcctttacaggttaaactgctgcagttagaaaactttgtctcaaattcttttgagtttggggtattgttaagaaaaaatgcataattaatcaaatgagagaaaggttttttggggggaggtataatttgtataagtaaactttgattaaccaatgtagctgtttaagtttcttcttccttacaattaacaccgtatttttgcagatattttatattttgactaatgcttctgaggaacaatttaaagaaaaatgcatgcaattatgtagtttatctgcaattcccttaaagaattctaagctaaaaccacaacaaaattattttaaatccagttttcctcatcatagttacaatgtaatccagttttaataaaagattcatattttaaaatccattttcaattgaaatgtaatgaatagcaattgttcctgctcaccttaaaatggaatttgtgctatttttgaaaatttgacatgtaaggctgatcattgtcaaaatgtatgtcatcttgagatgactatatttagcatcaacaaaggaatgcattatctaggtttttgaacagtctttttcccctgaaatttcacttgaagtatttaggttagggtttcatttttgagcagaataaaaactaaatatgcatatttggaagacattaattggggattcagattgcttagaatctgagcggcctataatgacatacttcatttattaaaaaaaatacctgttatctttgaaataccctaaaagacaaaaaaaagggggattatttaaatatgagagttgtgcacacctaaaagaaagaaaataatgcagtgaatgtggaaaagtatgtaacagacaggtaaaagtctaaacgtttttatagaagagaggactgttattttatagttatgtaggccacacacacacagaacatcttggtagtttataatttggagagaaaatgatttataacattcttaacaatttcacatatttctgttcttatttaatcaatctgcggtccatatcacctgtgtagtttctttcatgttctctttctgggtttataattgcatagttacatattatatacatttgaaatggctacattttcctttattatttaaatattcagtgtatagtttggcttaatttatagtagtttactttctatactccagggtgggtggatttgtacccagaaatccaccttaaattttagtttaatttgtattataatgttaatacaccatgttatatttatggttaaaaattatggagaatggaaaaaggggctcttgtaatctgacactcttactgttaggattttgatgtatttcctttaagtctttttcccatgcatagaactctttctttttgcattgacatatctcaataaaacaacatgtgaaagcatcccatgcagtgtctgccatccagtaagtgctcaacaggtgattctttttcttcctcctttatttccttcttgacatctcttcctttttactcttagattagaagacaagcagattggggctccctatatgaggtttcaaggttggtgaaattcacttctcaccgtccatcctgggcctcttccctgtcttttcttccccttcactctttctggccaaaataggcctcccctttgaccctttccattttgtcagtgttgtctattcatttagactaaggctatggcagtcaaaaagtcgacagtcaaaaagacaccttttacttcctgattaccaagtgtggaaaaaaagtaaaaaaaaaaaaaaaaaaaaaaatcaaaaacaaaaaagacacttttggggctgggtgtggtggctcatgcctgtaatccaagcactttgggaggctgaggcgagaggatcccttgagcccaggagttcaggaccaggcctggcaacatagtgagacccacccccatctctacaaaaaatttaaaaattagccagatgtggtggtgcatgcctgtagtcccaactacctgggaggccgaggcaggaggattgcttgagctcaggaggctgaggctgcagtgcaccgtgcttgtaccactgcactccagcctaagcaacagagtgaggctctgtgtcaaaaaaaaaaaagacacttttagccacagacatacttaaaaattggtacattttacattaaaatatcgatttacgtcctctcttaaaaattggaaaatctgggcaaaatctgggttcacttttttaaagaaattatttttatttcagtagctttaggggtaccaagtggtttttggttacatggatgaattgtaaaatggtgaagtctgtctgggtttttagtgtacctgtcacccaaatagtgtacattgtacccaaaggttaacatttttgcacaggaacaatatactggaactaaatagtggctgccccacagacaggcaggtcacatgctctgcatttgacatagtctctgagattccctattgttttaaacaagtcatacactcatttacattacctgtcaattatattacataacattaccttacattacatttacattacctgaccctgaatacttgagtatgcagtccccgatctaagtattagggcaagtatatctgatgcatcatatgatggaaagtctgctgtacttagcaacaggaactgggactttaaacattgtagatatattttggttagcaaacctcttaaataatgtgatcatgggagtgggagaagagattagcattcattgacactaattgttagtgtcgattagagctggaagggaccatatattgctaaccaaaacaaataaaatactttccctggtgggattttagaaagcatggggaagatatttctgctaaggaagtatttcctaggatcttgtaaataatcttttttttttttttttgagacggagtcttgctttgtcacccaggctagagtgcagtggcatgatcttggctcactgcagcctctatctcctgggctcaagtgatcctcctacctcagcctcctgagtagctaggactacagacatgcaccaccatgcctggctgattttttaattttttgtagagatagagcctcactatgttgcctaggcttgtctcaaactcatggtctcaagcaatcctcttgtctcggcctcccaaagtgctgggattacaggtgtgagccactatgcctggcctccttaaaaattctactccctgtccatttgagaagtgtttaggagagtttttgtgactcctacagcttggctataaagaggagtttactgtttttcttttgcctccccattccactgacatgtttggagccagagatccaggtcttcctattcccagctgtgtccttcaatgaaagatcatcttccgcttgcagagatggtgaggaggcccagactccagtgattaccacatcaatttgcttgggaacagaactcctgaagcctcaggtttctggttgttcatggtatttagtttagcataaattcaccccattttattttttattattttagttagtgcatctagatcatcagtcttccttttgtagataagaatcatgtgtcttatttgggatgattttggatcagacagttttcctgttatctctttgtcattcattcactagctcaaatacgaatagagcttgtactatgtcctaggtgttgtgcgaaacactaaaactatagagaggaatagagcagttcttacctttcaggggctcatagtttggtggatatacttcgaaaagtatcacatactgtcatataagggcaaagtgttatttatacttattgcggaaggatatcaaggcaggttgaaagattcaaaagattcttgattttctttctttctttttttttttttagacagaattttgctcttttgcccaggctgaagtggcaccatctcgtcttagtgcaatctccaccccctgggttcaagtgattctcttgcctcagcctcccgagtagctgggattatagccattcgccaccacgcctggctaatttgtatttttagtagagatggggtttcaccatgctggccaggctggtctcgaactcctgacctcgtgatctgcccacgttggcctcccaaagtgctagggttacaagcatgcgccaccgcacctggcctttttgtatttttagtagagacgagatttcaccatgttggccaggctggtctcgaactcctgacctcaggtgatccacctgcctcggcctcccaaagtgctaggattacaggtgtgagccactgcacctggcataagattcttggttttcggtgaggaattgtgtattggtaggagggaaatagatcactacttcgtataggtgaaataggatctaatttcatatttttgaattgcaatgaggtttatgacaggttttatagtatcatttttacttcattattattttttggacattttatagtatcatttttatttcattattattattttttggagacagggtctcgatctttcacccaggctagagtgcagtggcgtgatcagggttcactgcagtctctatgtcccagcttcaagcagtcctcccgcctcagccttccgagtagctgggactacatgtgtgcaccaccacacctggctaatttttctgttttttgtagagatggggttttaccatgttgcccaggcctcaccctcctaaagtgctgggattacaggcatgaaccaatgcacccagcctatagtatacttttttttccttttttttagagatggagtcttgctctgtagcccaggctggagtgcagtggcctgatcccggctaactgcaacctccacctcccgggttctagcaattctcctgcctcagcctaccaagtagctgggactacaggcgcacaccaccatgcctggctaattttttgtattttagtagagatggagtttcaccatgttggccaggctggtctcgaactccttagctcgggcaatccacctgcctcagcctcccaaagtgctaggattacaggcgtgagccaccatccatggccagcctatagtgtaatttttttttttttttttttttttttttttttttgagatggagtctcattctgttgcctaggctggagtgcagtggcacaatctcagctcactgcaaactccgcctcccagattcacaccattctcctgcctcagcctcccgagtagctgggactacaggcacccgccaccatgattggctaatttttttgtatttttagtagagatggggtttcgccgtgttagccaggatggtctcgatctcctgacctcttgatccgcccgccttggcctctgaaagtgctgggattacaggcatgagccaccgcgcccggtcacctatagtgtaatttttaaagtataaggttgcaaccttcattaattaaatgcaataaagttacattatacctaagtttatgtttcctgtacaagtgaaaaatgataaaaatttaggctcatattttatgaagctcaaaacaattttgttgcttgttccaaagactgtaagaattaggtttcaacatttacttgtagcatatagttaagtattacgtttaaaatcttcttaaaagttggctgggcactgtggctcacgcctgtaattccagcactttgggggtgcaaggcaggcggatctcttgaggccaggagttagagatcagtctggtcaacatggtgaaaccccatctctgctaaaaaatacaaaaattagccgggtgtggtagtgcacacctgtaatcccagctacttaggaggctgaggcatgagaatcacttgaacctgggaggtggaggttgcagtgagctgagatagtgccattgcactccagcctgggcgacagagcaagactccatctcaaaaaagaaatcttaaaagttgacagcctggttgggcacagtggctcacatctgtaatcccagcactttggtaggcttaggtgagcagatcacttgaggtcaggagttggagaccagcttggccaacatggtgaaaccctgtctgtactaaaaaaaattagccaggtgtggttgcatgtgcctgtaatcccagctattcgggaggctgaggcaggagaattgcttgaacccaggaggcaaaggttgcagtgagcagaaatgacaccactgctctccagcttgggtgacacagtgagactttgtctcaataaataaataaataaataaataaataagttgtcggccaagcacagtgactcagaaactgagctcattttctgacttaaacatgccttttaatttaatctccagttaatggtaaccctgttcacccatttgctcaaactagaaaccttgggttcatccttttttatttacttgtttgtttgtttatttctcatcctctgactcttgcttgggttcattcttgacaatattcctctcctcacctctacccctccaaatcaaattggccaaacctcttgcaattgtgccccactacagtgtaagttccatcaagaaggctgggcatggtggctcacacctgtaatcccagcactttgggagcccgaggcgggtggagctcaggagttcaaggccagcctggccaatatggtgaaaccccatccctactaaaaatacaaaaattagctgagtgtggtggcagacagttgtaatcccagctactcgggaggctgaggcacagaactgcttgaacctgggaggcagaggttgcagtgagctgagattgcaccactgcactccagcctgggtgacagagcaagactctgtctaattaaaaaaaaaaaaatttagaaaagagagaagaatcaaatagatgcaataaaaaatgataaaggggatatcaccaccgatcccacagaaatacaaactaccatcagagaatactacaaacacctctacgcaaataaactagaaaatctagaagaaatggataaattcctcaacacatacaccctcccaagactaaaccaggaagaagttgaatctctgaatagaccaataacaggctctgaagttgtggcaataatcaatagcttaccaaccaaaaaaagtccaggaccagatggattcacagccgaattctaccgaggtacaaagaagagctggtaccattccttctgaaactattccaatcaataggaaaagagggactcctctctaactcattttatgaggccagcatcatcctgataccaaagcctggcagagacacaaccaaaaaagagaattttagaccaatatccttgatgaacattgatgcaaaaatcctcaataaaatactggcaaactgaatccagcagcacatcaaaaagcttatccaccatgatcaagtgggcttcatccctgggatgtgaggctggttcaatatacgcaaatcaataaatgtaatccagcatataaacagaaccaaagacaaaaaccacatgattatttcaatagatgcagaaaaggcctttgacaaaattcaacaatgcttcatgctaaaaactctcaataaattaggtattgatgggatgtatctcaaaataataagagctatctatgacaaacccacagccaatatcatactgaatggacaaaaactggaagcattccctttgaaaactggcacaagacagggatgccctctctcaccactcctattcaacatagtgttggaagttctggccagggcaattaggcaggagaaggaaataaagggtattcaattaggaaaagagaaagtcaaattgtccctgtttgcagatgacatgattgtatatgtagaaaaccccactgtctcagcccaaaatctccttaagctgataagcaacttcagcaaagtctcaggatacaaaatcaatgtgcaaaaatcacaagcattcttatacaccaataacagacaaacagagagccaaatcatgagtgaactcccattcacaattgcttcaaagagaataaaatacctaggaatccaacttacaagggaagtgaaggacctcttcaaggagaactacaaaccactgctcaatgaaataaaagaggatacaaacaaatggaagaacattccatgctcatgcataggaagaatcaatatcatgaaaatggccatactgcccaaggtaatttatagattcaatgccatccccatcaagctaccaatgactttcttcacggaattggaaaaaactactttaaagttcatatggaaccaaaaaagaacccgcatcaccaagccaatcctaagccaaaagaacaaagctggaggcatcacgctacctgacttcaaactatactacaaggctacagtaaccaaaacagcacggtactggtaccaaaacagagatatagatcaatggaacaggacagagccctcagaaataatgccacatatctacaactatctgatctttgacaaacctgagaaaaacaagcaatggggaaaggattccctatttaataaatggtgctgggaaaactggctagccatatgtagaaagctgaaactggatcccttccttataccttgtagaaaaattaattcaagatggattaaatacttaaatgttagacctaaaagcataaaaaccctagaagaaaacctaggcaataccattcaggacacaggcatgggcaaggacttcatgtctaaaacaccaaaagcaatggcaacaaaagccaaaattgacaaatggaatctaattaaactaaagagcttctgcacagaaaaagaaactaccatcagagtgaataggcaacctacaaaatgggagaaaattttcgcaacctactcatctgacaaagggctaatatccagaatctacaatgaactcaaacaaatttacaagaaaaaaacaaccccatcaaaaagtgggcaaaggttatgaacagacacttctcaaaagaagacatttatgcagccaaaaaacacatgaaaaaatgctcatcatcactggccatcagagaaatgaaaatcaaaaccacaatgagataccatctcacaccagttagaatggcgatcattaataagtcaggaaataacaggtgctggagaggaggtggagaaataggaacacttttacactgttggtgggactgtaaactagttcaactattgtggaagtcagtgtggtgattcctcagggatctagaactagaaataccatttgacccagccatcccattactgggtatatacccaaaggactataaatcatgctgctataaagacacatgcacacgtatgtttattgcgacactattcacaatagcaaagacttggaaccaacccaaatgtccaacaatgatagactggattaagaaaatgtggcacatatacaccatggaatactatgcagccataaaaaatgatgagttcatgtcctttgtagggacatggatgaaactggaaaccatcattctcagcaaactatcgcaaggacaaaaaaccaaacaccgcatgttctcactcataggtgggaattgaacaatgagaacacatggacacagaaaggggaacatcacactccggggacggttgcgggatgcggggagaggggagggatagcatttggagatatacctaatgctaaatgacgagttaatgggtgcagcacaccaacatggcacatgtatacatatgtaacaaacttgcacattgtgcacattaaaacttaaaatataataataataaaataaaaaaataaaaaataaaaaaacaaaaaacaaacaaaaaaatttaatcaagacagggactttgactttttgttccctttcatctccccaagcttaggatagcgcctgacacaaagtaggagcgtaagaaatatttgttaaataaataatgagtcaccatgtcctgtcaattccacttccaaaatgtctcttccagcttttcattcctaatgctaatgtcctaattcaggcccttatcttctcttaccaaggtcattgtacttgtcctccttccactagtctttccccattaaactccattctctacattgctatgagtttctttttcttttctttctaggatacatctttcagtcatgctcgtttgctggctctctattgcctatagtattattaggtaatatctgaactttttattaatatggtgcacagtattcattctagtctgtgcccagcctgtccttctagttttgccatagactgactggacaattttatagctccccagatttgcaatgggtcaccaggcattggtatttttgttcattctggttctttttcctggatgcctttacaatcttttccactttgtgaaattctacttatctgtcaaggtctaactcaaatgtcattgtctccgtgaaaccttctttaacccagcctcttccttaaccataccatagtcttttccatgtttctatagcctggttataatactggtattatagcatttactacatcatataataattagtacatctatttctgtcaccaaagctatttgattcacaagggctagctcttatttgtttcgtatcccattgccaggcatactttttggcatacagcagattctccttttcacaaaaataatgtattgtaaatacagacctcatctgtcaaatttgaaaaaatgcagcttttttgataaattgtgtatgggttatactaatattgcaatattacctctgaaacctgcggtggatacatattcgtcttcatttaacatgaatgcttaatgtgttagaatgccattactaaatctctttatcatcccagccttctctattatgaccaaactcttagaaccacctgttccatcttatcttttgatcactggtttctttctaatcgtattcttgataacgattcaattgacttgcctgggattttagatacataggtgtaatggagctgaattgttgggttgctgctgcccctttaaggtggccaaggacattgcatctgcctactcaaacaagaaaaatcacttaacgctagaagaagaaaagcctgttaagattccagatacaaagtctcttggcattcaggtcactgagtataggaattaagttgttaagccaatctccatttagcattctaaaatacatttctagaatgagaacttgatatgactcaattaggatgtttttcctgtaactcagcaaatctcaaaatgtggtcttagaacccctgggagtcctcagtaccatttaggggtccataaagtccttccttttccaactacatattagtataaggtcatattttcttagagacttcaatcaaaacaacatcaccgtagtttgaatgcagaagcagatatgagaatgtatttttcctctattaagccagataccagagattagcaaaaatgtaaaattattttcctcttcttactaattatttttatgtttataaataatggtttgttattgttactttaaatgactttataagtacatattagaatattttgttttaatttctaatatattaaagacctattgttattatccatataaacaaaacctctattataaccaaactcttagaaccacatgttcaaccttatcttttggtcactgttttctctctcatcttattcttcataagaattcaatggacttgccggggatcttagatacttacaaggtgcaatggagccgaattgttgtgttgtggctgcccctttaaggtggccaagaaccaccttaggatcctcaataatgggcccagactttaggtcctgagccccaaaagtttgagacccactttataatacatagcctttctttttgtggggggattttctttaacatcacagatcttattattttatttagagatggtgtctcactatgttgcccaaaccagattcaaactcctgggatcaaacgatctttctacctcagtcctcgctaactaagctgggactacaggaatgcacccagctaaagctaatttttatgtgtgtttacacactttcagatgttacctaaataaagccttttctaatctaaaaatgtaagccttattatatttttgatagttatattttatctcatctagaccataaactccataacagatattttatcctattcgttattatttatgtagtagcctatatactgtacctagcacattatagaaaaatgttcaataaatgtttcttgaaaaaacatcaatgttcactaatttatctttttctgtttattcttagttctgtcatactcatcactctaaatttataaagcatatgaaaatcacctagtttatggtacacaataggtattcaatttgttattttctcctcctttatttggtttagaggtttcagaactttcctttaacgtactgcagttttaaaaaaatccttaaattttatttgtacatgtaacttttcattactttattaatgacttcatcaaatgaaagtttaccaattttctttgagtggttaaagttttcccaaaagagaataaaaggcaagaattataggttttgattctgttcatattctgagaggataggaggatgtactacatagagcctaggatatggtgagtacaggtagaatattatttaaaacatctataaagatgtgttatgctgaaataggtgttgcacaaaataaatgaaacagactttgtattgcctaatacagtggaaaaagctgataattgttgaagcttgatatgggtgtatgggggttcattgtattagtctctttcagtttgtatgcctgaaattttccataataaaaaagtaaacaaaaaagatagattagactgatatgtctgagatgtttaccaatataaaaatgtttaaagtttatgccagatacacctagaaatctaagcatatttagaggtctcagagactgaaggagaaaaaacaaccatgtttaagatgaagtggagaaaaatcaccatttccattataattagtttgggaaaatacctccttggtaaagaagtgacttaagaaaggtcttggaggtagaaaaaggctactaaatagatttgtctagctggaaggttgaaaaaatggagagaagacaaaggaaactgaagagtctgagggtctgcagaaggcctgtcaagcccaggtgagaattttagttctgatccatgatgcactacacagttaacatcctcagagttagagtgatacactagagcacagagaggtagagatggcagtagttgagtagagaacctagtgggcctggttgagggcagaaagaatggtgggctgttatcctatcataagaaatgaaaaaaaaaaaagagagaaatcagaacaatcatggctagaagttcttctggaacttttaaaacctattttttttaccaataatgtatacttaaattattattctattctaatacaatatgtatcagttaagagttctgaagaaactacattaaagtagctgccctatagcaactgaagttaactatgtcattacacttggattccggcacctattgaaaagattgaataatttgaaaatgtttatcaggattccgaagaaaagaaaaccagtaaagtgaatactttgaattttatagcttctcattttgtaagtttattaatgaaaattatagtgatacatatgaagactaaatagaaataatttctggcaagcataattatatgaaattgaaggagcagctggggccttttgctaaataaagcagcaaaattaagtttatagactggtaactgaaatgttgactattaatatatataagcacgaaactgggaagactgacaagccatgggcaatatgatgaaaccctgtttctacaaaaaatacagaaattagctgtgtgtgatggtgtgtgcctgtagtttcagctactcaggaggctgaggtgggaggattgcttgagcccaggaggtcgaagctactgtgagctgtgattgcaccacttctctccagcctgggcgacagagtgagatcctgtcaagaaagaaaggaagtgggaggagatgataaaataagtcaaagattaaattgatatttgaaatttttagtttttatttttatttttttgtgacagagtcttactctgtcacccaagctggaatgcagtggtgcaatcctggctcactgcgacctctgcctcccaggttcaagggattctcctgcctcagccttcctagtagctgacataacaggtatctggcaccacacccagctaatttttgtatttttagtagggatggtgtttcaccatgttggccaggctggtctcaaactcctgacctcaagtgatccgcccgccttagcctcccaaaatgctgggattacaggcatgagccactgttcctggtgatatttggaattttttaaaaaaccaccttattaacatatgattgacataccaaaagctgtatatatttaatgtatgatatttggcatttgagaatatgtttctaaaagactaataatctgctataaatgttcaacagaagacttctttaaaatatagtatagacagtttgttaagagaatgaaaagttgaatcaaaggaacagaggatctttcaaacttgctagtttttgcgtgaatattgaaaagctttatgtgatagcttttgggggttattttaaattataatttaattgaacaagatactggaaagcaactgatcccctgcaatctgggaagggagcgtagagtctaccatgcgtacagaggaaaatcagggagtaagagaagtgcaaaatatggactgagaatggaaatcattgatcttagtcatctaactggaagttggggaatagtgtatactgcctttcaattctatagtaggcatggttgatgttagaaccttacctgtgtttgcaaatagcaaatcaggctggaccacttaaaaatccggttccaaggcttttgttgagagttgttgcaaagagactgttaatagcatgagaatagagaccatgtctgtgtgttcagtgttatatttctcagtgcccagtagagtgcctggcatagtagatgcttaataaatacttatgggccaggcatggtggctcacgcctttaatcctaacactttgggaggccaaggtgggcggatcacgaggtcaagagatagagaccatccttgccaacatggtgaaaccctgtctctactaaaaatacaaaaattagctgggtgtggtggtgcgtgcttgtagtcctagctactcaggatgctgaggcaggagaatcgcttgaacccgggaggcagaggttgcagtgagcagagattgcgccattgcccagcctgggcagtggagtgagactccgtctcaaaaaaaaaaattaatataagtggcatgttgtatttatacaatatccctgcataatgataatcataatgatagtcatgccttatatccagataatctttatctgttcataaagtgattcaccttgaagctggcaagatttacttgttcagggctgggcatggtggctcatgcttgtaatcccagcactttgggaggctaaggtgggaggatcacttgggcccagaagttaaagactagcctgggcaacatagtgagaccctgtctcgacaaaaaaattcaaaacttagctgggtatggtggtgcaagcctgtagtaccactcaggacgctgaggcaggaggtgctatggatataatggtgtacaaaacacagtcactactctcaaagacctcaccttctggtcgaggaggttttcaggaaggtgggtcattactgtacattgtggtcagtgctacaattagggtaaccatgggatgctgtgtaagcaaacaggagaagcacttaacctagtcttgtggaatcaaggaaggcttcctggagaaagtgacaattcaagaattaaaggatgagtaggagttagctgagtgataagggaatgagaatagcataaagctgagggagccagctctgcaaaggcttgagttgtgccagtattacagtatgggtgatagagtgggagggaggggtaaaaagagatgaggctacagaagtaatttaatctactaaagtgtattaaatcacagaagaaaaagtggacaatgagaagaaaagggcaaagattgaaagctgggggcaaacaacatctaagaggtagagagaggtatagaagccctcaaaggacatagagaaggaatgctcagagacatgaaaaaacagagggagaatagtgttatgaaaccaagcaaggaggatttcaggaagaaaggagtgactgagagtatcaagtgtagcagtgaagttcagaaaaagggaactgttcattttatttggcaatataatgagaaaagcattattaggcccattttacatataaaactgaagttcacagaagttaactggctcatccaaaatcacatatctaataattaacctaaacagaaactctaatccaagttttctggctctaactccagtgcttcttccaccgtcaatgttttcttaatgtgcatgaaaaaaccaacagttaactatataattatcattaggatataattaaatacaaaggttattaagcgcaaaaagttctagtagaatattttgggagatttcaaattatttttgtattaatattaaaatttaaaatatatgtgggtttggaatttttatgagggggtttatgaaaagttatgataacattgagcctgtatatgtcatttgttctaaagttgttttttgtttgtttggtttctgttttgagacagggtcttgctctgttgcccagggtgtagtgcagtggttcaatcatagctcactgcagccttgaacttatgggctcaagtgatcctcttgcctcagcctcccaagtagctgggactacagggacatgccaccacacccagattaatttttttttaaattgtagagatggggtcttgctatgttgcccaggctggtccccaactcctgcctcaagtgattcccctgcctcaactcagcctggataacaagtgtgagccataacacctggccgggaaatgatttggagagaaggtttgataatagtatttaccttgaagtgttgttgtaggaaataaatgacaatgcttgttaactacttggcacattaccaggcacacggtaaagacttaacaaatgttaacttggattatcttcatcattaattttattcatgttttgtgactaaaggatgtattagtgaaatagtgggtttagataggataatacagttaatgactagggaacagagttttcctgtgaagttaataggccaaacagagtcaaattcacacctttatccttgtgttaacacagataggtaaatgagttagcaactgaaatgcactgttgtttctaccaaggcagtgtcatacttcccttttaattaacaataaaggaatcttatatgtatttacagtgtctacgtaattatgaagttttttctccaacataaaaatatttaagagatgtgagttctattggtttgtaatttgcaccttaagtgcaattccataacacaaaaaggtcatgaacttattttgctacaactttttatcctcaaaaggcagaacagagcaaactttgagtaaaggatcacttgcttatattttaaccaaaaaagttaaggctagtgctgttcaaattttcactgagttttaaaatgagagctcagaatactaaaatgacattttaaaaaacgattttaagtggttttattcatagtaaatttttaaaatcaattttattttattctaaatctataattaagtcaagatataatttgaggattttttacaaattaaatgaagaggtctagctgattcatttattttctaggactattcttgacagattaattattcactgtcagtaagccacccaattttctttcatttcacacacacacaaaaaaagccttttgaagtcccttctggccaattaattgacctaaaattatcagttcttatgatcccatgattccaagttttcctcataccctttagtattactctaaaaaaactgcatgagaggctcgggcatggttactcatgcctgtaatcccagcactttgggaagctgaggtgggaggatcacttgaggccaggagttcgagaccagcctgggcaacagagtgagacccctgtctctatttttttttaaagacagtctcatgctttgttgcccagcctgaagtgcagtagcatgatcacagctcactgcaaccttgaactcctgggctcaagcgatcttcctgcttcagtgtcccaaatagctgggactacaagcatgtgctatgacacttgcaaatttttaaattttcagtagagatgagtctcgctatgttgcccaagctggtctcaaactctgggctcaagcgattctcccacctcagcctcccaaagtgttgggattacaggtgtgagccactgcacccacccccacccctcccctacctctatttttttttttttttttttttttgagacagagttttgctcttgttgcccaggctggagtgcaatggtgcgatctcagcttacagcaacctctgcctcccgggttcaagcaattctcctgcctcagcctcccgagtagctgggattacaggcatgtgccaccactcctggctaattttgtatttttagtagagatgggctttcttcatgttggtcaggctggtctcgaacacctgaactcaggtgatctgcccgcctcaacctcccaaagtgctgggattacaggcatgagccaccacaattgtgtaagtaatacattatatatgctcactggcagggaaagataggttttttcctaaatagagtaaattctagtaggggagatgaatagtaataaaattaatcaaagttattgatatctactaatgttagttattattccagggttcttcatataatgctctcagctaatcctaactaagcagttaacagatttgaaatttggatttaggtctgattaccaaattttggtaatctaaatgtgaggtgattgaaggtctgtattagtatggaggccgtggaaatatgaagtaatatgtaagagaagtttgaaagcaacattcataaatcttgacaatctattaaaatctaggagatatagaagaatgaatcaaaaataactgcaaggtttgagaagccatgagaatgaagggtaggttttgttggttatataagaagaaatatcaggccaggcatggtggctcatgcctgtaatcccaaaactttgggaggcgaaggcgggtggatcacttgaagtcaggagttcaagaccagcctaatcaacatggtgaaaccctgtctctactaaaaatacaaaattagctgggcgtagtggggcatgcctgtaatcccagctacttgggaggctgaggcagaagaatcgcttgaacccgggagacagaagttgcaatgagccaagatcacaccattgcactccagcctgggcaacaagggcaaaacttcatctcaataaataaataaataaataaattaataaaatatctaacaggtaactttagatatgatataatggctcaagtaagacaacaggactagtgctatttattatttttatctcaggcacataaaattaggttactcataaaccttagttcatgacacactcatgtatagatggattcctttaatttactcctttatttttaataatgtcataagcaccgacagacccactaaacaagaaaagttaggatcttattaataattacagggaatcatgtcccatcctctcccccattatattgtctccttcccataaagaaaacttcagtcccacatggcttcactggggagttcttgcaaatatttagggaaaaaataatactaaatcctacatgaactcttccagaaaactaaagaaataattcccaactcattctataaagacaatattactctgttaataaaagcggacatcacaagaaaagataacttacacaaccaataatttatcataaatacagatacaaaacttaacaaaattttatcaaattgattccagcaatatattaagaggataatgcattataaccaattgggaattatcctaggaatgttaaggttgatttaacacttgaaaatcagttaatgtaactcacaatattaataaattaaaaatgaaagccatatgattatctcaatagacacagaaaaagcattagataaaatccaacatctgttactgataattactccagtaaacttagtctgataaacggcatctaagaaaagcctacagctaacatcttacttaacagtgaaagactggacatatttctcctaagatcaggaacaagacaaagatatctgctcttaccacttctatctaacattgtactggaggttctagctagtacagtaaagccagaaaaagaaatgaaaggcatccagactggaaaggaaaaagtagaactgtgctcaccgatgatgtgatcatctatgtatgtagaaaatctgatggaatctatgaaaaagccaatagaactaataagttattaggctgggctcggtggctaacgcctgtaatcccagcattttgggaggccaaggcaggcggatcacgaggtcaggacttcgagatcagcctggccaacatagtgaaaccctgtctctactaaaaatacaaaaattagctgggtgtcgtcggtcgcgcctgtagtcccagctactcgggaggctgaggcagtagaatcacttgaacccgagaggtggaggttgcagtgagctgagactgtgccattgcactccagcctgggtgacagagtgagactgtctcaaaaaaaaaaaaaaaaaaaaaaactaataagttattttagcagggttgcaagatataaaaccagaatacaaaaactgtattttttaattttaattttttttcttttagaaatagggactcactctgtcacccaggctggagtatggtgatatgatcatagcttacagtaactttgagttcctgggctcaagagatcctcctgcctctgtttcccaagtggccaaaactacagacacacaccaccaggcctggctaatttttaaattttttgtagagatggggtctactatgttgcccaggttgttcttgaactcctggcctcaagcaacccccctgcctcagccttccaaagtgttggtttggattaaaggaatgagatacagcgcctggccccaaaattatacttctgtatgcaggttgaatatccctaatctgaaaatctaaaatccaaatgctccaaaatctgaaacctttggagtactgacatgacgtcacaagtggaaaattccacacttggcctcatgtgacagatcagtcaaaacatagtcaaaactttgctttggccgggcaaaatggctcacgcctgtaatcccaacactttcagaggccaagacaggtggattacctgaggtcaggagttcgagaccagcctggccaacatggtgaaaccctgtctctactaaaaatacaaaaattagccaggcatagtggcggacacctgtaatcccagctacttgggaggctgaggcaggagaatcgcttgaacccaggaggtggaggttgcagtgagccgagattgcaccattgcactccagcctgggcgacaagagcaagactccatctcaaaaacaaaacaaaacaactttgcttcatgcaaaagttatttaaaatattctataaaactaccttcaggctatatgtataaggtgtatatggaacataaatgaatttcatgtttagacttgggtcctatccccaagatagcctgttttatatatatatatatatatatacacatatattccaaaatccaaaaaagatctgaaatctgaggccaggcacggtggctcatgcttgtaatcccagcactttgggaggctgaggcaggcggatcacaaggcaggagttgagaccagcctgaccaacatggtgaaaccccgtctctactaaaaatacaaaaattagctggatgtggtggcacgcacctgtagtcccagctactcaggaggctgaggcaggagaattgcttgaacccgggaggcagaggttgcagtgagccgagattgcaccattgcactccagtctgggcgacagagtgagactctgtctcaaaaaaaaaaaaaaaaatctgaaatctgaaacatttctagtcccaagcatttcagataagggatactcaacatgtactagcaacaatcattaatttaaatctaaaaaacaacaccatttacagtagtataaacaactatgaaattatttagggataactgacaaaagatgtggaagatctgcacattgaaaactacaaaacatttctgagaaattatagaatatgtatataatgggggggacatactgtgttcatggatcagaagacttaacattattaagatattaattctccctagatccatctacagattcaatgcaatcccaatcaaaatcccagcatattattttgtggatattgacaaactgattctaaagtttatatgaaaagggaaaagacttggaatagccaacacagtgttgaaggagaagaacaaagctggaggactaacactactcaactttaagacatactataaacctacagtaattgatacagtgcagtgttggtgaaataataaacaaaaagatcaatgaaaccgaatagagagcccagaaatagatccacgtaaatataatcaactgatctttgacaaaggagcaaaggcaataaaatagagaaaagattattttcaacaaatggtgctggaacaactggacatccacttgcaaaaaactgaatctagaaatagaccttacattcttcacaaaaattaactcaaaatgaatcacagacttacagcatagaactataaaactcctagaagaaaacatagacagaaatctagatgacctcagatttggagttcactttttagctatgataccaaagtcacaattcatgaaagaaagaattgataagctggacttcattaaaattaaaaaattctgttctgcaaaagacactgtgaaaagaattaaaaaataagccatagacttggagaaaatatttgcaagtgacatatcagataaaggactgttatccaaaatacacaaagaactcttacaactctgtaataagaatacaaacaacccaattaaaaaatggaccaaagggctggggacagtggctcacgcctgcaatcccagcactttgggaggccgaggtgggcggatcacctgaggtcaggagtttgagaccagcctgaccaatatagcgaaaccccatctctactacaaatacaaaaattagccgggtgtggtggcaggtgcctgtagtcccagctgctcgggaggctgagacaggagaattgcttgaacccgggaggcggaggttgcagtgagccgagatcatgccactgctctctagcctgggtgacagtgcaagactccatctcaaaaaaaaaaaaatggaccaaacaaagatcttaggagacatctcactgaagaagatacagatggcaaataaacatatgaaaaggtgctttaatatattatttaatataattctaatttaatatttattcatttaatatatattcaaggaaatgcaaataaaaatgacaatgaaataccactccacatctattagaatggccaaaattcagaacactgacaacatcaaatgcaggtgaggatatggagcaatatgaactctcattcattgctggtgggaatgcaaagtggtaagctacatggtggtttcttataatactaaatatgctcttaccatataatccagtaatcatggtccacaagaacctgcatacagatatttatgtcaactttattcataaacaccaaaacttggaaacaaccaagatgtcatttggtaggtgaatggataaactgtggtacatgcaggtaatagaatattattcagtgctaaaaagaaatgagctatcaagccatgaaaaacatagaggaaactgaaatgcacataactatgtgaaaaaagtcaatatgaaaaggctacatactgtgtggttccaactgtatgacattctggaaaagtcaaaactatgaagacagtaaaaagatcatggttaccaggaattatgggggagaaaagcataagtaagtggagtaaagaggacttttaggtcagtgaaactgctctgtgcaatactgtaatgatggacacatgtcattgtacatttacccaaaacccacagaatgtacaactcaggagtaaaccctaatgtaaactatggactctgggtgataatgatgtgtcagtataggttcatcatttataacaaatgtaccactccaataggtggtaataatggggttatccagtgttgataatgggggtgactaagcatgtgcagggacagaacatatacaggaaatctctatcttctactcaattttgctgtgaacctaaaataaactctattaaaaaaaaagttggctagaaaattccaaaagaaaaaaacaaaacaagataaaacaaacctaaaataaatatttaaatgataggcctaaactcattgatattaataattacattaaatgttaatgaactaaatgctgcaattaaaaaaacagattttaggcctggcacggtggctcacgcctgtaatcccagcactttgggaggcctaggtgggtggatcacaaggtcaggagttcgagaccagcctagccaacatggtgaaaccccatctctactaaaaatacaaaaattagctgggtgtggtggtgggagcctgtaatcccagctactcaggaggctgaggcaggagaatcgcttgaaactggaaggcggaggttgcagtgagccgagatcatgccactgcactccagcctgggcaacaagagcgaaactacgtctcaaaaaaaaaaaaaaagaaaacccagattttatcagaattgatttttgtaaaaagcaaggtccaaacatatgctgtgtccaagacatatgctttacatataaaaacatagatagagtgaaagtaaatagctagaaaattatataccatgcaaactgtaaacctaagaaagttgggggccagatgcagtggctcacggatgcaatcctagcacttctggaggccaaggtgggagagttgcttgagcccagggtttcaaaaccagtctaaacaacacagtgagaccccatttctatagagaaaaaaaaaagagctgggcatagtgctgcatgcctgtagtcccagctacttgggaggctgaggaaggaggatcgcttgagcccaggagttcaagggtacagtgaactgtcattgtgccactgtacttcagcctgggtgacacagcgagatgctgtctctaaaaaataaatgtataaataaaaagaaagctggtggccgggcatggtggctcatgcctgtaatcccagcactttgggaggccgaggcaggcggatcacgaggtcaggagattgagaccatcctggctaacacggtgaaaccccgtctctactaaaaatacaaaaaattagccggacgtggcggcacacgcctgtagtcccagctactcgggaggctgaagtgggagaatggtgtgaacccgggaggcagagcttgcagtgagcgagatggcgccactgcactccagcctgggcgacagagtgagatttcatctcaaaacaaaaacaaaaacaaaacaaaacaaaacaagcaaacaaaaaactacatagttgaagattgatagaaatagccaaaaattagtaaaaatacagatctaaaacatgatcaactaccttcagctagttaatatttatagagtaatacactcagtaattgctgaatacacattcttttcaagtgaacttagtatgttcatcaagctattctggatcaaaaactttcagggatcttttaccatcatgcaccttatgttttctataccatgaatcttgggaaaaagagctaaaggttatcacaatttattacttgcttgaatcatgtcagtattttttgaggggcaattaactgctatttctatttataaaaatacataatatattacaaataaattaaaatttattatacaatataaatttttttcaggtgcaaatatatacagagcttcataatcagcccaagaccacatagagcaaacatgaatgatatttcccaaaaggctgaggtaagtctcaaaagtaaaaataaaaataaaagagggaaatgtagagttgactgtagaattgctgaaaggacagtcatttggtggaaaggtcatatttaggagttcataattaataacataatggcaagatgtaaaacaagaagagatacaattcaccagctggtcttgggctagtattttcatttgggttctaggaaattctacaaagcatgagtagtaaatttgtgaatgatagtgaagtggatgtgatagctagcattctgagtagaattttaaatattttgttcttgataactcttagaaattattattttagtattaaaacaaagtttgacctatactcataggagaaaacataattccctcttaggtaaggaacctttttagtgccttatatatatattttaatttttagctttcttctggttcttgactgtagatactgagagttgtaagaagagctcagttgctgacacctcagaattataaagttaacccttaaatggccaatgacacataatagattataaaatacaagttggatgtgccacaaattaattaagtaattgtcattatcactaggaaaaaggatttggtgttctgaggcacacattttatttactgaaatttcatttagaaatcagcttaattttcaaagtggtgaaaataatttgctcttctggttttagagtggaggaaaatcatttcttcagtcttctaccagattcccattctttgtgaagctgttgccatatggaattcctcttacagcccgcccccatatagaatgatatagccttcttacacatttttaatgtggcttaaagaagttatagatgggaagtaatagtaacaacataaatcacagcttgtgcacacagaccacggtgtacctcagccacaaataaggactaaaggactggcctttggttttgcttatattggatatagaaaccaggaagggggtaaaatgtgaattaggctcaaactttaaagcctaaacttttgctttgttttcaacttcaccaaatttactgaaattagtttgggtacttttttagcaagtgatatcaaatctgaatctttaataatggagttagacaataaaagacagttgtttttaattagaattcagaatttgatttttatattttactggctttcagcttcagtggaatgctacccacaaaatgagatttcattactatataacagtgaaatttctactctcatattttctgtaatgtcatttttcatagttaggttttagaaagtatctaatcaggttgtgatggtcaaataaagggttcaaacacatttctattttctgtttcaataaatattttttatattgcttattcttatctatctttacctaatttcttcctatctttttcgttaactttcttttttttattttcttctaatgaagattctgctttcttcatctaaacctgtcccaaaaacctatgtaccaaaacttggcaagggtgatgtaaaggataagtttgaagccatgcagagagccagggaagaaagaaatcaaaggagatctagagacgaaaaacaaagaagaaaagaacaatatattagagagagagaatggaacaggagaaagcaggaggttattttattttactttattctcgtgaaaatatttgtttgcattttttcatttaaattgtatttattcacattaaccacatttcacattaactataactaaaatacttttctgtatttgtaacctaatttaaactctgcatataatgtgatttagtctaatttttggacatgtgctcacattaatttatttaaccatctagattaaagaaatgcttgcttctgatgatgaggaagatgtatcttctaaagtagaaaaggcttatgttccaaaattaacaggtaagaagcttgaggggtaaatagtaaattaaattgcaaaatagaaacataaccaagtatcaaacttttttttcatatatttttaggaactgtgaagggtagatttgctgaaatggagaaacaaagacaagaggaacaaaggaagagaacggaggaggaacgaaaacgcagaattgagcaggatatgttagaaaagaggaaaatacagcgtgaattagcaaaaagggctgaacaggtatcactgaagattaagttcgtatttgtttctgaaactaactgtgcaaagtaaaactaatcagtatgttgcctaattaaaatattttaatgtaacataaacctattaaaaagcagctaaccgtctgggaatggtggctcacctctgtaatctcagcactttgggaggccaagctgggtggatcgcttcgacatcagcccgggcaacatggcaaaatcctgtctctacaaaaaaatacaaaaattagctgggcatggtggcaagtgcctgtagtcccagctattcagaaggctgaggtaggaggttcgcttgagcctgaaaggtggaagttgcagtgagccaagatcatgccactggactccagcctgggtgacagggcaagacctatctcaaagaaaaaaaaaaaaaaaaaaggcagctaacctgaaaagatctgcaggaaaaatatttaacatcagatgcctagaaggacatgggcagaatatgcctattttaaggtagaatagtgagatgatttgtatcatatacaatcttaccgctctatccacattcctcaccccgtctacattccttatttttctttacaagttagagaattttacaaagatgtaaggcaatttcacatataaactatccatgagtacctaacaaagtgctggtcttctaataacaatacttttaaatgctggtatattagtctgttttcatgctgctgataaagacatacacaagactgggaaagaaaagaggtttaattggacttacagttccacttggctgaggagtcctcagaatcatggcgggaggtgaaaggtacttcttacgtagcggtggcaagagaaaatgaggaagatgcaaaagcggaaacctctgataaaaccatcagatctcatgagacttattcactaccatgagaacaggatgggggaaaccacccccatccccatgattcaaattatctcccaccaggtccctcccacaacacgtgggaattatgggagtacaattcaagatgagatttgggtggggacacagagccaaaccatatcagctggtcttttaaggcatacattaagtgctttcagtctttttgctatgctgccttcagtttccattacctttctgaaaagaaaagtgacgatgaaagcaaagcatatgctatacttgcatactaaagaaatgtatttaccctggatttgcaaagtggggtacaggtattgggtaaatacagcagttccaaatgggagaaatcatccaaaacaaaggggttacatggcccatgcaagtctgaaatccagcaggtcagtcattttttttttttttttttgagacggagttttgctcttgtcgcccaggctggagtgcaatggcgcagtcctggctcggtgcaatcttggctcactgcaacctccaccacccaggttgaagcgattctcctgtctcaacctcctgagtagcagggattacaggtgcctgccaccacgtctggctaatttttgtatttttagtggagacggggtttcgccatgttggccaggttggtcttgaattcctgacctcaggtgatctacctgccttggcatcccaaagtgctgggattacaggcgtgagtcaccgcactggcctctttttttttttttaattgagacggagtctcgctctgtcacccaggctggagtgcagtggcaaaatctcggctcactgcaacctctgcctcccggattcaagcgattatcctgcttcagtctcccgagtagctaggactaaggcacatgccaccactcccagctaatttttttgtatttttagtagagatagggtttcaccatgttggccaggctggtcttgaacttctgatctcagatgatctgcccacctcggcctcccaaaatgattacaggcatgagccaccgcacccggcctagtaattttatcttgtaaatatgtaaagtttaattttcaaatctaattaagtacattttccactgtactccaatataatttaatgtatctttgaatataaggagtaaagtatggcataggtagtcaagaagagttttaatgtttgcttgtaaaatttatttgtataaatccatatgcaagaatgccataaaggattcctgagtcagagggtagctgaatgacttggtgacctacaagatttggagattctaggatcttataatgaattaaaaatgagagctggacatggtgactcatgcctgtaatcccagctctttgggaggctgaggcaggaggactgcttgagcccaggagtttcaggatgcagtgagctatgataatttcactgcacttccagccagcaacagagagaccctgtctcttaaaaaaaaaaaaaaaaaaaaaaatggtggggggtgggtggggattaatagtagatacagtggatgttagaatcaatttggggaagaaacttgatttgatattatctgtttatctttgaggataccctgatgagcaaagttaaagtccatcagcttagaaaaaagaggagttactggtgagggaagagaaggagatgttgaaaagaaaagggagagaaggaagttgatttgggaagaagcaaaaggagtttcattttttataaagcaaaagaaataggaagtagctcttcaatattgtcttctgaaagtcaacactatacctgaacttctgaatatctggtctctgtgaatatactgacaccatggctacttagacagatttatctttttcctagtttgttggaaaaaaagtattctccaatgttttcttgttttggtaatggtttaaagtgagcaaagaagaaagcaaaaaaaatcttcaaacatactttattattttaccataagctaataaagaactggaagcaggctgggtaacaacatagtgagacctcagctcttaaaaacagacagacaaacaacttagccaggaggtggtggtgggtgcctatagtcccagctacttgggaggctaaagtgggaggattgcttgaacccaggaggttcatgatcaggccactgcaccaaaacaaacaaacgaacaaacaaaaaacctgggtttgggaaggttgtagcagcagcaataaaagaaagttgagttaataaatttagtatttctcttttctatattctcaatgtctggcttctcaccgtatctcctggatctttttattttttattttttaagacagagtcttgctctgttgcccaggctggagtgcagtggtgcaatcacagctcattgcagcctcaaccttctgggctcaagcaatcctcctacctcagcctcctaagtagctgggactacagatgcatgccaccatgcttggctaattttttaaaaatttttggccaggtgtggtggctcacacctgtaataccagcactttgggagaccgaggcaggtggactgcttgagctcaggagctcaaggccagcctgggcaatacactaaaaccctgtcactacaaaaattaaaaaaaattagctgagcatggtggcgcatgtctgcagtcccagctacttgggaggctgcggtgggaggatgatcgcctcagctcaggaggcaaaggttgcagtgagccaagattgcaccactgtactcaagcctgggcaacacagcaagaccctgctgtctctacaaaaaaatctaccaaaaaagtctttttttgtagagatggggtctcactttgttgcccaggctcgtctcaaaatccggggctcaagagatcctcccacctcggcctcccaaagttgggggaatacaggcatgaaccaccatgtccagcctcctggacctttttattgagagattaacatgatttatacaggagttgtgagtattcttttaaaaagagaagtctttttttttttttttttgagatggagtctcgctctgtcacccaggctggagtgcagtggcacgatttcagctcactgcaagctccacctcccaggttcatgccattctcctgcctcagcctcccaagtagctgggactacaggcgcccgccaccatgcctggctaatttttgtagagaggaggtttcactgtgttagccaggatggtctcaatctcctgacctcatgatccgcctgcctcggcctcccaaagtgctaggattacaggcgtgagccaccgcgcctggcctaaaaagagaagtcttttgtaattattttattatagatccattaaagatttttagtataatatataattcaacaaagccttcaccatttacctagcatgtcagtgttaacaagtaattctataacaaagcaaattattctaaataaaatattttacagtatacaaaattattcttttttttttttttgagacggagtctcgctctgttgcccaggctggagtgcagtggcacgatctcagctcactgcaagctgcgcctcctgggttcatgccattctcctgcctcagcctcccgtagctgggattacaggcacctgccaccacgcccggctaattttttgtatttttagcagaggcggggtttcaccatgttagccaggacagtctcgatctcctgatctcgtgatccgcccgcctcggcctcccaaagtgctgggattacaggcgtgagccacagcgcctggccacaaaattattcttaataaaactatgaaaataaactattaaagtataaaatagatttatttttaacaaactttgctcagaataatttatttttcaagaaattgggtgtcttttttttttttttttttttttgagacagggtcttgctctgtctcccaggcacgctcatggctcactgcaacctccacctcccaggctcaagtgatcctcccacctcagcctccatagtagctgggactacaggtgtgtgccacgacacccagctaatttttttttttttttttttgtagagagagggtctcgccatgttgcccaggttggtcttgaactcctgggctcaatcggcctgcctcagcctcccaaaatgctgtgtttacaggcatgagccaccatgcctggccaggtatcttaataaaatgtattatttctttcttgagagaaaatatagaaaagtgtgatgatgagagaacagggacttagcctagttcctagtatgaagcagggtacaacaaaattcccttacactgcatgaggagttaatgaactctttaaccactctttcattggttttaaaagtcaaattaaaacaataaacaatctgaattcttacttttttaacggttccattttcccattgcttttgttttcttttcctgagatcttaaacactgcattatttaaaccacctatcttctctcaattatgtttgctaagaagagtacattagtcttcctctaaagctaaactaacggtatttcttatgagtaatgggtaaattgagctctcttttttttttttttttttttgagagggactcttgctctgtcaggctggagtgcagtggtgtgatctcagctcaatgcaacctctgcctcccgggttcacacgattctcctgcaccagcctcccgagtagctgggactacaggcgtgtgccaccacacccagctaatttttctatttttagtagagacggggtttcaccatgttgggcaggatggtcttgatctcttgacctcgtgatccgcccgcctcagcctctcaaagtgctgggattataggcgtgagccattgtgcctggccaagctctcactttttaaatgaggagctttcctacttagacctcgtcaaaatatagagaaaacatgactatcagaattattttcccttctaaactattctatcccagctgggcatggtggctcacgcctgtaatcccagcactttgggaggccaagacacgcagatcacttggggtcaggagttggagaccagcctggccaacatggtgaaaccccatctctactaaaaatacagaaattagccaggcgtgatggtgcacacctgtagtaccagctactcaggaggctgaggcaggagaattgcttgaacccagcatgcagaagttgcagtgacctgagactacgacactacactccagcctgggtgacagcacgagactccatctcaaaaaaaaaaataaactagcctacatctttcactgcactgttattgtatcagttttatttttgccctatatttatgttgtaaaatataatcatgacaagtattagattgctaatggataggttttcctttgatggggcagtgacaaagaatggagaagtgtttctatgtgtcttggtttaaattgctaattaaattaataattgctgcttgtaagctcaatagcctggtcataagagtttggtctgttattcagtttctgggttacagagggtaggctttatcttaattttttctgtttttttttctttttttcttgaaacagggtctcactctgtcactcacactggagtgcagtggcatgaacatggctcactgcagcctgaacctcctgggctcaagtgatcctcctgcctcagcctccagagtagctgggaccacaggtgcgtgccaccatgcccagctaacttttgtactttttgtagagaagggatctcgccatgttgcccaagctggtcttgaactcctgggctcaaatgatctgtccaccttggcttcccaaagtgctgggattacaggcatgagccacctcgtccagcctgattgttttcttaatatgttgttttctggatattgatattgatatcaatatgcaacaataaatataaaggatatatttggctaatttggaacaacataaacatatttcaaaaattataaatttgaaaatttactataagtcacaactaaattactttccagttgttgtttaaaagcaaaaagtagaaatctgatgtaatgtaatgatatgaaattctcattcaatagattgaggacataaacaatacgggaactgaatcagcatcagaggtaaacagacatttcctttaatgaaacattcacctaaaattatctgattcacaaattatcttttagtataagaaaaaactaaaagagcttttattatttttattataaatgtagaaataacaaaaaagtatgttttgcaaagcaagagcatacttttgcactttcaaacactatagcttagtgtttttaaagaaaagtatgttttgctttcatagtcaggttagaaagacaagccttattagtctcagtttgagatactctgccaagacaacgtattttttgaactgttactaacagctgagattgttgaacgctaacatttataaaaaggcaattttattttcatcatttgtcttctttcctcagagttcctgagagtttatgttttggtttttatataatagtacagagtgcagtatctgttaccaagaagaaatgttcaacaaccacaaaaattttagtcatcccttttatctaacagaataagttaaaaatctttcaatttgatggtgtgcccaaaactacagcccataaattgggagcaattttatctcagggccatgtgtttcatttcaccactcttcttagtttttaaaaaagtcagaggcaacaacagattatataattaaaatgaattaaataataattttaaaatattttaatacaatcaaataccagagagtttatctataatatatataaatgtttaataaatcacttggaaatactgtgtttttttctcactaaatactggtttcattaagtatttaaaagcttgcatagagagaaaaatcatatgaggaaacttttttttgtttaaactgaatctatccaccatcaaattgatttagagtatattcacatgcacattttgtggattagtgcacaaatagcttaattcaggcaatgtcactgcagtttcgttatccaaacagctgtattaactccatcttctaggaaatagaatgcttcttgaacctcgtcagcaatggatttcagcaagattaactcataatgcacaaagaatttagagtaggagatatttaataataatctgtaaaaaaatgttcttcataataacattgatgacagtgtaatgaaattcacctatgatggaggtaaagtcccatgaaacccaattttgattaagaagaaataggctaattatctattttataaaataggaaggagatgattcactacttataactgtggtacctgtcaaatcatataaaacatctggaaaaatgaaaaagaattttgaggatctagaaaaagaacgtgaagagaaagaaaggatcaagtacgaggaagataaaagaataagatatgaagaacaacgaccatctctcaaggaagcaaagtgtctttcattagttatggtaaatttttgtttgtttgttttctaagaaacaaatcaaggcagtttaagttagcagcattttcctttatgactaaaaggtgggttttcataacgttttcttaggatgatgaaatagaaagtgaagcaaaaaaagaatcactttctcccggaaaattgaaactaacttttgaagaactggagcgacaaagacaagaaaaccgaaagaagcaagctgaagaggaagcaagaaaacgtttagaagaagagaagcgtgcttttgaagaagcaaggcggcaaatggtaaatctacatatttaaaccttacaattaatattaatgaagttagccgacttaagataaggtttactactacaaattcaaagagattttacatatagaagggctgattttctaattgtattcatatttcatatataaaatacatctaggctaggcacggtggctcatgctgtaatcccagcactttgggaggccaaggtgggtagatcacctgaggtcaggagtttgaaaccagcctggccaacactgtgaaatccctgtaatcccagctgcttgggaggctaaggcacgagaatcacttgaacttaggcgatggaggttgcagtgagctgagatcacgccattgcactccagcctgggtaacagaatgagactgtctcaaaaaaaaaaatccatactgttttccagttttcactctggggcattttacccaatatgctttaaatttttatttttatacattgttattaatgtataaatatgcaaaataattactcaatgaacctggtttccttcatctgttagttcaatctgcaaagtacttaatgacatgggtgcgggactgattataagtgtaaacttgtcctcagcagtccagtttttcaactgtttgaacatatcaaaataacagtttacggtggaatatgcagtttgtcctattaagtgtatgtgtgtgcatatttgtgtgcatgcctctgtgtgtgtgtgtctgtgtgtgtgtgtgtgtgtgtgtgtgtgtgtagtgtggttaagagcatggattgtggggccagattgtctagattcagatatcagccatttactaactgtgtaaccatggacaactgttttaatctctcgctgtgttaattaattaaatctctcttagtttcttcatttttaaaatggtaaaaatgaaagcgcctacttctttttttttttaacttccacaatgacttggattttttttcaatgcctatttcttaaatggttaaacaagttaatatctaggaagcacttaaaatggtgtttgttacatatactaagttctttgaaaatgttaattattactatggtattaatagatttatcaacagaaagtaaaactgaaataagaaaacactgattccaaacctcgttttaagatttaaaaatgcgccaggcatggtggccatgcctgtaatctcagcactttggaaggctgaggcaggcagatcccttgagcccaggagtttgagaccagcctgagcaacatgtggaaaccatgtctctacaaaaacaaatacaaaaattagccaggtgtggtggcacagacctgtagtccaagctccccgggtgctgaggcgagaggattgcttgagcccgggaaatcaaggctacggcgaactatgaatgagccactggactccagcctgggtgacagagtgagaccctgtctcaaaaaaaaaaaaaaaggatctaaaaatggaatatttgtaattttaaagttacagaactttcttgatcagctttcttgaatgatgttctaagaattatatatataaaaatttaattttctagacatttatttgaaaatgttattactcgggtatagctgcataatatctgcacattttagatatttctggtggtcaacttaataaagaaatagtattgttaaataaataatacatttcaattgatattatagtaaatttaataataaacctttaatgataaaatcataaagctggaattttacataaaatagttctagataataatcttttatctgattagtataaggtaccatagttcacagtaaaaaaaaaaatacaaaaattacaaaatgagaacattattttactaccaaagagattctgtgtagatatacttgaaccccaattatagtacacacatacgcattttatatttgttctgggaaagttaatactcaacagtaacccctcactgcagcctcaacctactgggctcaagggatcctcccacctcagcttctcgagtagctgggactacaggcacacaccaccacactggctataatgtgttttttggtttttagtagagacgaagtcttgctatgttgcccaggctggtcttgaactcctgggttcaagtgatcctcctgcctcctaaagttctggaattacaggcgtgagccgccacaacacctggctaaaaatgttttaatattcaattttatctatagaaatttggcttatttgagaagttttatttaacctgagtacatctttatatggaatttctccaaatttgaatattttatcatagaagacattaaaaaggaaggggatttaggtcaagtatattaagggcattgaaactcctgtgtgatagtggctaattctgtgccttttgattaataattcattcctttttctgatgaacctcaattcttagtaatgaattgtttatttggttaggtaaatgaagatgaggaaaaccaagacacagcaaaaatttttaaagggtaccgccctggtaaactcaaactcagttttgaagaaatggaaaggcaaagaagagaagatgaaaaaaggaaagcagaagaagaagccagaaggagaatagaggaagaaaagaaggcgtttgctgaagcaaggagaaatatggtaagacagaagctaactggagaatgctattagaattcacctttgagaatatgttaatagaatcattagactttagagaataccctattatttctggaaactgtgccaagagtagaaatggcaaatatgttttaaagtctcccatggaataacaccagttggttgaaggtatttgcttcaatttagtgttcagaagattctgctttaaattgccatgcttggcacaaaggatggaatattatctcccttctctgggaaggcatgttttccagaactaagtatccaaggaagaagaagaagtagggagtttcctccctcaacttttctttcttcctctccattctttcgccacctccttcccatactccctttctccctccttcattcctttatttccttcctttccttctttcagttttcatcccacctactatatattaaatgacctgagtcatttaatcagaattatttctctcttcaaaatgctcactcatcactcctggaaattgatacctaacttaactgtcacaaggttatgactgtacttcctataccagttttatgtttgtacaatgtacagttatctgacaaacaattttgaagcaatttgagactagagcactgcatctccttcttgaaacactgtaattagctttggtgatatcgtaacctggttttcttcctctgtatgggtgagcatcacacacatatgtccaagtgtttatttggctttattgcccacacagatactcaaatcagaaacgtggaagcctgaaacacttccatcttcttattcatgcctgatgtccaaccagtcactaagtctcgtttattctacctcctaaatcactatgaaatctgtcagttttccccccattttcaccgccactactataatccaagttactgttacaacttgcctggggccaactcctcattaacttgctttcttacctgtaacctattctttcctgtaaggccaggagtgatctttaaaaagaaagaaattttgattgtgttttgttactgttttgcttaatatttccccacttttcttaagcaaaaatccaaaaacttctaaaacaaatttctttatagtcttgctcttgtatattgctctcgtttcatttcttgattcttcctgaatctgctctttgttccaaatatgctgaatttgtttgtatttcttcaaagtgagactcagccttcacactgtctgaaagatgtccctcactcctttccctatgctctgctaactccaattcataactttccatttcctctggaaagcctttcctgataataaacaccttccatgaattcttacagcatttagtactcttctatcatagcgctaatcctgtattgttaccacttatggctgtcttttccactccatgaggccaagactgttcatcaaacatgtggcacaatgcttagcgtagcagacctccaataaatgttgatggaacaagtgatattgaaatcttacgtgcagtaggtaatccctgattcataaatggtttctacatagaagtcctacagacgttgtgaatgcacttaatttttggagaataagcaggtttagaagcggtagaagaagccgggcgcggtggctcacgcctgtaatcccagcactttgggaggccgaggcgggcggatcacgaggtcaggagatcgagaccatcctggctaacatgttgaaaccccgtctctactaaaaatacaaaaaaaaaaaaaaaaaaaaaaaaaaaaaaaaattagccgggcgtgttggcgggcacctgtagtcccagctactcagaggctgaggcaggagaatcgcatgaacctgggaggcggagcttgcagtgagccaagatctcgccactgcactccagcctgggggacagagtgagactccgtctcaaaaaaaaaaaaaaaaaaaaaaaaaaaaagaagcggtagaagagaagtaactgtgaagattactagacctagtccttggggcagatttgtaggccaatactgcctttttaccatgattcactagcggaaaaaatgcaggcgagaaaactgcattaaaacaaaaccaagtttcctaaagacatttctaaagagaagagagaaaaccttcctcttacatttatattgttttcttatccacaaataagtattgtaatttatccaggaataagtattgtaatttcataccatagcttagttcatgcatatgtaaaatttaaaaatttcaggcaatctttgaattgtaaaccacttaaacattgtttctgagttgaaatagttctgtggtaaagcctggattaccttgataaaacttggagcaaatgaataataccccttgcctctctcattcccctgtgtgtatttcaaccacagagtcacagttcaggccagagggttatgttataccgcgcccggcctataatcttttgttttttttgagatggagtctcgctgtcacccaggctggagtacaatggtgcaatctcggctcactgcaacttccacctcctgggttcacgtgattctcctgcctcagcctccccagtagctgggattacaggcgcccaccaccacacctggctaatttttgtatttttagtagagacggggtttcaccatgttagtcaggctggtctcgaactcctgacctcatgatccacctgccttggcctcccaaagtgctgggattacaggcatgagccactgtgcccggcctataatcttattagaaatattttgaagtttgaatcccagctttgccacatagtatttgtgttgactttagacaattacttttcagtgcctcagtttctttctctgtaaaatgaggatattagtaactacttcatagggtcataggattaaataaattaatacattttacatgtattaatacactttacgtgcttataactgcacttggcagctccaagtattaactattattatttctttaaaattagccagacagcaaataaacaataaactcatagcactaagaatgatttttgcctgattatgaagagatcatgatgggttatctaattcattcagacaaaatcatgattaacttaaatgctttaattaccaacctggggagtcgtttcaatccaattaaaaaatgttctcaaattaggaaatcttaatgtctaatttaaagtactcatggtatgaataaattatttctttgtcttcactgtaatggagaatagatggttaccatttccttcataaccacaaaatacctcggtcttacattttctaataattcttcccttttatttatttatttttgaacactgtgttgagacttccttgtttactgttaagtccccttgttttttgttcaatgtgaaacctatttaagaaatctggccgggtgcgtggctcacgcctgtaatcccagcactttgggaggccaaggcagacggatcacctgtcgggagttcgagaccagcctgaccaacatggagaaaccccgtctctactaaaaatacaaaattagccgggcgtggtggcgcatgcctgtaatcccagctacttgggaggctgaggcaggagaatcgcttgaatctgggaggcagaggttgtagtgagctgagatcacatcattgcactccagcctgggcaataagagtgaaactccatctcaaaaaacaaaaacaaaaactaaaaacaaacaaaaaaaagaaatcccagtttcttcaagaaatagtccctttttagtatgtgtaattctggccagagtgataaaataattattttaaataggtagtagatgatgactccccagagatgtataagacaatctctcaagaatttcttacaccgggaaaactggaaattaattttgaagaattattaaaacaaaaaatggaagaagaaaaacgacgaacagaggaggaacggaagcataagctagaaatggagaaacaagaatttgaacaactgagacaggaaatgggagaggtaagattttaagaaatatctatattccccatatttattaagctaaatattttacttatatcaccttataataactttgtattattattcacctttaggatagttgacatagtattatgaggtgcttacatggtacaggcgtctgcacaattatgtgtactttctagtctgctttaactactccttccttgctagtttaataaaaaagtatctaggtttgcaagtgactgagctattactatttatttatatttgtagttcataaatatgcatatattcaatacatatattatatatagactatacagtgccagcttcatgggcatgcaccttgtgcactcacaagacgccatgttcagaaggccttgcatttggggtttaatgctgaggttactgtcttcaaatcctttttgtggtgtgaacatggctcactgcagcctcaacctcccatgctcaagtgatcctcatgtctcagccttctgtgtagctgagacttggggtgcacgcagcaccatgtctggctaatttttaattttttttttttttttgagatggagtcttgctctgttgcccaggctggagtgcaatggcacaatcttggttcattgcaacctccacctcccaggttcaagcaattctcctgcctcagcctcccgagtaactgggattacaggcatgtgccacgatgcccggctaatttttgtatttttggtagagatggggtttcaccatgtcggccaggctgatctcgaactcctgacttcaggtgatccgcccacctcggcctcccaaagtgctggttattacaggcatgagccaccgcacccggcctttttgttttcttttctaaagatggggtgatcgcactttattgcccaggctggtctcaaacttctggcaagcgatcctctgacctgagccttccacagttctgggattacaggcattagccatcatgcccagccactgtcttgaaattcttaattttacctttgaatttgtgtgttgtatgtaagtgaaaactgattggacgatgaagcatgccctatataggagcttttgctcactaaagctttacgctgtctttcctgcctccctggaatgggttttcatcagccccctttcccagggccctgcctaaccttcttccctcttcggactctgctgccatccctctgggtggcccaggttgcgtgggcagcagaagagaaaggtagaatgggggcgtgtattcgccatcagccttggcccctgccaggggccaggccacacacatgaacagggtcagggtctaagatgtagcctcatgacttggactggcaatgctatggcatgtttggcaggcaacttggaggggtcctctcaccaatttataacctaggaaccagaaatacttaattattaacttgagtattaagagtgatgtttactttgtaagactaccataaaatcaaaagtaggaaaaattttagatactgtggctctatttagagatgaagaaaatcatacagtgggtaagtaactgggcaaaagcctgcacagtatcagagccaggactagaactcatatgactcctagtccagtgttcttttttgtttgtttgagacaaagtcttgctgtgtcacccagcctggagtgcagtggcacaatctcggctcactacaacctccacctcagcctcccaagtagctgggattacaggcacaagccaccatgcccggctaatttttgtatttttagtagaaagggggtttcaccatgttgtccaggctggtcttgaactcccgacctcaggtgatctgcctaccttggcctccctaagtgctgggattacaggcgtgagccactgcacccagcctagtgttctttcaattattttttgccttcccctaacaaagatcttcctacaactcctacaaaaagctaatcttgtcatgaatattttagttttagcaagttatcaaggaatgtcagaggattttagccatatttcctaatgagaatagcattttaagtagaatgttttcaataatgccttaaatttgtagcaccattttgagttagtaaatttggaccctgcatttagagaagaggttaaactgtatttttggtttcaaataagaaatagtgcacatcttttggatggtttcttgtacaaactaatatgctgatattcaatcttttttttttgagtcacacatggtggcatgtgcctgtagtcccagctccttgggaagctgaggcaggaggattgcttaaacacaggaattcaaggccagccttggcaacatagtgagactctctcaaaaacagcagcaacaaacttattaattttttttgaaggaagaggaagaaaatgaaacctttggattgagcagagaatatgaagaactgatcaaattaaaaaggagtggctctattcaagctaaaaacctaaaaagcaagtttgaaaaaattggacagttgtctgaaaaagaaatacagaaaaaaatagaagaagagcgagcaagaaggagagcaattgaccttgaaattaaagagcgagaagctgaaaattttcatgaggtatattacctttatatttaacatagttatggtacagtaatgataataaatttaacagaagtaacattggctttgaaataagttttagtacttaaaattaatcattggtatatacagtaatctgggaagtaaatagcaaaacacatgtagatcttagactttgaaagactagcattgtttcaaaatcacctttatcagtgttaaaacctatagtgaatgtcaaatggttcactctagcaaaaatgttcaaaaatattttttggctgggcgtggtggctcacgcctataatcccagcactttgggaggccaaggagggaggatcacatgatccaggagtcctaggctagcctgggtaacaaagtgaaaccccatctctacaaaaaaagatacaactaaaataatatattttttggcatatgttttagttgagtcagtagaaccagtgtatattcaagttaaactccagattattcataatttcttagatgaaacccataaagcctctagtatttgctcaaagttacagtagtaattcggtgtggaagagcctaaatgagaattctgatgacatgaatttgaattatcttcaaacataaaataaagaggcaatcactgacctgcaacatcccttctagcttaaggactatttctgtgattatgaatactagtttaaatgagatctagaaattttttttctgccagaattgccatcctataatatttaacagaacttaacctatattctattttgatcaaatattcagctagcaaaacaggtatgggaatttgggagggccttcagaggagactgaataaaaggacagaatgaagaaactgtgtgccaattattgggactataagcaattcattattattgaggcatgcacgagtgcgaaggacagcaaaatgaagatgcaagcataactgagatgatcatggagtcttagatgccatgtgaagggatttttaaaacatggatattgtctgggcacagtggctcacacctgtagtctcagcactttgggaggccgaggtgggtgggtcacttgagccatttcaagaccagcctgggcaacatggcaaaaccgtatctgtacaaaaaatacaaattatccgagcacagtggtgcatgtctgtagtcccagttacttgggaggctgaggtgggaggactgattgagcctgggtggttgaggctgcggtgaactgtgattgcaccactgcactccagcctgggggtcagagcaagaccctgtctctaacacaataaagcatggatattgtcagacagatattgtctatatagctggatcatgctgaagctatatggtcttagatacatgcattaaaaaaattatttgaggccaggcacggtggctcacgcctgtaatcccaagcactttgggaggccgaggtgggtggatcacctgaggtcaggagttcaagaccagtctggccaacatagtgaaaccctgtctctacaaaaatacaaaaattagccaggcataatggcgggtgcctataatcccacctactagggaggctgaggcaggagtattgcttgaacccgggaggtggagactgcagtgagctgagatcgcaccactgcactctagccttggcgacagagcgagtctccatctcaaaaaaataaaaaataaaaaataaaaaaaattatttgaatgactactatgttccagggactgctttggacacaagacatcagtaactaaacttacagtccctgttcatatagtgtttagaatctaatggatgggttggggattgggagggatagaaaacaattatcaggtggttaacaaacaaaagctattaagattaataaagcagagtaagggaaataagagtatgtgttactgttttgtacagcgtggtcagaggcggcctgaggatttgaactaggtctggtatggaaaggacaggtaagtatgcaggagtcaaaactggcaggacttggggatggtgatggagaggaagaggaaggaatcatagtgacagggtatacagtaacaatacgggaaaccagactagagtttggaaggaaaagaggttccataagctatttgacacaaatggagatgctgtgaaacatcaaccaatcaatctgatttgcatctaagcttgtgtgacatacaagcctaaggcctgggttagttgtagataaaccttttcatcattgccaaaagcaaacaccatttctattttttaacatctacaaaatgttgaacatttttaacatgttggatctgttgttttggggatatatatgtggatataataagcatttaagaagtttagtctacagccgggtgcggtggctcacacctgtaatcccggcactttgggaggccgaggcgggcggatcaccaggtcaagagatcgagaccatcctggccaacatggtgaaaccccgtctctactaaaaatacaaaaattagctgggcgtggtggcacgggtctatagtcccagctactcaggaggctgagactgcactccagcctggcgacagagcaagactgtctcaaaaaaaaaaaaaaaaaagttcagtctaatgacgtatgatgaagaaaattctaattattctaagtactataatagaagttattacagaatcaaattgggtggtcaatatacctaggatatgtttaacagggccaagaaggtgacatttaaggtgagtgtgaaggctgaataaaagttgcaggtaaagaggagagacattccagatagaggagaagccttccagattaactcagaggttgtaaaaatgtatctggggaatggaaaacaggttcaaaggacaaggcaaggttcacagaataagtgataggatacaaggttgtaaaaataggttgtggctagttaatgaaagtctttttaaaccttgcaggctctatgatctgggcaacaatgttaataactttttaggtcagagtaataaaatatttatgtttatgcaagaattctgggaccatggaggatgaactggaagacaggcatgaagttggggccaagggagaaaaacagacctaaataacaaaactaggttagactctggtatggataggagttgaacaaacaaaaaagggttataggttgctttttgggcagttggttgcggaggggtctaccattacttcaggatatctagatgatgctatagagaaatcaggtctggggagttggggtgaatagttttggcatgtaaagtttgagtgatatttggataaggtaaaggcagtctaacaaaggtcctgaactaaggtgagaggcaagcagataccaacttttacagacagcactggaaagtacaagtagataaagctgcttataaagttaattgttgaaagtgaattaagccctggagaacaccaatatttagtggatgactggccaaacatcagcctttataggtgtaacatggaaggtaaagaaaagttcaatcagcatgcacttgcttccttttgttaatggtagtgaaaccttagcagttatacctatacctacaaaatatgtaggtaataacaaaaataagataggtgacttcttgtttttgctattactggctctctagtatacatggatgtggtattaggacatggctgaacttttataccctatcagaatatcctgaatggagtttcctctggaggacaatgaagtccctcctatcatatctttctggcttaaagattattgaaatcgtatttaaaaacttgttagcggctgagcgcggtggtttatgcctgtaattcccagcactttgggaggcggaggcaggcggatcacctgaggtcaggagttcgagaccagcctggccaacatggcgaaaccctgtctctactaaaaatacaaaaattagccgggcgtggtggcagacgcctataatcccagctacacaggaggttgaggcaggagaacggcttgaacccgggagacaggggttgcagtgagccgagatcacgccactgcactccagcctgggtgacacagcgagaaatatcaatgttcaatgtgtcttcaaaatgtttatattctttcaaggctcaactcatttacataaccttacctaatcaaagaattccatcccagctcctgtagcacttaaacatgtacccctcatttggtacttaaatgccttatataacatttgaatttctagttagattttccaataaagtctactccaaaaccaccttatgccccattgtatctcaaggaaaatacactgcctaactgctgactttaatattcatgggctgagagtaccaatgccctataaagaatgtacctacagaataccatttatattactatcttagatttctttcccagaaacatgttttaacctggctttttaggagctcaagaaaagttgacaattgtacttgactgcagaactgtgcataaattttcagctcaagagaaattattttacttactcaaatttattttctaaatgcaggtttgaggcagctaaatgaatagttatgaatttgcataaacaggctaaaatctgaaaggcaagttattaactgggagggactcagaatagcaattattgtacctgctgaaatattccatcttaaaggttcatttggtaaacaacaaaaaaagtgtatactgtgaacaaagaggtcctttttaaatttaagtctcagaagtctgttgagatgaaactacagtaagcaaatcatggtttaacatgtatttttcttagtcttttatgtataataattttttaaaaaatgctgttcattcattcattagcaacaaccatagtcaggcattatatttatcaactgaaggtaaataatggcacaaaatagaatttacgcaccaggtagcaggttgtctgatgtcccatgattttccaacatcaaataaaaaatctaatgcagaaccagaaaaaccatgcaactactttaaccaccttctactcctttcatcggaaatgaggtaggtacaaggtacgaggtgtgaggtgcaacacctcaaactgaagtgaaacacccgaaccaagatttttcttatataggcaattaaactgcttgtttcaaatttccctttagttggatgtggcaatctggagcaatttcctcatagtactatgaaatataaatggtgagatttccaactagatccacaaatgcctaggtagttagaaaccaaaagtcaagaaaccaaaagtcaacaactgaagtactttagaaaccatgaattaactacccacattaaccccactccaccaaaactgctctagaccttatcattaccaaattattattttcctagacacactatttgacagttgagactctgctcttaaatcactcccttattagcatttcgcccttccaattcacccctcagatgactcaaacatattttacttagtgatttccccatgtttcagccattgcctctttcaacagttgtctctacctgtttttctacttgtaaacacccttcccctgccatttcaccatcaatacattatttggagggaattcattagggacatagttctaagaagggtaaagaaggaaaatcattaagtgagaaaacatttattatgcagtagggaatggtatggacttacaggaatcaagggagtacttttaacaattatttagaatgtatagcattctgacctttttcagttaagtgctatcaaaaccaagcagagttggtaggacaaacaggctaggatcccagtgatattgtgatctttacatttggagaaaaagtctataactaagagaatgcttcataaatgtatctatcacttttcctgaactggagagttagaaaaaatctgagtgtctgcagtgtagcaaaaatatgcattataaacatgttaatcattttgtgcttctaaacacctttagaactagtaacgcttctttgtttttagaaggcaagcaattgttaatcttggcccactttcttgcaggaagatgatgttgatgttaggcctgcaagaaaaagcgaggctccatttactcacaaagtgaatatgaaagctagatttgaacaaatggctaaggcaagagaagaagaagaacaaagaagaattgaagaacaaaagttactacgcatgcagtttgaacaaagggaaattgatgcagcactacaaaaggtaccaggcttatgtatcctttattttccaaagatgccctcttaaaacccatagttttataattaggtaggttaaaaaaatgttttaatggttttctttcaagtcactggaatgtactgttaagtacactttgtagtaggcacacttgtatgttctttacttaaaaaaaaaaatttcatttcaaaattgttactaaatcgctgccctgaaaatactataaatgccaacctgaatgcatttattttaatacagaaaagagaagaggaggaggaggaagaaggtagcatcatgaatggctccactgctgaagatgaagagcaaaccagatcaggagctccatggttcaagaagcctcttaaaaacacatcagttgtagacagtgagccagtcagatttacggttaaagtaacaggagaacccaaaccagaaattacatggtggtttgaaggagaaatactgcaggatggagaagactatcaatatattgaaaggggagaaacttactgcctttacttaccagaaactttcccagaagatggaggagagtatatgtgtaaagcagtcaacaataaaggatctgcagctagtacctgtattcttaccattgaaagtaagaattaatcactctttttatcttttattctattaatttttttttccttaaaatcacttttcttcttctcttttttagctgatgactactagctcccctcccctctccctggaactttctctttcactccaactttcttactacatccatcttttctgtggcggggccaaaaaaggaaaccaggagtgccactatgctgacttcttattccttttcataacagtcttcaaagcacagctcatctaaagaatgcctacttcttttccaaataagcatcagatttatcgcctattatgcagtaacagtcaataaaatgtacttatgggggggaattactcaattattctatcagaacctattataaagactgtatttcccatagacgtttacagcaactatgtttaaaaaacaaaaacaaaaaaaaaacacacaaacctaagtagaatacattattttgcatgaaggaatgtcatttctgagctttttacacctaaaattaggctgaaatagctgagataattaatttggaacctatcaatttgagtggactttttctttagtagtacaccattttggttgttgtagtttcaaagtctttctgaagcagatatattgggattggagcggggtggggaaaactgtcactcctttcagaggaaaaggggaggagcatggagaaaaacaaaaattaaaggacttaaagaatggctatacagtgttgagtgttgaggatattaaacatgttatttttcaaacgtatgtaatatatattaaatttataaagcaaatttatgttgtgatcttgcctgaacaaattatattttaatgaaaaaactttctattaatagttcacgcaagagaaaacactttcaacatagtcgaaggcttcaagatctaagtgtatcagacttagggaaaaagtggcacaaccttcgatttaaaattctagtctttaaaatgagtttgtaaataattagctattacgttctattaagttgttttatattttaattttctggaagacaattttattttacaacgtgaacccaaataaagtaacttctgtatttaaaa

SEQ ID NO: 94 - DNA, 116992 bp, Homo sapiens
acatccgagatgaacccagcccttggtgttcaaaatcactttaaggggaagtagagctttttctttcatgtacctggaccagtagttcacttactctgaaagtcaagaggccccatggactgcccagcccagctgctgtggaatgtggcagagaaagagggtgagagggcctggatgactcccatgctgggagtattatgcaaacgtgggagaaaaaaacatgcttcctctcctggcctacaggagcgcttgaaagcctgctcatctgcaagccctagggctggactctacatcacagcagtggatactccatctccattgagaacccgatgactggtgagtttcctacctgggtcgcccttacctaggatcctcacttccacctcaacccacctgctttcctgtaaaccccacggaaggagaggttctgtcatgagcacttccctggtcctgtgtagtcactaagcatctgatgcctgatccagaagaacagagtgaccaccagcccagactcggtcaccaaaaggactttcctagacttggtcaccagcttcaactttcccagcttcctactaaatagccttgggcaagccccacgaaccccttgtgcttattttcttcatatgtaaggggtgacagcagacccacctcacatggatattgtgaggattaaagggataatgtatggaaaatatttaacccagtactgggcacacattaaaagctagataaataacagccacgactcctgacactattcatacaagtttcaagtttgatggccgagatctggagtttggaaacttgcaagcctaatttacaaggctacgacccccgcctgtgttgggttctgcatgcagcagctacttcaaccttccagacttgatgccatcttcactttaatagatcagctttccctttctggtcttgacaagtccttactttacctaatgggaggccacaaggagcaattctttgaaaggaaagggggagacatccttagaaaggcatctaaaaagctgccatttcggtgccgagagaaggccataggcactctctcaatgacacatgcacaaaagctcttgttgtggacacaaataagaaaagttgaacccctcgcccggtgtaattcacttcatttattgacccgagttctctccctgcaacccttgattcctttgaatttgtcagcagttcagagacccctggcattcaacatgatttgtaatgtaaattatataattgtactttcacatattttaacatcaaatgaaatgattgactacagaatcggagctgtctacaggtgggggccaattaccatctgaataatcacagtgccacacaagaatagcatagccgctgagcgtgacatatttttatctctatgcatttcaatgaagtcaggctagtacataaaaggttatcacctaggaaacatattttcctaagcacaagttaaacatgcaagtgagatcagcaaagatattcaatttagccagtcaaccctaacctattaatattttaacaaaatccagggaggataatttttttctttgatcccatttcatgtgagcagccgggaaagggaagaaaaattaaaaacaaaatagtcaagcatacagaatgaggttatgtattaagtgggctatttaatgtttctggcatttcatagcccaggggaaagtgtggatggatttaacaatcaagagctgtgttcccttggccacaaagttcgagaaacataaaataatctatacttccaagctgacaaatcgtacctgacacccagcttcatctcaccgggactcctgagatcagcattaatcatatgttacagggagtaaaaagaaaagtaaatcacaccacgctgaaaagtgagatggaaggtcttcgggcaaggattttaatcaataatatgtgggatgataaccagaagctattgttttaatcttccaatatgaaaagaaataaatgcaaaacacgaagctaccaggggccaagcggcttccatgatgccttgtaagaaccaaaaacagtttggcagctcaactttctagtttgattcatgacaacaaactaacaaacgatttctttttaaagagacagagtcaagtgcattcttcaggtttcctgtttctggagccttagctattgctcaggtctcaggacatgggttctggattgcttggttttccttgtgcaggttttttcatgttttgcatgtctgacatctattcatgcttcttctcctaacatcacctcctttctccagccccaccatcagttcttgtggtttgggctgtgtttttactaatggttccagagaaaaactggtataacagtgattagatcagggatggatatgtgctgtatttgagccctgaaatgcaggcgtgggagttcatggtagtactgtcataaaagaggctgttgtggtttgaggctgtgtccccacaaaattcacatgttgaagtcctgacccccactgctccataatgtgactttatttagaaacagggtcattgctcatgagattagttaagatgaagtcacactggagtagggtggaaccctagtccaatatgactggtgtccttattaaaaggggaaatttggacaaaaacagacatgcacacagagagaatgccatatgaagatgaaggcagagattgaggtgatactgctacaagctaaggaataccagagacttccaggaataccagagacttccaataaatcaccggtagccagggaagaccgaaacagctccctcctcacagccctcagaagaaaccaaccctgctgataaccttgatctcagacttccagcctccagaactgtaagacgatcagtttctgttgattaggcctctcagggtgcggtaccttgttacaacagcactagcaaagtaatacaaaggctcattctctcttattatcatgtacttagaaccttgatgatttaagcttgacatggctaagatttatcttgcctgtgaatggtgccaacacgtgagaaagttgaccaaatacctaagtagatgcctacctcatgcagatgttgctcatacctctggatccagccatacctgaagttttatctctgactttgcagttatgtgatctattaaatttccacttttacttaaactggttagaattgagtgttcatcacttacaaccaaaggaaccctaaatgatttattctcaaagcagccaatgtgatcttaggatgaataatagacatgaagactttggaacaaagaacatgattgtattaatcaaaccacaggaatgttggatccagtttgaggcaacatatgtttaagaaggacatggatagatctgaacagagtgattagatggtgagagaaatggacatcaaatcacaggaggtatgagagaagaaaaggggtgtgtagaaagcatagatggcctcaaatatctacaggaatgacaatttgaggaaggattgggaattatttgtgtgaccccccacccaaggataaaactaggaaacaatgggaacacatatttaaagcagagtgattatctaatgctcccagcaattagaagaagaatgaaaagcccctgaaagcagcaagtccttggatttgggaggtgcttctacagtagaagggactctatgattgactggatgactttaaggccccttccagcttgtatgtttagttttataattcttttactaaaacccaacattcttctggctgaaacacactatgattctatgattccaattcagttctttccacctcaacttctttccagactgttgagaattcttgcacttgctcgaacacacaatgtcatatcactaatcttagatttatggaatggctaacactgtaggtgtgggactcttggtggcatgagtcatgtgaagagcgatcaaattttattttttcccctagctttaattaaatgacctattccacagtggagagttgaaggatgatattaaacctatgtaataatcaatctggctatagattttttaaatagatggctcacgttagacacacattatactttattttcctgaactacgtgaggtatgcaaagacacacactatgcttgaaatcaagtgtccagttaaggcacaaactggctaaaagcttaaaatcgcatcataaaccctctcagtctttccttgaaagaacttgaggctttgcgacattcagatatgttatagctccaggtattcagatatgttatagctccaggtgaccatcttaatttctactgttagcatttgtagcagcttgtcagatttccagacacccttctgccaattcagcccagcagctgatgttacagagaagcctgggcaatgtaagagaaaacattcttctagttttgcccagcatggatgtgggctgggccaacagaggaaagaaatctctgtttataatcagggaaggaatcgagagccgatgatgggagagtttccatcctctgtgctggaaggaagccctgattgtgctcagcaaataaggtcccagccatttcaaagaggctgcacgtggctctccacgattttagcatctgctatttgccttggcctaatttcttccttgatgctaaattattctccaagtcaactatctttttttaaaaaaatgtaatttttaaaactagtccccaacacaaacaggaaagcagtctgttaagaacatctataaattgatattattttaagggctttgcctactacagtaagtaaatccatttctcaggctggaagagttcttggagactggggaagttacaacattgtcccttcaaaaaagagtaactctttacgaaaatgagtctcttgatcttacatcctcagggtctttcaccttaaaataatcttatagcagagaattcatcagagtaaaaagcaagaagaagctgggtgcagtgactcatgcctataatcccagcactttgggaggttgaggcgtgcagatcttttcaggtcaggagttcgagaccagcctgaccaacatggtgaaaccctgtctctactaaaagtacaaaaattagccaggtgctgtggctcatgactgtaattccagctacttgggaggctgaggcaggagaatcaattgaactgggaggaggagattgcagtgagccaagacagcaccactgcactccagcctgggcaacagagtgagactccatctcaaaagaagaaaaaaaaaaaaaagaagagactagaagataaactcccaagatccctcaggtctgtgtggagggtcttaggtttgcaaagcacacgggcacccaagatcactggagtctccccccactcttgtgagaaaagtaagcctggaattataattttcagtttccaggtgggaaaactatgcttcttagaaggtgagtgtatcagagctctcccaagaccacagagccagtaatgcaccgtcagggctggaagccagattttcccgactccatttccactaggatctgctgcctctgaatgccattaagagcaatatgcacatttgaccattgaacaacacaggtttgaactgtgcagctccatgactatgcggattttcttctacctgtgccacccccgagacagcaagaacaacccctcctcttcctcctcttcctcctcctcagcctactcagtgtgaagaagatgagaatgaagatctttatgatgatccactttcacttaatgaataataaatatatttctcttccttatgattcttaataacattttcttttctgtacgttgctttattttaaaaatacaacgtataatacatatacgtgcaaaatatgtgttaactggcattgacgttatctgtaagcattccagtcagcagtaggctattactagttgagtttttggggagtcaaaagttatacactgatcttcaactgcatgggtggtcagtgcccctaattcctgcattgttcaaggaacaaatgtaatataaaaataagtatttcctgatttagacacctctttgccaattccttagaacagtggttctcaaagtatggtccctggaccagcaacatcagtatcatctgggaactcatgagaaatggaaattctgggccctatcctagacctcttgaatcaaaatcaggaggcagggccggaaacctggattttaaagtcttccaggtgattctgatgtatgctcaaatttcagaaccactgccttaggaggtggtggtattttgtgagtttgcatgaaaggctattggcaaatatagacaccaaaaatacaaactcatcacctctgaattccatttagtgaaggccagagtccaaagctctaaaatgcttattactattcaaagctgccttggttggctctgagaacagactacactcactcacactcacatacaggcctggcagcaaattctctgctgttcactcaccattgatgcagaattgagccgggctcagttgtgcagttgattatagtctggtacggggtgaccagttactctaatcctgtactctttggaaaacaaagagccaaagtatccggatatctggagtatgcagaggaggcccgcggggctccagtttcatctgtatattgctgggcagactaagagtgtggctatatgttccttccactacccacacttgctccctttcggatttaagcattctgctcagggacatattaatatgcaaaaaaaatcaaacatcaccagaaagatggaaagtacaaagagtcagtgattattaaagttgggagagcaagaaccagttattttttccaaccttctaatggactctgaggcccacccaaaagcagtcgatggctgccatagaaagaattcagcctcccaagctctcttggctttcccatgatgcaatggttcagcacagaaaatctgtctacaaggactattgccactgatgttgttggaaaaagaaacagacaaaaggaagaaaaatcatagtgtcttcaaaagccaggggagtttaggacaaggttgaaaattacatgcaatgatagaaagcaatgatctttgccaatgggtagttctcaggctgagcttggcctacaggagggttttgtttaatccacacttggcccagttcaacagttttgtttttaaaggtgaatttgttgccactgaacaaaaatcagaaaatctcatacaaaaatactggatcactctgtcccaaaacataccggacaatccggccatactggggccacatcctcatggggcagccatgtcaccatccccattccagacagctgctctcatttgatacccacctaacctcagcaagcatttgacttttcaagtcctaattaaagcaaatcctaagtttataccatttagtatctagaacctaaattatttcagttctagtctaacacagaactgtggtctcctgggcagttgctttccaatgataggaaacgggaatctttagaagacaagtcacatagaaatctaaaatcgatgacccagtaagtgttcacattctctgccaataaaatcaaatggaaaatgtaataatctataaaattacagttgttaagaaaagctaaccaaattacttaacttttttatattcgtgtatgtgtttattgtctgccccctctaagggaccataagccctatgggtaccttgttctggtcattgtcatatgcccaatgcctaaaacaatgcctgtaggcacttgtcagatatttgtagggtgagtaaacagtcatatatatggaaactttacttatgctaggcatggttctaagcactttatgagtattaagatctcagagcgttccaatgagaaaaagactctagcagatgtggaaatcaagacaaagggggcagttagcgaatgtcctcatgttgccccactggccagtgacatggcagggatgaagagaaaagagctggcccactcttcctcctccctaactgtagctacattgcttgggctgaaactagtaaaccaaagacccagaagccactctgggtctttgaatctctttctgacgcaaagtaggtgctcaccaagagatgtctgaatttgctagttaaaatcattatttatctgagaataaaaataggctgttaaagaagccctgtaatctaatgaaaaagcaaggagttataaagttacagaccctctcagggttctattttttttttctttttccttaagtaaatcacttagcttttatagcttcctgttttcccgtctatcaaaattgggcaactacttttttctacatccttttcaggaggacattcaaagggcaaaatgtgctagaggaaaatgtaagaggtaaatatttataatgacaaaactaattttacaagtttaagacattgctttcaattcattattctcgttttcatcaaagacccctgttaggacagggattgttaactccatcaaaatgaggaaagcaaggccaggaaacattggatcaccagccaaagatcacagagttgacaagtagtagaactgaggccagaaccaaccaatttttacactgggccaagtgtaatcgtgtaacgagaactgtggaaagtgggctgtcactgaagatgtgctctgggaagtaacggggccggggtatagacacgcatgcagtgaacatagaaccaggcagtttgctccccagtaaagatgagagagcaagtttcccagagctatggaaagccatgcaagggatgagagagacaggtggggaggatccaaggtaaagggcatgagcaaagtggtttaaggaatattccagaagaggtttgagagtgctgtctgtgctggagtcgagatactggcagagataggaagggaaagagggtgttgggagcttgtggttttcttagtggaaagaacttgggcattggaggtagagagtcctgggttcaaatcctgaagtggcctctttctgtttctgaatctctatttcttccttggtttggttgatttgagattggaaagaggtaatgtctgagagctcccagcccagagcctcgcacatagagtctggccctcacccgttaacagctcctgctctgattctaccgaggacgggttggacagggagagaggagaggcaggcaaaggagaggagaagctcagagatgccctactgcgaattcattagcactgtgagatggagcgccatctccccctcaaggttttgctgaggtacagaagcatctcaatcagccctacagggactttcaggctccggtgttgatctgcgtgtgagtgttttatacaaagaactctgtcttgcagccaggcctgtaactggggaaatgctgcaatgatctccctcacagggctgatgccttccacctccccaatcacctttcaactgtgtctttgaggcctctctttcccgattgttcagaagcatcttgtgtgtctagataatcgccttcccgggatctgctgaccggcagcatgcagccttgccaaccgggccataatcaggcttttgacatacaaaggtcagctttattgttgtttttatttttgtgagtgatgtatagtttaagaaacagattcattcaaggggaaacaggcaactactaaccattagacagagggaaataattgctttttaatacattatttattgcctgttcaattctaacatctttcttgtctggctcataacttcaacacattagaaagctcctatttcctctccgttgtataagtgtagacagtaaaagtgtattgatactagtagcaaagacaggcattctttaagaaatttttcttctgttgtagacattttccttactattctgtttcaaacattttcttttgtctgtgtcaagtcatttcagtgtggtagaaaataacctcttcctgggctcaaacacagctcttaataaacagcattcctttctagtatgttctaggatgtgtgtttgataacgggcctgggtgtctacccattgaggggaggtgactttgttggggtagaattgagatctgaatgtgcatgtcattggctttactgaactacccctttgggactgaaaaccttgcaagggcaggctgaggcgaggatggctgctcaggtcttgtgtccccgtggcaatgcgtatcctcgctctgccattttcaaagtgctcaagactggcctcaggccaggcatcacatgcttatgcaagaccagagctttttctactcaccatggcggcaggtgtggagacatcactttgcccccctggccacggtcaccattggcagagtcatccgttccaacccataccaatctgaaaaagaccccttgtgcctgtgcaaaagtgcctgtaatatttgtatgtttcccaggcaaaggatccttaaagctgaaaggaaaagtaaaactcagcagctataaactgtaccaggagcaaactctgactccagatttttgtgactcacagagtgttttgtttataagtgttgttaccaacacttaagcatcagaagagttgtattaaaatatgaatttctctttctccggagaagtcagctctggccaccttggccccttgctccgtggtcacagttaagtggggttgagtgacagctgtcccgctgagtgaacttgagcactccaactcaccaaagtccccatggctccctgtggctctatactcagggcattccctgaatataaagtataaagtcccttatgttacctatctgattccataggcatttagaacatttaagaaaatctatttaatttttggctgtgaaactgatgtgtgcaaaaagaactacaaatagtataaaagaaataaatagtgaaaaagaaggtgccctctcaccctgacctgcagtctctcaggacaatcacagttctgtttcctgtgtctctttctagatatacagtacgcatatgtatgcatattacatcatcacctttttaaagtacaagaatgcacacaatattttgcgtttgacataatatattttaggcatcatatcttatccatacatagagatctgtcttattctttccaaaggctgcatagtattcctttgtgtggatgcaccataatttatataaccaattttctactgatggacatttaggttgtttctaatactttgcaatcacaaacagtgctaatatgaattccttgtgcctgcttatctgtacaattgtgtggatgcatctggaagaaaaattcttagaggtggaactgctggatcaatgtcatttaaattgtgatacatattgtcaaatgaccccacaagtgctcatgctaatagatagttctattcacaatgaataaaaatgtcccctagatctaggacctgatatgatccaatccactggacaagtgaggaaactgaggtccagagagaggaagtgaaatggcatgtaaatagcacagcacagacttgagttgatgcaggactcaagatgccattcgccacctcccttccaccatgccccagctgttcagttctccagcctccttttgtaggaaactaaaccaaggggccctgggattagctctggggttcggcaactggacccaggccagctttgggggagcagatgttctgctaacaaacacttccataatgactggcacatgctgtcaccttggtgggctggctcagcggtgaaggccaaagattaaatggaccatggaagctgaattaccaacccagcccttggtggtttttaaattatagatttttaaacaaagctaaatatagagcaattaagaaatggctccacattctacccctaagaaaaaaacagctgaactggagctaaacacagcacatgcatatgcatgtgaaataggcgaggaacagagggagctggttagagtaaaatccaaactccttccagcagttcttccagcatagcccccatactcctgcctcagggtcttggtacatgctgttcccactgcctgatgcacctcctctgttttattcttctcatagctggctctttctcttcctttagaatagaaacattcttagatttttcccattcgtccaattcctatctcagtctcgttttcttcttccttgtatcctatatgacaactggccattttctcattgatttacttttttttttaatctgattcccccactagagccaaaatctccatttgctcttctgcaccattaagacgatatttccattctgcctgttgctgtgaggacaaataagataatctgagtcaacccaccctcaatgatcacctctcctttgaactcagtagcatttctagtctgtggcatgaaatttaaagctttgttgtatagtacaggggttctgcaagtatagcacatagaccacagtgagtaaaaatgatgctgttataggtgggacatggagaaacttttaaaatatcttttcatcgcagctactccctagtaccacccgggtctaaagcatcataatttctgtgattactgcatcacttctgtttcctcattggccttccttccttccatcctacagtgtattctggtctcaggagccagaggggttctgttaaataagtcttgtcatgccactcctctgctcaggaatcttccatgattcccatgtccctcagagaaaaatcccaggtctttacaatgatctataggaccctgtacagttgggtcctaccccacccttacttcttggccctcatctatgaccttcctcatatttgctcacctctaagcccatggatgtcttcaaacatagcaggcacatctttactacaatgccagtgccccttctgtccctctgcctggaatcctttttttgttttttttttaatttgcttgttttttgttttagagacagggtctccttctgttgcccaggctggagtgcattggtacactcataactcactgcagccttgacctcatgggctcaagtgatcctccaggctcagcctcttgggcagctaggactacaggcatgtgctaccatgcctggctattttttttaatttttcttttttttttttttgtggagatgaggtcccagtatgttcaccaggctggtcttgaacttcttacctcaagcgatcctcccaccttggcctcttggcctccctatgtgctggaattacagttgtgagccactgtgcccagcctgaaccttttactcccagttatctgtatgacttgagtcctcatctccttcaatctccttaactgatcttcactcaacagtcaacttctcattgtgcccttctccaactaccttctttaaaatcgctacccactcacaccacttcctgtcccttttctctacttcatttttctccaaagcccttaccactttcagtgttccgtatttcttctttacttctcttctgtattgtctctcttccctactagaccataagttgcaggaaggcagggatttttctgttttttcatagctatatttctcgcatccagaacagtgccttagtaggatctcaataattattgtcaaatgaaaaaatgaatttggatgattgagagtatattaggattctccagagaaacagaaccacatggatatatatagatatacaaaaagatttattttgagggattggtgaacacaactacaaaagctgagaagtcccatcatctactttctgaaagatgaaagctaatggtgtagttccagctcaaaaccaaagtcccgagacccaggagagccagtagtgtaagtcccagtccaagtctgaaggactgagaaccaggagtgccaaagtccaggagcaggagaagatggatgttccagctcaagcagagagcaaatccacccttcctctgcctttttgttctatttgggccctcaacagattgaatgattcccacgcacactggtgaggacagctctaccttacacagtctgtaattcaaatgctaatcccttctggaaacaccctcacaggcactcccaggaataatattttaccagctatctggtcattccttagcccagtcaagttgacacatgaaattaatcatcacaaagagtaagcaacagaaactgactctgcagagagtaaacagaagctgttagttacctggaaagttgctggggtttagagcctcaaccagagccagaaagagcagactgggaaccagcaggtacccagcagttccaggagagctgcactgcaaaaccctcccagagcttcctggcacagctgatggaagaacttgactccatcactacctgtagtgatggtgtcaactgatctccttgtgtcctagaacctcatgctcaagactcagagtctgggagatgtgcctgactgcctaggtctgattgtattcagcactatcatggcccaggtagggagagaaaaggtggatttggactgtccacacaatgggacattccccaaaagaaagattctgatgcttttaggaaggaaaggatagtgtacataaaaaaataaacaatgactttaaacatcgaacttctttatgttattttctatttataacaagtatagttgttaagagtgtggtctctgaaagagagacaaagacaaaaatatcaaaatggggaaatccatttcatccttcacaacaaaaagatatgcaaatagcccttaaacacataaaaagatgttcagttgaacacatagtaacatacacccaaattagacctagacagcagcatagctcacctatcacttgagcaaaaattcaaaagcttatggacatactttgttagagatgctacaggggctctcctggattgctggagggaatggaagacagcatgcctcccaggaaggggatttggcaacatttaacaagactgcttatacctctacccttggacacagccttcccatttctagaaatctacccaggaaatacatctttacaaatataaataacacatgcatgaggttcttcactatgacttttttttatagtaaaatattgaaaacaacctaaatgcctatccacagaggactggttgaataaatcattatataaccatagagcagagtactatacaaccacatcagagaatgagagaaatcttgcataaccaatatggagtgacttccagaaactatttttaagtaacaaagtaaagtacaaacaaatgtatatctgaccttgaggacatgatgcgaagcaaaataagctggtcataaaaagtgaaatactgtatgattccacttacgtgaggcattatctaaagtgatcaaagtcagagaaacaataagtagtgtgctggtttccacgggctggaagaagaggggaaatgtaaagttgatttttaaatgggtatagagtttttgttttgcaagatgaaaaagttctaaagatctgttgcacaacaatgtgagtatacttaacactactaaattaaatacttaaaactggttatgatgctaagttttataatatgtattctttttttttaaccacaattaatagttttaaggctgggtgtggtggctcatgcctgtaatcccagcactttgggaggttgaggtgggagaatcgcttgaggctaggagttggaaaccagcctggtcaacataatgagaccctgtctctaccaaaaaaatattaaacatgtatataatatgctaccatttgtgtaagaaataagggcaagtaagagtatatatagtatttacttatttttataaaaagaaacccaggaaagatcaaacaaaaatgaatgaaaatagtttcctgtaaggggtagataggaaaaaggaaaagtggaaagggattggaaggagacttcactgcttgtttcctcttaaatagggtttagatatttgaattttgtaaatattttaaaagaataacagtaaatttaaaagaatacagaaagtaaaccctaacaccaaacacaaacagaaaagaatgaattgaagtgtataccacaattataatataaccatacacccacacaacaagtaattctagcaacttttgaacacaatattctgactatccacttacagtgggatacagtctaagaacaaaaagcatataaagaaatcctgaactttactgaggatattttttgttaataggagtattgatgtagtaactctgaaactattttgcatatattgtaggatagggcaaatgaataaatatatcaattgtgataggacacagtgttctcactgtggggggggaatacatatatgaaatggggaagagtgaaggatactgtggttttggtgattgaattgcaggtatcatataaactcaggaactgtaactttgagcagaagtgacatgaggtcaaaactggttgcaataattctccctaaatatggctcccagaaggagcattccaagtgcttttgctaattggccttccagaatagtccttgattctcccagtgtggctttttctatatttttggaaccactccatgcccctctgtgatggtcaattttatgtgtcaacttggcttggctgtagtccctagttatttaattaagcactaatctagttgttactgtgaaagtatttcatagatgtgattaaagctcctaatcagttgactttaagtaagggtgatgatcctgaataatctgactgggcctgatttaatcaggtgaaaggccagaagaagaaattctacctgtggacagcagttcagcccatgcccaagacttccaacttgcccttccagaaagcctgtcctacagatttaggacttgcccagctagctccacattacataagccaattccttgccatacacctgttaacatatatcttctgctggttctatttatctgactgaactcaaattaatataccctctaataaacttcttttgtttctctcttaatgtagtttctgctgcttattacgaagtaacagaacctcacatatagtacaatgttaataatgtttccataactcctcctgtagaagcttctcagcatggagaaagtcaggcataggctcttccctccatcagatatgggctccatgtttaccaaagcctccttcttcctgatctggaggccccattaggattagcaagaggctgtatcgtcagccggttctggggttcctgcctctgtgccctgctaatcaggctcaggatttgtcagcagccctgaaatattcatgaacagctgtttcaatgattataacagctgcacaaatagagaggaggcccacaggggagtcagggaggaaggagagctggggttttcatgtcatcttctcttctgttctcaatcccatcagacaaaggaagactttgggaaatcccaaagaactccagccagatagtgccaggcttcagcacagaagccacaagagcccaagagccagagcatcagcttcccctagagggcttggttagtctctgttaaaacacagattgctgggccccatcacagagaatatgatttagtaggtctggggtagggcccaggattttgcattttagtaagttcccaggcaatgctgatgcatcaggtctgggaaccatattggtctacaatattaaggcaacaactcacaaaaaagagaaatatatagacagtctgtgccttatttgcctgaagaaagcccacttgagtcttgtgcttatgagtttcttctctgagcctcagggtttgcacagaactgctggagatacctggttaccctgagatgtgatcagaggttcccaagtcattaggttgagaatggttttgagcaagactcacctcaatgtctccagatttcaatcactcctataagatcttattccactactgtctagctgtgcatcttagagaatgaatgactaaatctccctgtccctcagtttccttatctacaaaatggggataacaatagtaactgtttcatgaactgttgtaagaactccatgagatggtgtggataaagaggtgctaggcctcccattggctgaatccaagggcaagggagccagaggtgcagtccacaggagttcacctcctagagcacagagcaggaagagcggggcagagagtggatgggttgggacagtggcaaacggagaatcaagaacattcgatgcttgatcaatgtctactgttatttgttattggtagggtgaacatacatcccagctttctgggacaattccaatttatggctgttgtacattttcactctcaaaggtatttcacatctcaaagggctttatatagaaattctaaaatcccatcatttaaaagataaagtctacagtcattgtagttattagccattatcaaagtatgtgagaatctgatctgcaatggaaagagagttccaaagaaataattttggtcctttgaacacaacacgctcaacccagtgttaggtttactgatgcaggtggagcactcaattggcgaacatatacatataagaacataatgtagaaaagtgcacatttatgctttatgtgcttttctgtatttataggatgcgttaataaatatgtttattgtttttaagtattcaagccatgtcactttctaaaataatcagcttagctgggccaagaacacagagaaaagctgttttttaagaaaaactcagcatctctctgaaatgttctgcaaaagcccctaacccagggaacagggcagcaggtgcaccaggcccatgtgtgagaaattttccaaggagactttgaggagccaagacagagttaagtccttgtctccaaagaatctaccgcgcatctcctatccacttgctttatctgtttagcaaactcaccctacatcttacctcctctttgcgcctgacatctaggaggatctttgaaatttattttctccttttaggctgctgtatttttaatgtctgagtgaaaaaacaaaggaagatgaacaccagacaagatcgtttcattcctccatgagctgtttggagcctggctcaagctcagctaccataaatgttttaaaattctgtctttgcaagggaacaagtgctggtgtagtcatctacgccaaagtcagggccctgtttctgcctttcctttggtggcataaaaggcaccccctgcatcagtcattaacaatctattaacacaagcagcccagagaagatttccctgtctggtcaaccataatggaagaaattcctgctgcccagctggctgtcccatgatcagcttatgcaggctgttttcagcttagaaaaaggcctgctgattcctctttcatctctctctgagtaacagatacctggccggcctgctttcctcctccctcactgcaaaattatccacctgcctcctcggcttctgttattaagagctgctcacacaagcactgacaatattgattgtgtccaagtggcatgcggggctgtaagatgtcgactcggcatgcgggccagaactcagggctgtttcatccacccacgtcagaataaggagggtcttgaggggtcttgaggaagtagtagtgtctgcctggtgtttctgactctcgaatttaattggttttgatttgaagcaaaaccaatcaacatgatgatttttagctagtcaatcagaatctggttttttaaaaagcccatgtgccttcaaaaatacattttggaagtttgcaaatctagagaattgtattctagtctttatttttttcctttgtaataaattatatataacataaatattatcattttaaccatttttaagcagaaagctagtggcattaagtacatacataatgctgtacaaccctcaccaccatatatctccagaactttttaaatcttctcaaattgaaactgtacctactaaataataattcactattttcccctccccacattccctggcaatcactattctacttcttctttttttttttttcttcaagacgaagtttcaccctgccgcccaggctggagtgcagtggctcaatcttagctcactgcagcgtccacctcctgggttcaagcaattctcctgcttcagcttcccgagtagctagaactacagtcacccgccaccagtcccggctaatttttgtgttttcaatagagacagggtttcaccatgttgaccaggctggtttcaaactcctgacctcaagtgatctgcctgcctcagcctcccaaagtgctggaattacaggcgtgagtcactgcacccagcaacttcttgtctccatgaatttgactactctgcgaagctcgtataagtggaatcgtgcattatttcttctttcgcatctggtttatttcacttagtgtaatgtcctcaaggttcagtagtgtcgcagcacgtaacagaacttcattcttttttaaggctgaataatgtttccttctatgtagatatcacactttgtttatccattcattcatcaacagatatttgggttgtttccaccttttggttattgtgaataatgctgctatgaacactgttgtacaaatatctgcttgggtttctgctttcagttctttgaggtatatgcccagaagtggaattgctggatcatatggtaattctatgtttaaatttttgaggaaatgccatagtgttttccacagcagctgcatgatttcacattcccacctgcagtgcacaagggttctaacttctccacacccgtcccaacactatctttttttaataatagtcatcctaatatgtgtgaggtgatattgggattttgatttatgctttcctaatgtcctcaaaattcattcatgttgcagcatgtattagaatttccttccttttaaggcctaaaagcatcccattgtatgtctatacctcatgttgtttatctgttcatctgttgatgaactcttgggttgcttccacctgttggctcctaaaggcctacgtgggttctccatttaacatggatatcataagcactttctatgtgctaagcaccgtgctgggataatgcagacctaagcaaactgctccacactttgctccttgtagttggggagaaaagacatgcattaatcaaataaccatgcagatagctatacaattacacattgtgataagtgctatgtaagaaaagaacagattcctgtaagttatgtcaaggaaatagaagaaaatctctacctgtcaatttacaagctcctgaaaagccaattttgtctatcatttattcatccaaccaacagacatttgatgtaagtctcctatgtacaaggccctggacagaatagatgggagaggaagcctctggcagggggagaggtatcaaaaattggtaagacagaggtcctgccctctacaagttcatagtctcattagggaagcagagaagtaaatgggtgaatgccaatacagtgactggtgatatagcaaaggtgcatcagtcaaataatctgagtatttaaaacagaaagaattgaatacggggaattggctaccaacgatagaggacataagccaaacatggggttgtgaggcagccaagatggttaacaatagcaagataagctgcactcctgagctgcagaaataaaggaggggtagacatgggagctgaggaccaggggacagcagaaaataaaggactaatggcaggtctatctggtgggaactggagccacagagaaaacagctgctgctgcgaattccatcagaggcagagagaaagtgggaaacaccctggcttctctcttcctctcaccctccaggtcccagcagtgcttccccttggttgaatgcagctggaggccagctgacgcagctctgggaaatgtagtgtgtaggttgcagcctcctccctctcctgcaggggaaggacgggaagtggatcctcagcacaacaggtctgaacaaaattccagaaaaccttgaagcatgggagagtagcccaagaagaggaggaagaagagcactgcagacaaaggaacaacatgaggaatggttgaggtgtaggaaacacatttctcccagccacatcaccaggacatctagttttgccaagcagaggttattcttggcacacgtccccatcacagctatgtgcactcatgcatgcacacacataacacacacacacaccactaccatcaccaccaccactatcacacagggccccagtctctctagaatatgctccccagtcactgtcttccctctatgtaactctgaagtctctgtagtcctcactgagctcacccatgctcactccttgtataggtcaggatgcccaagtagacaaggcccttggatcttctagtcctgcatagaggcctggggcttcgtcccagggaaccctgcagtgccaagcattaacactttagttgctggatctagaggagtttcaaggagtcccaggggaggtgataagaaagccagggcagcagaggcactcaggggatatggtgggtgcaatagtgtgtcccctccaccccacaacagcgttcatatctacctacaacttcagaaaggtgcccatatttagacaaagagtctttgcagatgtaagcagttaaggacttcaagatgcagtcatcctggatttcaggtgggcctaaagaaaatgtatagcgagaaccacagacaagaaggccatggaaagacagaggcagaggttggagtgatgctgttgcaagccgaggaacaccagggccaccagaagccggaatagatgaggaaggattctcctcccaaagcctgcagagggagcaaggtgtcaactgctgataccttgattttggacttctagcctccagagcagcgagagaatactgatatgatttggctgtgtccccacccaaatctcatcttgaattgtagctcccataatccccacatgttgtgggagggaactggtgggagataattgaatcatggggctggtttccccctactgttcttgtggtagtaaataagtctcatgagatctgatgattttataaagggtttcccctttcacttcgatctcatttgctcttgtctgccaccatgtgagacatccctttgctcttccttcatcttcctccataattgtgaggcctccccagccatgtgaaactgtgaatccattaaacctctttcctttataaattacccagtcttgggtattttttatagcagcatgagaaccgacaaatacaagtacatttctattgttttaaatcccctaaactgtggttgttataggagctctggcaaatgatataggagggctttttaccaaccaggatttccatatttaacaactcacacagcagaattgcagcatatcagtgcagacttggtctaatctctttgtattccaggtgagaaacagaaccacagaattaaccatgggttgcagatggagttagatctaaaagccaggacttctgctactccgttccacattcttttccctttattccctgcctgagggaaaggaactgagaaggagggagggggcatatgttcctgctctgtcccagctcttctcccagctcccttctctcctgcctacccctctaggctgctagtttgtgcttctccagtcaccttaggccaccctgccttgtctggctgctagaacctttgtcaaaacccatatttagttgctgcaggctccttgcctagtgtctctgaagttaacgatggaatctttgaaaatgacattagaagcaaaacataagcagcagaagacatgaaactacctcaagcccatctgttcaagcacgatccacctcagagctcccatttcccatgtaaaacagaagatatgatttataatttatatctcacaggtacaatcctgattgaagcaaaccactttgatgaaatgttggtttcatgctagtggaacaccattccaaatcagagaatatttagaactctaactcctctgctgctgctttgaagtagaaaaatttgtattttatgtgcttttctgggaaaaaaaatgtacacttcaacaggcatgtggtgaaaatatgaaagcatttaagtgtgaatcagcaccaaaatgtaattagtacactaagcactgaaaatatttatagactcatatctcgtgttgaagacatggttccaataattctcagaaaattgcaaaattcggactttgttttcttggaactaacttaatttatttgaaatctacaacatatgaagaacaaaatcaaacattaccaacttttcatcccttcaactaatggtctaataaagttgttgtgagtatgtgctgtgtgtgtatgtatgcatatgcctttgattggttgagaaagaaagagatggagagagaaatagagagcaaataaattgggttttggaagacagttcctcccatttttatgggaatgacaaaatatctattacaatatgaccaaaacaccaatcaagttaaatctcttgattgtttccttcagtgacaaaactagccaattcattgaaaccataaacaataactggtgttcattgaacctctctgtggtaggcacccatctagaggctgtggagattgtgataagcaagagaaactgctcttactcttatggaatatgcttcccagtgaagggttagaaaataaacaaataaatatatagaatgcctttataaaaaccataataaacaatcttttaaagcagggtgaggaaatagagagaaaagctaggggtattacttcaataaagaagacctgtctgaagaggtaacatttgagcagttacctgaattaggagggggagaaaatcatgccaagacctggaggaagagcattccaggcagaggaaacagccagtgcagatggcctgaggttgaaataagcttgtgttggaagagcaagactgctgtcatgagtggagagggataaataaggtggagacgaagatgtagtcagggagatgggcagagccagatcctgcagggtacaacagggatgccttacaagtgtcattctgcattaagtccagccactgcaggccaatttggcaaccatgttttaagttgtacgacaaccaaggctcggcaggtattaggcactgcaggagaaggaaagacagacttgcaatgcttgtggaataaggaagcatgtgaaaaacatcacaagaaagttacacacagaggactttgactttgacctgaattagcctaagtttagctgaatatttgggtagacagaactggaggaaggacttgaatttcattcatttgttcattcattcattcattcattcatttgatcaatcaatatttactgagtgccagcattatgagatgaggctgtgggagtacactgctgaacaaaaacaaaacaaggtctccgccctccattaataatataaacaaatgctatgcagttttcattgcagtgagaattatgcaagagagattcaagttgggcttgccaagtgctatcagagagacttcctgaagaaggtgtgactggctaggagctgaaggatgatcagattttacctggaggaagggtgttgggagtgggaagctttccaggtagagaggatggcaagtacaaagactgtgggattcaagacttagaggagactgatgggaatcatggcctgagatgtggctggcagatgggtaccagggtccagccatggtgaatactgtagactgcaggaaagacttgggtctgagtttgtttttttgtttcttgagatggagttttgctcttgttgcctaggctggaatacagtggcacaatctcggctcactgcagcctcctccttccctggctcaagcaattctcctgcctcagcctcccaagtagctgggattacaggtgcctgccaccatgtccagctaattttttgtatttttactagagacagggtttcaccatgttggccaggctggtctcaaactcctggcctcaggtgatccaccctcctcagcctcccaaagtgctgggattacaggcatgaaccatcgcgcctggccgggtctgagttttaagagtaaaagaaagtcaatgaaaggggttgacttgaggtgagtaggtttcattttgcaatgaaataagatttgcaaactgaaaaattcactcttcttggaggatggagggcagatgggagaaagaaacaagagtgagtttagggaaatcagacgagagctactgcagaagtctagtcaacgagagaagctgctggtggtgggggtgaaaatggagggagagaaaagtagtggtggtctagagacatttaggaaggctgcgatgggtcccaggctgctggtaggtgtggccatgtgacttgtttcagccaatgaagtgtgagcagaagtgacgtgagaattccaggcggaagctttaagagtcggtgagtgaatgattcacatcgctctcttacgccatttgtcattgttcccaatggtggctactttttcagtctgggtcccctgtgcaggggagacctggaacagagtcccagctggcccactggacatgtagcatgagtcagaaataaacttctcacatcgttagttcctgagattgtgtgagtgtttgtttctgcagtgtaagctagccgatcctgcccaaacaagaaataaaatgaacgtaattgggggcagttagaatggaaatgacagttattctgagagctctccagtgcttatttttagattgttttcaagcacaactcagcactccaagcaagccccttgctccttgtcccctccaaattcagtctgatgtgattcagtgtgacacaaaggaaagtgaatctatcttcagcaaatgtggcctttaatggtagcaaagtgctttgaagatgaaaagttctctgcaagtgctaagcattattattctgtatcagatgtcagtatgcacttaaaaaaagattcaattaaagtgccttgccattgttttatgatacaagcatcagacatttccaaaaaggtcaagtcatgacaggaatatttaactcctagaaggagtagaaagtaattggagtgagctggaggatgatccaggacggaacgatagggtgttcacttagcagtaggatttgtgggcaagggtgaccacaagagaacaatggagttagcgtgcttatttaaagcacccaagagtgtagaccctttgtgggggactggttgaaaggtgcagaggcccccgtgtctgtgtatgaacaggtgagactgagacaacccactgtggaaacaaagaagcatggatgaaggcagacagcctcccactccaacacacacacatatgcacatgcacacacacacacacacacacacatacccttggttgctgatgtttcatatgcaccagtatctcagataaaagagtctagagctgggctggaagatagcaagctatccaagtcagccccatcaccctcattttatgtttgttattgaacttttgtagtcattcggtgctggacatgtctactacaaaagaggaagaagatgaggaggaaaaggacaatatggagaagggagagaaggcatgctgggtactatctggtggctgggatagggacaacaggcaaatgtcctgaggtgtcatgtaagtaatccagccctaggctttcaccattagagggtgtcgggggaaaacttgcaatttcagtcatgctactacttagacacacaaaggaaacgtagctcttgtattttctgtaagtgatcttaccatctacacatgcctcttgccagtggcagtgtgtgttgggtgatgggttcagaagtggatattttaagcttgttcattaaagatgactcagtttcttcagttggaaccatctcctcctagttaaaattgtcctttgcagtccttgtgtttatgacagtgagagaggagacctctcatccacactgtgccttctaactgctccctggagcctgctggagagtggttgctccactttgctcccaaggtttaccctacctggatattccaggtgatgctcttgctcacatggagactgtggccttggcatgtgttccctaggtgggcagtcagaacacctgtggcacgttgcctgcttcccctacaaatttgtgtctttcattttcttctcccctgctgccaggccaggaagtgtcttcccacctcctcttctcatctggcttgggcttctcctaccccatatcatattccttctcaaggtggcattcacccttcattcacccttcattggagcaataatggtggaatgactgtagggaacatgatttatagaatgaaaaccacaagtatttaatatctttaaaatattttctccattacaagaggtgcattcctttagcctaaggtttattttgtctcataaaatgcagatatgcttaggagatgtaaagcaaaaggtgttctttctaaaacaccgttggatgatttaagttggttggtggctgcatcaaccctaagactgcacaacccaggcccattcattcattccctaaccattcataaacaatcattcattgcattcacctatatgccagcatggtcctaggcaccagagatcataaactactgagagggagagaaaatgataagaataagtaattaacgactgctgtgaaaagtgccgcactggaaaagccaggatgctctgagaatgaatgacacaactaaagggatcagggaagctacctgatcaggtgacaagtggcaggcaaagacaaaaaggagttaactgagagaagagctatggaggtgcagtgtgctggagagaagaggtttcacagccaacagggcagcatgtgcactggccttgaagtagaaaggagctccgagggtccttttcaaggtgacctctaaaagggaatggagggaggatcctggaggagagaggaagggaagggcacagggaaagaaggagttgaaccaggccagggcgatggcaatcaaaagtcaccttgagaaattgatgagtaaaatcacgagccacttttgcaaagctcattgtagaaaccccacagatatttaagcctcatgctcaccatttccaaatagaatttttatctcatgctgcttccaccaattccacttgttttccatgttctctcctgactttctggaggaggactggcttgaaggaaccctcacctctgcagggatctagcgcctgctgtgtgaaccagttgcagggcgagatgcaggacagggaactagccatggtccttaccttccaggagccctgttctggcagatcacagcaatgggaactgtcaaggcttcaaccctcctgccaatatcctggtcacccttcttctggggacacaaatcccaaacttcagaggcttttttgtgctccttcttccttaatccccatggctaatctgctaccaagttctccaagcctacctgcaaaatattctagggtttatctacttctcttcagcctccttgtttcaactcttatcaaagtaactcttcaacttgtaattcaaagtaattcttcaacttggtaactgtaatcacttcttcactggtgacctcaaattcactccgattcccccttcatgagggcagccagagtgatttcttccaatagcaaatgtgattatgccattctctactcacttctgagatttccttgctcttaggagaaggaaaagatggtcttggccccagcccacaaggcattcgttgtaagatccagccattcattgtgagatccagccattcattgcccaccactccagccctcatgctcccaccaggcttggcctcgctctccaccttctcaccacactggcctttgcagagctccttgaaggggctgagctcccacctgcctaacacccagacctgcactccaccgtcccttcctcagggcaaagtcccagaatgccagaccacatcagttctccctatcatccccccatcatccttccaaggagtggtcttatttttatgtgtttatttgattaacggctaactaatcctacttgatttagagctctttgagagcaaaggtgattctcatctctgtgcatgtctatggcacagggatgagaacactgtctggcacagagtggctgctgcaatgaatataagttgaataaaagaacaaatgactgcaatggaaatgagtgaagaatctgtccaccttcccagctttcttgtacaggaagactttacaatgacctgaaaggcccgacatggtatacaccccttccccaagtccccctttctctggcgtctgatcgacttctctctctagcacacttgactctggcttcactggtgttctcgctcttctgcagcaggccaaatatgttccagcctcagggcccttgcacttgctgcttctggtgccaggaattctcttcttccaaatatccatccacatgactgactctctcccctccttcaggactctgttcatatcattcttcccagtgaggtcttctctgatctccctacataaatccatcattttcaaaacccctacccgatttatttttcctgatagtccttatcaccttgggcatattaccttatttatatgtgtatcatctatctccctccaccaccatgagaatatgagctccttaaatgcaagaattttgcttgttttatactctgctgcatcctcaatcctcattacagttcctggcatagtaaaccctcaatatatgtcagtggacaggtgaattaataaatgaatcttgagcctagaaatgacctgggccttgttcttggagatcccttccctcttgaccttgtggcacaaaacaaaacaaaacaaaacaaaacccttctattccaaccaagtcctcatttatgcagcccccaaattcccagctacaaattaatgacaacagcaataaccactattaaatgttaactatatgccaaatattctgctaagtgtcatatacatgtataatccttatagtatcactatgagaaaggaagttacaatctccatttaacagataaagaaaattatcatcagggaggttaagtgacttgtccaatgtcacacagctagtaagtggctaagctagcctttgaacacaaccactttgtctatagagcaggaacgggcaaactggcttgcagaccagctccagctcactacatgtttttgtatagcctgcaaactatgaatggtttttacatttttaaatggttggaaaacaatatgcaacatggactatatatggtccacaaagcctaaaatgcttactataataaatatatcaaatgaagaaattcctgggcaccccctgtgtgtacacaagaggtacagaaaaagagatgtatatttaaatgccattttgggggcttctcttatactctcaggagcagctaagcaccttcatggatgttactcattaagtcaccttacaacctccaccacagaggcccagagattaagtgatgtggccaaggctatattttaagagacagaactgggagtacaatcacagacttacagggttggaaaggcttctaatgcttatttatcccaagctccccattttatggattcgaaaaggaaagtatctgagtcaggggcatctggggttaatgccacagcacctctccaatcccttgacctggggtttaccctccactaggttggccctttgctcccatcatttccaatatccttcggcatctctatgagccccagcatccagcctgcttcctctccccctcctgaccttcctccgcacccaccactgctgtgcctgcgaggacgactcgaactacaaattaagtgaaggggaaaactgaattgatatgatctgagcaagagaagcacaaaggcaccaatttcctctccacattatacaggaagatctgggccgcgtggggagccggtgcagtgccttttgatgtttgccttcctgcaagtaacaagcaggaggacatgagaaggcttcacctcctccatgcaaactcacaacagcaggtttccaatcacggtagaaacaaatccagagatgaaaaacaaagaaaagaaacgaagaaggaagagaaagagatgattgttgtttagagagctttcaggacaaggagaccctttaaaactaactacaggacatgttaaagagcttacaaacacccccaacgcagccctgggctgagcttctaaagggtatagcaaagggagactctgagcttgagtcaggacacccccgtggctaaagctagacctattcaggaaggggacatcaagggttttcacagatgcaaagtcctcctctccgcatctgagctggcatttctgaaagccagagccaggatactgccactgtggggtggagattccagctcaaaagtctttttcaccagcaggagcaagaggtctggaaatatcccctacccaactcaggtatttgtggttcaatgtgtggcacgtgccaatgctgtgtcaacagcccagtaatgggcatgcaagaagttatggtggcatttaggccctaagggaagaactagttgatcagtctctctctatatatctctccctcaattctcccacattttttttttttgtaacagggtctcactctgttgcccaggctggagtgcagtggcgtgatcacaactcatgactcactgcagctttgacctcctgggctcaagctgtctgctcacttcagcctcccgaatagctgggactacaggtgctcaccaccagacccggttaaattttgtttttgtttttgtttttgtttttgtttagagatggggtttcaccatgttgctcaggctggcctcaaactcctgaactcaagtgatccacctgcctcagtctcccaaaatgttgggattacaggtgtgcgccaccacgtctggcctccacctaaactttttattgcagtgaactagggggctaatatgtagcatcctgagatttctgtctaaatcaccttgggcttattctgttgtagcagtagttctggaacattcaaaggtaacaactaagatgaaagctcttgtgtctttggtgtcttcgcaatgtctttctgtcttcactcactatattagccatcaaaaaatatttaagaaccatcaaagaaatatacgcagacaagaaatagaaaaaaatagctttttttccttcatgagaggggaattaagtaagatgcattaggtccttctttttgttgaatcctgtatgacatgatttttaaaaatcttaccatcccaataactctatcagcattattttacagatggaggaactaagactcagagaagttagtggacttgtcaaaggacgatgtgctatgaagtgacagaaccaaacatccagcccagggctgactgattttaaagtctgagctcttccagataatacccaatggtgtccaccttaaaacagccacccggccccctcaccagcagtctgtgcatttgggtaagcagggtcctgttgagcctggccgttccttgaaaatatcaaagtaacttggacttggtgcctgcctggacttatacttgtcggtgttgtcttctctgccattagtgacagaaagtcagaaggtgcagggctctactgtagacacagaataatatgagcatgctctgtaatatgagcatgctctgtgttcaggtttattcccccagcctgacaattactctcaactctccagacctgtatttccacgtgcccactcaacagcttggcttgaatggccaatagacatctctgacccaacgtggccaatctgcagtcttgacacttcttccttcttccaataaatggcactgcccctcttctagctgatccagccaaaagctctagcactagctctttgaggttgagttcttccagaagcagaccctgggccaggctttgagtgtgaatagtctgtttggaaaatgctctcaggaagtagtgagaggaagtgggaaagcgagatggaaaagaaatgcaccccatgaagggtgtgttgtcaagcaagttatcgatatgaactactggagcttcatcctgctggggactttaggagccagggcagagcacaagcctcagagttacgtccctcccctgtggggtgacggaactgggctgcatatacaccatctcccatcagtcatcggttgaggctgcccctgagggatcctctggcctgctttggacacacgggcagagtgggctccagtggtcagaggaagcccttaggcaataaaattaataaataaaataaataaaataaaataaaataaaaatggacctcaggctggccattagaagcggggcctctaacatggtgaagagaggacctatggatgtggcacaacagtggctgctgtagaatccctgattgccaccactccctcccctaccacacagtcactccattggcaaaacctgtgggctctgcttgcaaaatagattccatatctgaccacttttcaccactaattgcagaagaatctggtgtaagtgcccatcagttctcgcctggactattgctggagcaccctaactggtctccctgccttcctccgttttcccctattatccttctgtactcagaagtcaaaaggatccttttatccatgattgtgttattgcctgtttgaaagctgcccttgctcccctcttggttggcaccaacccgcagtcctgggcttggcctgcaggtcctgccaactcagctcctgcttcattctctgatgccatcttctatcacactcttccttgtttaccctgctccacctgcgctggctaatcttcaaaagtgccaagcacacccccaccctgaggcctgtgcaggggctgctcccctacctggcctgagcctccctgacatccccatggcccctttctcactgcagctttctcagttcccccaaggggaagaccaccagccactcccactctcttgcccacgtcattatttttcagaatgctggtttcctaaggaatcccccagtcactgcccttccttctgtaccctaggtctttaaggagaccaaaataagacaaggaatgaggacaggacagagctgctcacattcagtttattcctcctagaatccttatcaatcagccaagtcacctcccttggggcagagcaaggtaaggggaatagagacatggagatcctccggatgcccctgtgcatggaggaggggtcaggagtggtgaaatcctcaatgcttctcacacctgtcatcatattatgataatctattgcatggatgcatccctcaggtcccttttacttattctgtgtgctcacccccagcctctacacacattttcccctactcctccttctctttctccttctccttctccttttttgggacagagtttctctcttgttgcccaggctggagtgcagtggaatgatctcagttcgctacaacctctgccttccgggttcaagttattctcctgcctcagcctcccaagtagctgggattataggcatgcaccacaacacctggttaatttttatatttttagtagagatggagtttcactatgttggccaggctggtcttgaattcctgacctcaggtgatccaccaccctcggcctcccaaaatgctgggttacagccgtgagccaccacacctggccctacgtattttacttctaaaaggttcacacctggaacttccttcctgtgctggcccatgaacctctgcagctgctttgtccccatggcatgcagagaggagaaaaagtacccaaaatttactccccctcacccctccagcctgtagccaatggatgtgggagtataaaagcctgacacccctgcttcaaagacagacagaccctgagatgtaatttataccccagagctctccacaggatcaggcagaggttgggactttgggaagctgcacctttgctgggcttcttccccctctcttgccctgtttccctatgcccttatggatatctcctgggagctctttcttaataaattacctgcacttcaacccttgtctcagcatcttcttctgggaacataagactgaaggcactcgctgtttgttgtttatttcatttccttactagaacataagctcccaagggcaggagcttttctgttttgttcagttttgtattttcagcaacaagaacagtgcctcgtatacagaaggagctcaataaatacgtattaagtggatgcgtgaatttgtgaatatatgtcaattgacagaaatataccaggaccacttctaaagaaggcttcccctgttctgttttatggtctgctatgtccctcatgactgaaatcattcgcagcacaaagtagatgttcaatgaatatctattgatcaactcccatagcccctgtctgctctattttagcaactgttctaggaaaactgctaatatatctggcctctgcctggcttctctccacctccctctcaggcctttgcacagagcaggtcctcagcctgagaggactgcattacagtttcagggcctactgggtggagggactgctagggcttaaggaacaggagcaatagaccctactaagatgggtgaggcctctggaaggctgtgacagcctaagctgttagggagaagcttctgggcacaactgggtcattggaagccactaggagaatttgaggtcgcctgggtgggacagggaggggtaaacttctgggacaacattagatccagagaatggggagcctctggaggagggcagaacagagggggaaaggcaatgctactagtgagtgttagggcccactgggcagggggatgtttgcaggggaatagttgggcatcctggtaagcagaagcccatggggactgatgggccaatggggaggggaaaattatagggaaatcttggggctttgtttacagtggaggcttctgagggaagtgctaagtttcaaaggtattaaggtcagaaaatgtcagaaagtaataagggaaaagaggaaattaaaccaagtctgctctctctctctctctctctctctctctctctctctctctccccctctgtctctgtctctctttctctctctattgttctccctcttacctttctctgatattttttcctctttggtgttgacaaatcactgtcagtaagtgacattctcccttaagaaacctatctgacacagagcacaaggcgtgatggttgttcatggatcagccagattgaattaaggttcaatttcaggttagaatcagctggaagagatgagacccccaaaatagcagtggcttcagcaaaacagagctttatttctccctggcgggatcttcaggctggtggcccaggtttggagcagcaatcctcaggtgcagggaccctgtgccttctgccttgccactcagcatcatcactgcatttctcaaggtggctgctggggtgccagcctttatgggcagttccagcctgcaggaaggaggaaagtggaaagaaaggtgcatccgcctagtaagggtgctctccagaagttgcacacaccacttccacatatgcccattgactagaatacggttaagtcacatgatcacatttaactgccaaaaaacctggggcaatgtagtgtttattccaggcagccaaggatccacttaaaagctaagggtgtttcttatgaaggaagaactgaaaatacatattaagggacaacaagcacatagattgagggagccaaccaggaacatcaggagcctcagagagtccctcgagagacgagctcacatggtgtgctggtatttattgctacataacagcttacccctaaatttggcagcctgaaacagcaaacatgttatctcgtgcaatttctgaggtcaggggtctagaagcagcagagctgggtggtgcttgctctctagaaaggctgcagtcaagctgtctgctgaagctgaagtcatcttaagctcaattggggctagaaaatccacttccaaactgacctcacagggttgttgctggaggcttcagttcgttgtcttgtgggcctctccattgggctgctcacaacatagtagtttgctttcctcagagcaagagatccaaggaagagaagaaggaaaagaggagagagagagagagagagagagagagagagagagagagagagaaagtcatctaaaatggaagccacagtcttttctaacccttctgagaagagacacgtcctctcatctgctgttttctttttggccacagagcccaatcctggcacaatgtggaggaggatatgaatcccaggaggcagggatgactgcaggcatcttggaggctgactaccaaccatggataggtaaatgagtgccaggagttaggagatcacacctcggtagagagagttccttgagccaggaagactatgcacaggctcaggaaggctggctgggcctaaacagaagtgggtcaaaggttaaggagtatgtctcagtctatttgggctgccatagcaaaatgccatagactgggtaactcataaatagcagaaactgattcctcacagttctggaggctgggaagtccaagatcaagttactggcagattgggtgtctggtgggggtccattcctcatagatggcatcttcttgctgagtactcaacatgacagaaggggtgaacaagctccctgaggtctcttttatatgggtactaatcccatccataaaggctctgccttcaagacctcgtcacctcccaaaggcctcacctcctcatttcatcacactggggatgaggtttcaaccactaatttttggtgggaggagacaaatatttagaccttagcaaagtacaacaaaatgttcctgtggttgctttctgatattcacccaatcaccctgaagggacaaacctttctaccacttcaaagagggagacaatcttactagcatgtaataatcagcactgttacccacagctcaagccctcaccctagaaacaaagccaagaccactaagtgggtaggtgtcctggctaagtgtggacacagggcacaatcagagatgtgaacacacaaagagcttcaccagcttctcacagaccctgcttgcctttcgaagtgatgaatacacatggcctggtcattccagagactaataagacccctctggcccattacctgaaactggggacccaataccatgcagatggactgagtcattacaaaggcaattaaatgcccaactccatagccaggtgccaacatgtaggcttttgtgcatggataacttagttctttcaggaggggaagaatctttagtcttattttctctcaagcctggggttaattgggaagccagcttcggtgactagtacacagaggctaatttgtacaaccattgctcacaagtgggtgggggggatgacggcaaaaaaaaataaaaatacaacattgctggagacagtctgccattgaattggatcttaatattctagtccatgaaccagcggttgcactagagcttggttaaaaaaaaaaaaaaagcaggaaaaacccacacacattctttcaatttctaaagggaaatttgactcgggctgtagaacaaaggacgaagaaatagaagtaaaagaaaatcaaagaaaaagttatttggattcaaggggatcagatgtttcatttattgcaggttggagaccttcaatcagccaaatgaaaggaacatttgtattaaaatacctatgaggcagagagaaagccttgatcgggtgcagcagagttaagttacagcaatcgtgctgagagatatgaacccaccttcgaggttatctgttcccaatattgaaggttttctgtgttacaaacctgagatgaaaggtagttgttttgacgtctgggtctggaaggcagacgctgaaattagcagcattcttgatgtgtgtgcagcaggaacatggagcccgggatggggtgaaaatgtagctgctttattaaaaggaaacgatgttaatgcaacactaagtgcccaagtcacccatgagggtagggtgtagatggggattacaaaaacaccttctgagaaggggcagagaaggagcactgcactaggggtctgggaccaaaggtatagcccctcctctgaccctgggttggtagctccaaaatagctgggacttagcctgtctagttcacagtgccaggcatataggaggtgtttgatatatgtcaaacaaatgcatgaatgaataaatgaatatgaacttgggcctctttggacctaagtcttacaaaataaggagctgggactaactatggatttctccagtgggatgaataccactgatggttgggcagcacatggatgggtttgggtgacatgcaaagacatggtattaaacagtactaactcagagagagaaaggtatcacttctggactctttctagcctctgactccctctaagagaaagtctcaatccaatgctaacatctctttaacacctctgcaatgttttcaaccctctcttcataatgataagaggggaaggcccaggctcacatcctcagcaggcatcagcatccaactccatttcataacttgatttatttcctttgtacttaatttcacagttgcctttctatgtatggcaagtgatagtttttccttggcagaactgatctttttagggtttctttgtcagacagatgtttctaagtaagcacgaattgatgtaaagccaccattaaggaaataacagctcaagtgggatgcagacaaggaaaatatcatgatgatgagagatggtttggaaaaaaaaaaaaagaaattgtcccagctgaccttgaaggtctcttctggaaacactgagcatctgaagtctaggactccactcttctggtttatgtagagcaaatccagcagtctctagcaaagaggtgactgcaatccgaacctttggaagatgggcctattcatgtatccatttattcattctctcaataagtatttatcaagagcatattatatgtgcactgctgttccaggcactgggatagtagtgaaagaaaaatagggaaaaagtctctgccctcatggagtttctgttttagtggtttgaggcaagacagggaccagggcaggtaaatgaggcactgagggtgtgtaatgtaaggaggcacctggtctcaggactgcgcatgaccttgacctgacttgagacgagtttcccatcctgaccgtaacctggcatagttgtcatcattctgggggccacaaatcctgtccctggagggtctggtgtaattgctctttggtgggtccccagactagtatctggggagagcaacaaagattattcccatccacttccaggattgagaaccactgacatggaccaagaaaccttcaaattttttgatttggcacttttcaaaggcatcaaccttcttagtcactaagtcgatcttcacttaccaaataaattaactaatgagtgagttggtatgttgtcactcaccataatgacaaaaatactcctgtcctctgcctccttaccaggtgtcaggtaatatcattcacttttttttttttaaatgaagtctcgttctgtctcccatgctggagaacagtggccagatctcggctcaatgcaacctccgcctcccaggttcaagtgatgctcatgtctcagccttccaatagctgggattacaggtgcgcaccaccacgcctggctaatttttgtatttttaatagagatggggtttcgccatgttggccaggctggtctcaaactcctgacctcaagtgatccacctgcctcagcctcccaaagtgctgggattataggcatgagccactgtgcccggcttcattcactctttacatttcttgtttcattccatcttcacaatcacctacaagataggtgttattatcatcatcacccccttttgaagatgaggacactgaaggaaagagaagttaaggagcttaaccccagcccaacaaaacttgctaactttacccaagctaacttagccaaagaaaacccagaagggccatgctcctaacccctgtgccctactgcttctctatgggatgagtctcaatgcctggggacttggtcacaggagttacagcaaagagagtgcatgtgaaaatgagtgaagtaaggagtcctttgtaccttaaagatagcacataggaataattgtcacttccaccaaaaaatgtgttccttctcattcttctccaaacatgagtctaattctaggttcattttgcttccatgtctgttaaagccacagccatacaactgtggtcctctatataagaaaaaagcaacagtgcaagcatggtattacataacaacacatcccctggtattggggaagtcttggggcatggtggggagtgtggctaattgggaagaggagcctgtccaatgtctccagatttcctgacttatcaaaagaaataagaaatttagatttagttgagccaggcgctgtggctcacgtctgtaatcccagcactttgggaggccaaggcgggcagatcacgaggtcaggagatcaagaccatcctggttaacatggtgaaaccccatctccacaaaaatacaaaaaattagccaggtgtggtggcgggcgcctatagtcccagctactcaggaggctgaggtaggagaatggcatgaacccgggaggcagagcttgcagtgagccgagattgcaccactgcacttcagcctgggcgacagagcaagactccatctcaaaaaaaaaaaaaaaaaagaaatgaaatttagatttagttgtgaaatcattgaatttccaagggggctctaatttataagtaactgcatgggataaatacatgctttggaaaacctgagtgtgaagtcttctggaaatgaccaagctagagaagaagtcttaggaatctactctaagatcactgagtgatctaggacaagctctggggtttctctgtgccatgaatctaaagctgtaaaaaggatatgaaaaatattatttattcattcttcaacttttagcaacaacttctatatattaaacactgtgccagatggggggtttaaagattaaatcaatatgcttatcattgagtgagggagatgctggactgtgaactctaggtccacagggtaagaacagctgtgaaataagaacagggagcacacggggaaggctggtagttctgcctggaagagatgacatttcaaccagggcttgaaggctgaatgtgaatctccaaggcagcaaaggaagaaagaaaatgacttttccttgattccaaagtgctctgtagaccaatacaacatgaatcttttataagtttgaaaaacatgcatatagtcccataaattgaagagtgagcaaactgatcctacaaccccccaaaccatctttgtctcacatattaattacagggtgagcatcccaaatccgaacatccaaaatcagaagttttttgagcactgacctgatgctcaatggaaatgctcatcggagtatttcagatttcaaatttttggatttaggatgctcaactggtaagcctaatgcaaatattccaaaatccaaaaaagactgaaattcaaagcatttctggtctcaagcattttagataagggatactcaacctgtacttatctaagtgtaaaaccagactcgttggactttggacttttcccagagctgtttttccctcctctgtcttactggagtcaccgtcgtccaggagcccaggttacacattttggtgctgtctctagctctacccttttcctctccctgcatatgtgacccagggaagggtctctctcatggtgctgacttgctggccccccgagccatgcctctgccaatgcagacttttgtctcctgcatggactcttgctgttgttttctctctgctcctcctgtctcttgtctctcctccagtcaatccattgctctttccaaaactcagatctgactatgttgctctctggcttaaatttacaatggctcccactgacctcagatcaaagccagcagtgtagcatggcattcggactctgggccccgcctatccttcctcaccatcaccatccttttgccaacactcccctgaaaactacactcacgggcacactatatttctactcaccacatgctcccttcacatgcctggcaacttcctagctctgtggcctgctacaggctcttttctcatcttcgcatgactttcctgccatttttagccatagaaccacagccatgccaagtattcccttctctggaaaccttccctttctgttgtcccctgctgtcccccgcctcccccatgctgacacacagcaggctagagataggagaggagaaggaaaatgaggcaggtaggtagggtcttgaaagtcagagagggaaaagccttttgaaaaaatcacttttgcaaaagcctccaccccaactcagcagaaccctttcaccaaacatggagatccacccgcagaaagaaagagaaagcaatttcacacattggtaaaaggcctgtggcagaagaaaaggaaaagccaccagttggcagtaggtggtacagagatccagcaggaaagcccaatcaaatgggagattgggacatttctgggaagcatatgggccccagccctcgctggctgacactcctgtctgagaaggagggcagccagttgtccaaaaagttcgggcagccacgtgtcaggccttgttcatggccaagaagagcaggaaggttgactgttctagggcagagcaggcacatgggtgtttctgcatcattcacctggaagggcaacatttccaacaggggcatcttcttttctgccttcagcaaccattttctgttaatgcatagtctcaaactcaaacacctgggcaggcaggtgacgagagagaataatgtcatctagtgggactgggaagagaagactgtgcccatgacaaacaggcacaccctctcctcggctccagctgactgtcatgagatccgcaggcttttctagaaatgttggatattgaaactttcataggaagtcttctgttattaaaatgtttgctcattccgcccctgccccccaaccccggccacccaggctggagtgtagtggctcactgcactcactgcacctcagctcactgcaacctctccctcccaggttcaagcgattctcctgcctcagcctcccaagtagctgggattacaggcgtccaccaccatgtctggctaatttttgtatttttagtagagatggggtttcaccatgttgaccaggattgtctcaaactcctaacctcaggtgatttacctaccttggcctcccaaagcactgagattataggcatgagccaccatgtctggcctgtttgctcaatttctaatttctaaaaacatggtacagtgcaaaagaaacaaggccaccagtgcctgaacactaatgtataggttcagattaagcacattaactctgagcaaataaatatggcccttaagtcggcaagactccatctcttaggctgataatggataatctgccatttagttggatttttctgaatacgtaggtatttggctctgcagaaactgggtttcagtatgcaagaatatccgcaaatatttctctgtgcattccctggttatcacccctggaggtgaaagcagtgcctctattattattaatgttttaatttcaagacaagaagagttcttagacatcagctagccttgtctccctgccacaattttgcagttcaggaaaccgaggcccagggaggggacgagcttgtttggggacacagaacaagttggaacttccatcagcacgttgggagtatttacggatcatacacacccacacaagtctgggtttgtgttttccctggtcctcaagaaaaagcccaccgggttgccagatgtgccgagctcaaaggagtccaaggaagtggtttaacagcgatgagaagcaggcccagtcaggggtataatctggccttcccatcagcctcgcctttctgcctacaggagataagaggctggtgtggaggaaactgatatacagccacacgccacagaaatcatgtccttctgcaggcttgggccacctcctctcccagtcttaggcttatgtgaagcctcagaaccctggagcccatgtgtgaatgagaagcatctaccttggctgagtcctgtcctttccccttttccttccatttctcatggtcccctcttttcccaaggcttctgttgaaagaaagtgcttgaaatgtgcatttctgctttgtgtgccagctcttgcatttctttacagaaactgcagaagagagagcaatgcttacctcaaaggcgtgaggttccaatggtggaactaccattagagcctgtttggccttgagggacctcccggtcaatgtcagatgatagctcttgagggacccctttctccagctcctgggaagctttccctgaagctcaaggggactctgtctctccgggctctcttgcctccctcatcccatttattgtcatgtcagagcagaccttggctacaaattccctattttcacttttaaaactacgtcaatacatatgtgtgtctgtgagtttgtatgatgggggtgagggaaggggagaagaggggatgagagaagggaagaggggaagggaggggaggagaagagaggggaggtgaggagaggaaagaagaggagcggagaggaggggagggggacagacatgggccagaggagagaggagggaggggagagggagagtgaatcacctgctatgtgttcaaatcctcccaacaatcaaccatcctgtgaagcaggtcttcttgccccattttccaaatgaggaccctgaggctccccttgtcctctccaccacttgctttcacttccttcctctcctgtgcactcctcctttcctacctgaacattatcttcattcccaaatttggagttggtcctgtgttcccctgaacattatcttcattcccaaatttggagttggtcctgtgttcctgggggcacgttgccggtgcataggtgtggggctgcaagcctgcagtccgtctcaccatggggctccatgcagtggagtttattcctggatggacatctggacctgcaagatttatggggacccacaagatgctgccaaaggctctttttatgggtagttgcaacacagaacagaatatcactgtggtcaggcaccctggagacagagagagcaggggtgcctgactggctgtgcatccaacaaatggggcagtactaactagtcctagtgctagtacttacctcataggattattgcgaggatgagctaagataatggggtgtttccagaggtgcagagaccacgggtggtattgaaaatgatttgaaataatgcacagacaaggcattaaatagcactgactcaaacagtaagtgtattaggtcctttttagctctctttgaattcttctaattacgtcaagaaagtctccagttgatgctattgtgtctttaatgcctaacaagtactaattatttttgttgttttgttctctgtgttttaacaaagggagtgaagacttcaggctcagagtcccactgcaggcaacagtgtctaggtagaacttaatacatattttcttttttattggaataatttttatggttagtggttttctattcacagaaatagtataaaattttctgtgtgagtaaatggatttaggttttaaaagcagatccatttaaaggggagaacagcattaagtagatcatagtatcaataacattcaaatatgtccaaaattataaaaggagcccacagtgatgaaattttcagaatcattgagataatccacgtcaagagcacagtggtggttattactcttctggtgttgacccaagagtttccacatctaaaacaggtgggacaaactaggtagtttgggcccttccaactctgaggatccaaagtccttacttatttagtaccttgttttcctctgtcaggttcaaagacagattctccaatgagtgatcttcatcaaatgaagcttgggctactcccaaggaatcctgccactctggaagatgtttgatgcaaaatatctctggggtcagacaagtcgacttatgctttctgagtctcagttcttcatctgcaaaatgctgtgcctgatagcactaacctccgggttctgtagatttcataagattatgtaatgtagcacaaaatgtgaaaaagtgaccacgagatatgtatcaatgcccagacaaggcattgagtaatactgactcacacagcaagtttccctattgcatcaatgagaaagtctcagtctggtaataatattgcctaagtgcttttcttacacctgccaaataaccctttaattaagtagagggaaaggcctcaaggccttaggcttttggcaggcaataagatccaactgggatattagagataggcttagaggaatatgaagactatatccccacattagccctgggaacagaacaggagccaagggacagtggtatttgagctgacccctgaagagacagaaagattcctccaggcaaaacatactggaaagatgtacaaggcatcaggaaaagcaatcccttaaaatcaggaggccttagccaggtttgtgctacagaccctccaggggaggtctatggacctccttatggaataatgtgggttttaaaatgtgagatgaaaatattggcattgttcttgtggatttttaaatagtgataaaatatacatgacataaaatgtattattttaactatttttaagtgtacaagtcagtgacattaagtattcacattattgtatagccaccaccatatccatctacagaactgtatcttcccaacctggaagtctacacccattaacaataccactcattatttcctcctttcccatcttggggcaatcatcactctacttcctgtgaatgaacttgactgctctacatatcccatgtgagtggaatcatatagtatttgtccttttttaattatcctatttatcccaagtcaggcttacttcacttagcatagtcttcaaggctcattccagaataatgtcattgcatgcataaaatttacaaaacagcattacaaagaaaagttatattaaataacagttatctaaataattatttaaattaatatagtaatatgtgggcttttattaaccaagatataataagatatagaggtgggtctactcatcactataatttccagagagtagtgagtctgtttcaagatactctgtagcaactataatgtgatatgaaaatatctgtgatatctattaatgacgaagtcacaaaagtcccatgtagtgctgatacaattttagttgttgcctacattcagaattgaaggaaatgctaactgtcagttagaagttagcaaaaatttaaaaatacatttttttttcccattcaagctaagaattccatggaattcttagaagtcttccatttcatggaacccaggttaagaatcttcaccccatgaaaggaatatttttattcttcataagtttatttcattcttggtccagaggtgaggcaaagatcagctcctctcagcttctacttggccccagaaaccaactctttggcatagacagtaaggctgggttttggacacgaaacatttttcattaacccccacccaccccgcccaggtattatgtttgaaaagcagtctgtgacagggagtggttaaaacagaagacaagtttgtttcactccaaaatctcttccatttggtctcatggttcattagtatttgttgtgcaacaccaaaaaaaaaaaaaaatgcactcagatgtaaatgcagggacggcccaaaacacaggagacactccacgtgtctagacagcaatgttctaaccaacagaggagacacactgcgctgttcatagtagttgcttaatttttctcatctgcaaacaggctatggattgccaacctttaattaagaaacagttttcttttcaaaaagaatgtgttctaataaataccagctgagctgggatggaggcgctatagaaattacaactgcagctgaaaaaccatgagacttgcagcaggctaaccatgaagaccttcaggaaaggaatagtttccatgtgctttggagatgaggacatgcctcgtgggctatgctccttggcttcaaagccaagccacagcgccggtgctgtgggttctgccttcttgggcagagagaggacagaaagaggcagaaagacagtgaggcagggtattggcttaaatgacctctgccttgacattctatgactttaaaatcaaagaggtactcagggtaaggttagaagtgttcttactacagctgatatcattgactttgcaaaagggagttcctagcaaagaaaatgtttcttcagattgaagtgtcttggtatttgaaatgtcttagcatccctgtgaccctccctccacacgtagtgttgccagataaaatgcaagatgtccagttaaatttgaacatcagattaaaaatgaataattttcagtgtacatatatcccgtgcaataagctaaaaatatacaaaagcattatttgttgtttatctgaaattcaaacttaactgtgtgtcctgtatttttacttactaaatcggccaactctactcccactcaaaccagatctttcctccgatccactttcctccagttctttgtagagaaatgccaggccagcctggcacagactgaggtcaacttagagacatgtgtacagtcagcataatggttaagaacaccaactttggagtctcaaagacttaaagtagccttcaactcaagcctgtcgctttttgatgggtttatcttgagaagctttcatgacctcccagggcctcagctttgtcctttgcagaatggggagattgaaagtcacggctgatgttcagccatatccaatagtacaaaatccataccagcagtttaaaaattagagcatttcccaggccagttgtcaaatagcttcccaatctccccttcattgtgccaggcaccctggctcctccccacctctttcctcatctagcaacaaatacctggcacagtcaggggtctccaggaccctgttctagtgtttaactcagtgttctttctgattggcaagtatctgtggcttattgatagttaaataaattgacaaccactcctgttaggaatacccacctcaaaggttgttgtaaggggtaggtgaaatgatgtgaaagaactgtgatatagggtttggcccagagatctctctctcacacacacacacacacagaatgaatgaatgaatgaatgaatccctgtgctacttataaggaagagccttgcctttttttgcacatggcaaaccattctctctctctctctctctctctttaataaaccttaaagatcattctacttctagtttaatttcttcctctttacatggaggaaaactgagattaggcataatttactgacttatctaaacaagtccacttttatgcattgtaggtttgagggatcgttggaaagatcttttgctcaaaaacattcctttcatccaactgccacaaagcctgaaatttcaccattagcattttagccatctttaaaaattgcactaacacttatcaagatatttctcaaagcccactctctttaagctagaaatgacccagggtcatcctgagaacctcaagcgctgggctggagggtggtaaaaaagagattctgaaagaagttgaaaggagacctgggacgtgccaaagacacatgcgtccaactttaaaactgtgtgactggctggctatgcattagattgtcccactggggcagttgtgcatttgtgctgttgcataatacagaaggacaaaaagcataaatactaactgatcacttcattcaaaagaacttcccaaaaggaagccagacccctttgatgctgccttatgcttaggcaaagctaaaagtcgtttttatactgttggtcaagggtttttcaactggatgcctggaaatgtttttcacagatctacaaagcatggatcatacaacaaagcctcaaaatatacaggggcaaaaatctagctgggattgtatccattcatatatacaagttggttccaccactgggttaatgctaactgctggagtccagcatctcttgtattagatatatctttatccgctgacagttgaattcgatccacctgcacattattttgaggacaggtgttgagagctaaccagttgctggtataggctagtctgtttcccccagaacacaatattgtcctgtgctgtgtaatggtgtttcggtcaatgacaggctgcatatatgacagtggtcccataagattataacggagatgaaaaattcatatcacctagtgacacggtagccattgtaatactgtagtgcaattactttattttttataaatttagcatggcctaagtctacagtgtttataaagtctctagtggtatacagtaatgtcctgggccttcaccttcactcaccactcactcactgactcacacagaacaaattccagtgctgcaagctccattcacagtaagtgccctatacaggtgtaccattctctactttttataccataattttactggaccttttctatatttacatatgtaaatgcttaccacggtgttacaattacctacagtattcagtgtgatacatgctataccggtttgtagcctaggagcaaaaggctattccatatagcttataccatctaggtgtgtgtaagtacactgtatgaggttggcacaatgatgaaatagcctctcagaacacatccccatccgtcaccaacacatgactgtaaaattcaacatccaatcatttgactgatttagtttagaagatcagaatctaaagaaattttttttaaacttctggaaaaacaggggttaaaattctggcacttttcttcaaacatcaatatttgtgacttattaattaccaatggatgatcaccaaacgaggaaggatcttcccatcagagtctaattagtttcattgtctttttttttttctggattccattgtatttcactctacccttcggctgcctgttttaattaatgttgcactacattcaaaggttttgcttttgtgcctctctgtttgatttaaattcctttttgcaaataaataaataaataaataactatcaaagctaatgaggctctgaagatttgagatgtaaatatcatatgcagattcttttttggtcccagctcagcggaagaccaaaaataacacttgaaagtttgattaagaaatctcaggctccccatctcatgcctccctccagacaatctttctgctggcattttcagttatttgacaaaaaaaaaaaatcaagccccccaaacccaaaacctcaagagcaagctcctttcaagactggctcagatgggcatggtattgtgctgagctgctatttaagatccagcccggactgactgattcctgtctgtcctgagagatctgtgcatgtcaatgcatccactcaccacacacacacacacacacacaccttcatatgcatccacagacacacaaaattattttcacacacaaactcatccatattcatacacgcataccctcatgcccactcaccaatgaaaactcgaaacacacatatttccacacatgcaaactcatccatgttcatacacacataccttcatatacactcaccaacacaaactcacaacacacattttcacacatgcaaactcatccatattcatacacacataccctcatacacactcaccaataaaaacttgcaacacagacattttcacacatgcaaactcacccatattcatacacacataccctcatacacagtcaccaacacaaactcacaacacacacattttcacactcatacgtgcgcgaactcacacactgatatacacatactcacccacatgtaagtagactcatacacattcctgcatgcattcacacacagtttccatatgcacacacattctcccacacacctgacacatacatcatgctttcgcagatcaagtttccagtttcacatctgtgtcacctccagtacattttcgtacacaccctcaaaagacatctctgcaagaaattccaagactccccacccccttcctggcccaccatcgtccttttgggtgtattcaggggcagcctggggcacagttattaaactgtatcccaaagagctcttccactatgcaatctgcttttgcctgagatctctgtatcctttactgagaaagtctgattcatttcccagaaatttttatctgctattaatctttcaggatatagttagtgttgtgatatattcagatattgtttttgggtggcagggggaggggagggcagatttcaagtggccgtcccctggcagtttcagagattactcagtgcttataagcagctcagaactgtgtgacagcatttccaagcaagggacttacaatcatgtttcattaattcgacgtgaatgaagcctcatttctggccttgaggagcttaagatgtatgtgaaattaataacagaacagatgtcttcacaatttggttcctctggaaaaaaaaaaaaaaaaggaacctgattactttgaaaatttcaatgctttaaaatgcagacccagggagtttttactccagggtaaagagttatgccttgatatcgtccacgtctcataactaagtggaatttaaatgtcaggtttatattaaatagtcatattccccatcatgacatataataaacaacagcttattactttcattaataagatgtgttggacatttaaactaaagctttggagataaagcctgtacctcctgagcaggaggtgctggggagacacaggggacacgtcggggaatattcaggcagcctggtttttagctttctgataatttaatcattgattcctcataggaaaacaaaatgcatctgtgctcacacagaactcaccactttataaagaagttgagccgtctcccacggatgtgtgtgccggaggccgaatgttgtgtttcacaggacacttgaagtcctgcctctttattatttcttcctgcctgaaatcttgtttctttatctaggcttctgtgacactaagtgcccctcaagctgaattttaactactcctcagggcgcaagtgtgactgcacaccaggggggctgggtttttatttctgaaagtccaaaggggaacagtgtaatggaaaaattacccaaagggaagttattctggaggagcaggaagagagagcaaaggcccccaggcacatggccaggagttccccttgccctgggtagacaagtgaatgaagctttcaggggaaagcagtgctaaatggggaagcccagggttcacgttaggtctcagaatctggtctactgtaatgaccataacaaccactgtaatgacccttctctctttccagggccactacgtgtccttgaaactgtcaacttccccactttcccccatggagaaaacaagagcattagaccaaatgacctgccagcttctcactttgacattctccatatcctctaaatttggcttccatgacatttattttactatgtctacctactcctctccacctccttcctctcacaactggactgggtgtggggtgccatggtacagtcacctctgctgattgccccagatacaaaggtcaaaagaagctcgcagggcaggaggtcttctctggtcccagctctccctagggatgtggcctggggtaagatgcatgctgtgggtgccaggcgtggtggctcaagatgcatggtgtgggcaccgggcgtggtggctcgtgactatagtcccagcactttgagaggccaaggtgggaagattgcatggagtttgagaccagcctgggcaacatagtgagactctgtctccacaaacaaaaagaaggcaggcatagtggcacatagctgtagtcccagctacctgggaggctgagctgggagaatcgcttgatcccaagaggtcgaggttgcagtgagctgtgattgtgccactgcactctagtctaggtgacaaagcaagagcctatttcaaaaaaagaaaaaaaaaagatacacggtgtgtttgaccctcggattttttatgtgaaaaggggtggaatgaccctcacccaggactgtcatgagaatgatatgagctggtgcacatgcgtttggtacagagcatagaagcataaaagctcctgttagtgttcacagctagggatctcaagcaatgtgcaggagagaggtatcccggggtgactgcacttttagaaactccctgggcactggtgttgaaggagcattgtctaagtcttccttattcttgactgatatgggggctgtgtgtgcacagcagtagagacccgggtcaggatgcggaaggcgggccccatccaagggagtgggggcagctcagtgtcaggcacttatcaccctgggtgtgtatcccagtggcgctacgtagcaatgccaggccttctccctcttcagggaaaccaggaatgtggaattttatgtgaaagcttctaagttttgagtagagatcactacaagtctgcacgccattccttgaaaccactggggtcagtggtatttcagtatttaaattttcagatttaaaaatattatacaatgagatcaccatttataacgtgacatctccaaggggggtctgggaaaacatgtcacagccaagcccattaataatttggcatcaaaataattatactcatgaagagtggtgagacatgggactcaacactttctctccttgtggggaccaggccaagcccccaccacactggcagagtcaaggcgactgtggctgaggccttgtgacccagtttcctgcagccagccccactcactcccaggagaatcatagaagccataaagctttgggattcctgaactgaaaaggccatgacaaccactgtgtaaaccccataaacactgcataaggtcaccacacagctccaagtgacagaatcccaagccaaataggcttaaatgaagaacagcaatagcaatcaagtttattaggttataggagagaaaagtacagaggtgtctgttcaggatcacctggatccaggtgctccaacaatggcccctggagtcagtttttatctctctgctccacgtttggctgtgttgcttccttactcacacagatacttacctcatggtagcaaaaaggctgccagaagctccagctccacatatttctgggattggtcccctgggaaacagcatctgttctgtccctagaacaaaagccatgggttatcgctagggctctgaaggggtcctttgcccatcctggagccaatcacagcagtctaggttccccgccggcctggaactaaggataggttccttctggcccattctacccagagttcagagccagagaaactgaatggaggcctgggtgggggcaaaaccgtaggtgtctattaccagggtgactcaggaaaccctttcatttcagcagagcagacaatgaaactaagagaggaggtgagatttggccagagtcacacagcagggtcactggcaaagtcaaggttgtgaccccgacatctcacggtttggaaatccctgcattgtaccacatgtgattagtggagcctgcttggaagccttcccccatttcctatgtctcctctccccccgagggggaagagatgaggaaaaccaatatgctaacaagcacacgcccccatgagcgtgcacgcgcgcgcatgcgcacacgcacacacaagcacataagccttatgagcaaaaagatcacagcactctattagcaagcttgtgccagagtaaccacaatttatcttttcttctcttatacatccctcatctctggagaggtctctactgagtccagcacagagttagcacccaataaatgtcgccattattattgttgtaattattatttctcatactatgaattactctcttccacactctccttggcctaatctgttaatttaccttgaggtgcaaatgattaagcagagtgagtatgaatggccaagcagaaggaccaagggagttggcatttttaataagagccagagcctgaattcagcaaaaggcataaaaccctcataattattaacgtgcatagctctttccagtttgcagactggtttctcattcacctcatttgatttttaaaaaacaaaaaacaaaaccggaaaacaaccctgtgagtgagattagaagggaatcatctccaaccacagataagaaagccaagcactcccgaaaaaacatttagctaaggttttccaggttttcctgggagatctgggatagaactggagtcctagtttagaagcattttactaaatgtacatgtgtatgcatgcatgcacataagcatccacacacactcatactgttagaaatacaggcctggagtggtgactcatgcctgtaatcccagcactttgggaggccaaggtaggaggatcacttgaggctaggagttcaaaaccagcctgggaagaatagcaagaccttgtctctactaaaaataaaaataattagctgggcgtggtggcgcacatctagagttccagctacttgggaggctgaggtgggaggatcacttgagtccaggagctggaagctgcaatgagccgtgattgcaccattgcactccaacctgggcaacagggcatccatgtctcaaaaagaaaagaagaaaagaagggaaaagaaaaaagaaaagaagaaaagaagggaaaagaaaaaagaaaagaaagaaagaaaggaaaaagaaagagagaaagaaatgaaagaaagaaaggaaggaaggaaggaaagagaaaaaaagaaagaaagaaaataaaagaaggaaggaaagaaagaaagaaagaaaaaaagaaggaaagaaaagaaagaaggaaggaaggacagaaagaaagaaagaaagaaagaaagaaagaaagaaagaaagaaagaaagaaagaaagaaaggagggagggagggagggaaggaaggaaaagaaagaaagaaaaaaaggaaggaaggagggagggagggagggaggaaggaaggaaggaaggaaagaaggaaggaaggaaggaaggagagatattgcaatacaaataaacaatgtatttaaaagctcaccaagtcatgaacactcatagggccttacttacattacccatgccctgatttaactttgcataacagtattaaaagctccttgggccacagcaaggccaccacattgacctcttttcctacctcccacttttatttatctcaattatgatgaagactcttttccctttgctaacaagaactctattcaattcaatgaacatttactgatctcctagaaggtaattagtatctccattttactgacaaggaaacagagattcagaaagagtttaagtaacatgtctaaagttgtacagctagacctaaccatttcctcctgtcgtcgtctggcccaggtgacctgtcatttgattctacccaatttctctctttctgaaaccaggaagcatgggtgttcaggtcctaatcatgaaaaaagtgggaagaaagtggtttttcctggcctccacttcaggccaagtcaggtgcattcattcacttgacaatatttactgagttcctactatgtgttagttctcttagccttgaggttttgaagggtttgcagggtagaagagaaaagagagagaacagtcctttttaattaaagtataattgattccataaatgtttgttcttgggctaaagcctatattggcaaacaccaatggaaaaataagttcaagaatcaaaccagcagtattgtatacatatctcatctacatctatatctatatatatttatgcataatattctattttagtaggtaatacatacatgtggtggaaaattttaagttgcaaagtctctttcacataccagccacccagtttcaccccttagagacaatgacttgtttctcatgagtctatctagagaaagtgaagcatgtactattgagtctgcttatttctccagaaccttttcaaaaaatatactgtcaaactttgtgatatttgccaatctggccaatgaaaaatagtacaattgacccatgaacaacatgggggttggattgccaactcccatcacggtccaaaatctatgtgtaactttggtctcccccaaaacttaactacaaataacctactgtggaccttaccaataacattaacagctgacacatattttgtatgttatatgtatcatatagtacaatcttactataatgtaagctagagaaaagaaaatcattaagaaaagaaaatgtatttactattcattaagtggaagtgtctgccttttaggcaagcacagttcatgtaacatttttttttttaattttgagatggagtcttgctctgtcacccaggctgaagtgcagtggtgtgatctcagttcactgcaacttctgcctccagggttcaagcgattctcctacctcagcctcccaagtagctggaattacaggcacccgccatcatgcctggctaatttttgtatttttagtagataaggggtttcatcatgttggccaggctggtctcgaactcctaacctcaggtgatctgcccacgtcggcctctgaaagtgctgggattacaggcatgagccacccgctcctggcctttatgtaaatttttcaaaaaaaatcttcgtgtaagtggacccgtgcagttcaaatccgtgttgttcaagggtcaactgaatttcattttccttgagtggcttgctcatattctcagcacatttttctgttcagtcatttaactttttcttattgatttatagaaattctttatgcattcagaaaatttgttattgtaagatgggagctgcaaatatttttccacatttattttgctttactttaatgtttgcttttttgttatgcagccttataaagattttcttgtaggcaaattgatcaatgttttcttttatggtttctgatgattcagtcatattttgaaaaatcttaccaattctgagattattttaaagtttctctatattttcttcaattcttttatgttttagtgtatgtataaaaacattgattcatctggaatttatttttgtataagttgtgaggtagggatccaactttatattttttccagatgagtacccacttattccaaatatttattaaaagatgtattaaatgagccttctttaccctagtttttgaagttcccaaactttaatagcagctgttatttcagtattcttcacttatttcatcgctggaaggttatataatgatctcgaactgataataccactcacaatgcttgtggaagccattttgcacaaagtttagatgatatagataaaactactttgatgaagaacaagggcagtaagtacacaccaaccaaagagctacatccaattgatgttataaataaaaaacatggtgggaatacttcacattatgcaactctgattgtgtttaggtttcagccaccaagagaaaaaaatatttaaataccaaaacggggtatgaaagtgcattgctctgtaagcaaaaatttgtcacacgaaagttgaggagggtcttatgtgaaatgcaattcctagtacacgtcaactcatccctagctaggacagcttccagaacgtgctgctaaacttgaggttgtgaccctgcagccatgacactcaaccgcccctcaaccagagctcacctcattgctctacagcaacagttttaactactggagcctgcctggagcttgaggtgatcctcggacctgcctcccaccagggaaggcctaagtgctctttaatcttcttagagcaaaatccactgagcaaaattataatttgatatggctgcacttaaccaatagaaactcataaaccatcttaacatcataatgcattgtgaaaaagaattgctaagtaccatgaaacatatgagaaccccaggcttccattcatctctagctttatgctagggcagcatattaaagtgatttcaacttcagagcagagctccccaaagagtgctccagtcttaattaaaatgtcaatgaaatacaaaagtgcataagggacactttccgaaatcattcctttttagcttctggatggccggctcatcctttcctcaagtctgcctgcatgcctactcaacacaagcacccaaactacctttctttactgccatgagggagcccttacttagactttgcggctttttgttgttgttgttgttgttgtttttgagacggagtcccactctattgcccaggctggggcgcagtggtgtagtcttggctcactgcaacctctgactcccaggttcaagcaattctcttgcctcagcctcccgagaagctgggattacagatgcctgccaccacgcccagctaattttttttattatttatttatttattttgtatatttagtagagatggggtttcgccatgttggccaggctggtctcaaactcctgacctcaggtgatccacccaccttggcctcctaaagtgctgggattataggcgtgagccaccgcacccagctgcctagaccttttaccattcccatgggagactggagcgaggtgggctgcagagtcttctctgcatcttaagttaaggcattggttaacgtcgcctgggtgcgcaacccagaactgcagaatgccggatgaaggggaagattagggcaaagtaagaaaacaccagcctcagactggctggtgcagcatcagcaaactgaagggaacgagagtgacaaaagattttctttaagttaagagttgataatgcagatacctatggggctgaccaagtgatgtagctgaggatattggggaggtgtggggacagtagggaatggtagggactgtggtgaaccagaaatcattctcccttcaaaaggagcagctgctattcagcttcaagatcgttttcatgtggagtgcaaacctggtgttactatgtcttttgatttttttttttttcaagaaaagccagagccagctgtggtagcacttacctgtaattctagctacttgggaagttgaggcaggaagattgagcccaggaggttgtggtcagtctaagcaacgtagcataaccctgtctcttaaaaaaaaaaaaaaaagaataaaagccataaatctgcacttttaagatgtgaaatctcctgattttgtactggctactaattatttgaaacctttgtgagggtcaactgtattatacacacacaaaatatatgtggacaaactccggccttcaatcctgggagggggctgttaggcctcagctttgtaccttttcttaattttagtatccattcatccatccctccatccatccctttatccatccatccatccattcatatatccatccattcatccatccatttatgtattcatccatccattcatttatccatccatccattcactcatctatccatccatccattcattcatccatccatgcattcatccatccatctattcatttgttcattcacctattcatctatttatacgtccatctctgcatctatttatctactgaatatttattagtgccttcaggtgtaagataatgagatagaaatgggaatgagtccaaccccaaatccaatctcatctccagccttatcctggtcctattcttgactttggagagggagacagccaggtatacgttttaaataatattgtgtgcatacttttacaggccagagattaaaagtcaatgctggctgggccccaaggctcatgcctgtaatcccagcactttgggaggctgaggtgggaagattgcttgaggccaggagtttgagaccaacctgagcaacatagcaagaccctgtctcaacaaaaaaaataaaaataaaaaagtcagttgtgtatagtggtgcatgtctgtagccccacctacatgggaggctgaggagggaggattgcttgaacccaggaggtcaaggctgcagtgagctatgatggcgccactgcactccagcctaggtggcagatgagatgtctctaaaaataatagaaaactaaaaattttaaaagtcaatgtccttagacctgtcttggcctctcagttgtgtgtgaccttgagcgaatgcctttccatctttaggcttctccttttccatagcacaaaccagagaaacatttatgagactttaagttggcacagtggtgatttctgctcagtccttgatctcatctcaggcccaaggccaatgctgatctttgtgctgacatcacctctgtttagagagcttgtcttaataggcttctcctgcttgaatctgcccatgacttcctccttgtgccctgcctggaccatagccacaagaaatgcttccataattgctgagattgcagcatttcgagtctttaacaatggagagcctaggaaagtggcatccatcaccacctcagagagtagtgactgcctgggctacagccagagagctattgccaagtgagggacttcctcctctgtcccctggcagtcctaaccctgtccttatgcatggtgggggcacgtacttttctttctttcttttttttttttttttgagacagagtctcgctctgtcgcccaggctggagtgcagtggtgcgatctcggctcacagcaagctctgcctcccggattcacgccattctcctgcctcagcctcccaagtagctgggactacaggggcccgccacaatgcctggctaattttttgtatttttttagtagagacaaggtttcaccatgttagccaggatggtcttgatctcctgaacttgtgatccgcccgccttggccccccaaagtgctgggattacaggggaggcacgtacttttaataacgcggggaaggcaggccctgcctcacaggtggtggcccttcttgctgttgatgtgaggtccctgggaagatgccagccataatcatccaccacctgatgccacagacagcttgtgagggcagtgccccttgactcccacttctgcatccctggtacctttcacagagatggcacatagcagggcaacgttggtagattaactgactcactggggaaagaatcgtttcactgatggagaattcaggagccagaaaggagaagaaacttgcctaaggcctgttcctctcttctccctctcactgtcttcatacacaccacgtgcgcgcacacacacacacatacacgcacacatccagataccagacaggcacatacagtcacacagacgctcacacagagatactcagttcccagacagacacagtcacatgcagacactcacacttacacataaacactcagataccagacagacacacacactcacactcagacactcacattcacacataaacactcagataccagacagacacacacactcacacagggacactcacacactcacacactcagaatggaaacatacacacatgcacggactgctatagtctaaatgtcagtattccccaaaattcccatgttgaaatcttaactcccaaggtgatggtgttaggaggcaaggcctttgggtggtgactgggtcatgaggtaggagctcttgtgaatggaatcagtgccctcataaaagaggccagagagagacctcttgtctcttcaactacataaggacatagctggaagtcactgtctgttaaccagaaagggatcccccaccagacactgaatctgctggtgccatgatcttggacttcccagcctccagaactgtgagcaataaattctgttattttaagtaacccagtatatgaaatgttgttatggcagcccaaatggactaagacacaggcacacatacacagacagacatacacagacagacacatagacacacccctagagatacatgcttacacactcagacacacatatgtacagaccacatacacatagatacatgtatacataaacacatgcacacaaacgtgtatatacacaggcacataaagacacacatatagacacacactgtcacacacacatacacatatagaccttctctaatcttttccctgccttttgctcctggaagccactcctgtatcaacagcaattcacccagtcctcttgctcaaactcattgtcccaagtgcagaggtgccctctctcttacacctctgtcaaagttacacacgttgtcaggttcatgctaaatatttgacttctcattcaagttgcccctctcaggaaaaccttacccttgaaacagaggtcttcctcctgggccttaggaaaaagaatcaacctggaaggacatttccactggtggggagagatttcctcatcattcttcaaatccagtcttcaggaagcatttaattctcttgagacatgagtagggaacacaccaattcatggctttggccagccttgaccttgagctggataaaacatttttgtccagagttgtaaaaatgcaatgtagcttttttgatgaaaagcttaagatgggccaggcacggtggctcacgcctgttatcccagcactttgggaggccgaggtgggtggatcacctgaggtcaggggttcaaaccagcctggacaacattgtgaaaccctgtctctaccaaaaattagccaggcatggtggcgcccgcctgtaatccagctacttgggaggctgagtcaggagaatcacttgaacccaggaggcagaggttgcagtgagccaagatcgcaccactgcactccagcctggatgacagtactagactctgcctcaaaaaaaaaaaaaaaaaacaaaaaaaaacgctgaagatggtgctgttagaccatgaatgcccactttctctgtgcctatttctcagggttttcatttttccttatctgcttatcttttcctttgtgtcttagctcatgaatccgtatatgtctcctgcacacggttgctggtttggagccttttggggtctgttttctgatcatccatccagcaagagacctttactcaactgctgttcaaaatttatgacactgtgtcatctccagcagacaatttggccataatttaacatttgtgtcctttcaaataactcaaatgcttttttttcattgtcctagatgccctatttgggaggcagggatgggaaagacatgcctgggtttgctttggctttgtttgagccagttgctgagaagtagtatatattttgttcagctcatctgtctttccagcttttgatcaatagcagagtatgtgttttttatccaaaaactaaccaaatgtattcaacagattatacattaattttaccatcatgacatcgtatgaacagataatccacaaaaaagctccatatttcctaaaagtgaatttaattataagtagtaatgtgtgctggagaattataattatgaaaagtcatgttctgtaagtctgaaatgacagattatatttcaaaggcttattgcagaggaattaaaggacccaatttattagttgtaaatgtatgattattgcagctttgctttacacacacacacacatgcaatcacagtatattctagctggatttaatacttataatcctttcgacaagaactgtattttgcaccaaaagctgccactccattaatttgtttgtgagacagagacaggcaactaatctttgccttttgattcctgaatagcaataatttcaagtactttgtgggcatgttttgtgccccttactcccatccccacaaagtgattaagaagttgacatggattgaagaacagaaatattattgcccaaaaagaaacagagagggtctcatgaaggctgggaggtgctgaggctgcaaaggacttgggcctgggctatttgttcatacaacgaatatttattgaacgtctgctatgttctaggcaccatactaagtatattctacctgctacctcaattgagcctctcagaacaacactcgaaggtagatatattgtaaacttatttcacagatggggaaactgaggctcaaagaaatcatcaactaacctgcccagggtaaccgagttcaagagtggtggaggcaagacgtgaatgcaggtgtgttggtgaaaacacacacttcagggcagtctggcacatctacagccgcatcaggtggagtaagagggctgtgtttataacactctcaaagacagagctggggaaggaggagtcaattgtgctgggtcaagatgtgaaggatggcatcaagggaagcccaaaaggatagagtgagacattgtagacacaacattgagccacaccctgaaggagaagaaagtttctccaggcacagaaagagtattcctggcagaaggaacaggttgcaaagtagacaggttcagaagaacataaagaaaaagggccttgtgtttgcaaaggtgtgacaaggactaagggtgtaagggagagctgaggagagggacaaaaggcagaggcaggaggtaagcctggaatagtccatggcaaaaagcctttactgccaagctaaggagtttagttttctcctgtagacaatggggagccagttcatgagcatgagttggttgtattggaggacgagatggtcaactcacttgcctacagggccaagtaggtaagagatatgaaagacagacctagtgagattgggttcaggcctgtaatcccagtactttgggaggccgaggcaggtagatcacctgaggtcgggagttcaagagcagcctgagcaacatggagaaaccccgcctctactaaaaatataaaattagccagttgtggtggcacatgcctataatctcagctactcagggggctgaggcaggagaatcgcttgaacccgggaggcagaagttgtggtgagccaagatcgcgacattatactccagcctaggcaaaaaaagtgaaactccatctcaaaaaaaaaaaaaaaaaaaacagaaacagcacatcctaacagtaaccatcctgaaagggtggttcctattttgtttcagtttactgtggatactgggaatttgctaagaaaggctagaaatactagtgacttggtagactgatggcaaaaatagccccaatcttccacgtcttcaaactttttataagtgactttgtaccctctcccattgcaagctagagtctatttccccacccgttgaatctgctgtgactcactgagtgtgtcagaagcaaagttgtgtctgttctgagcctaggcttcaagtggccttgcacatttccatcctctgccttggaagccgcctccaccgtgaagacaagcccaggctgcactgctggggaccagagcccacacagagcagagccacgccatcccatgggctgcatagacccgcccagctcggctgacccatcagctctgcagatgaaagagagcccagcctagatcagctaagcctggatcagcagaaccacccagccagcctgtagactaattttaaaaaaatgtatgaaaccattatgctttggagtggtttgttaggcagcaacagctaacggatatagcaactaattcatgttttaaaaagcagctcaggccgggcaccgtggctcacacctgcaatcccagcactttgggaggccaaggcagatggatcacttgaggccaggagtttgagatcagtctggccaacatggtgaacctctgtctctactaaaacatcaaaaattagctgggtgtggtggcacacacctgcaatcccagatactcaagagtctgaggcaggagaatcacttgaacccgggaagcagaggttgcagtgagccgagattacaccactgcactccagcctggcaatacagcgagactcagtctcaaaaaaaaaaaaaaaaaaaaaaagcagctctatgtgactccctccctccccctacaaaaaaatagagggttcagagactcagtcaacagcatttctggttcaacaagcatcaaaactagctgagttctaggtcactggggtggggcagaggagaggtctaaggacatttcacaccctgacaccagtctgtccttttcttgggggttatttccaaccacagactcctttgcagcctcagaatccccgaaagcagctctcccaggccccacccagcttccctcctgcagtgcttatgcccagttcatgcaccagtctccaatccagccatctcctctcacccctggccctcagcttcatttgcctgggcctgtgacacccaaggtcttggaaccctattaggttggtgcaaaggtaattgtggttttaccattgagtaaaaccacatttacttttgcaccaatgtaatagatgctgaaaaaacggccttgtttgggagctcaggaaagcagctggctgaattcagagagacaggactgactgggatccccacaatcctcactctcctggggaatggcccctccgaaaagcaccctgcagcccccgggctgatttcattgggatatgcaggaagccaaccgctcctgctcacaacaactactcagcactgactgtgtttcagacaccatcctcagcatcagatgagcaaaatctaacactctcagatgccatctgaggtgggcttactgaatatcacccttggaaagatgtggaattgtaaaagaagaaaaaaggacctccctttgctagagtgggatcttatttccggcagccaaagaggccagggctgaaaaacgcccaaatggcctctgaagcaaaatctcacgatgaaacaagcctcaaaaagcatttactagcatttctggtcatggctgttacggatgaaatggtgcctcaccttctgcaccccctctggcccccacaccttctatgttcctatctcagggattctccacagggacctggaaggacagctgagtggaccgagagatcacacggagccactgtgaggggtcaggggatagggagagtgagctgcccagggtggctgcagagaggggagcttggggaacagagaccgcagggagaaagagctgagtgcagcctgagcccgtgattttcaagccccgccgctggcctcctagggttcttgtaatcatactccgactcccttctccttagttagtctaagggggcttctgtttcttgctcccaactgctgcctcactaagatagactcattttcagatctctctacggattgtagcctttcctgcaattcctgcctggatggctgctcctccaggcctggactggatggaaggttccaagcgagaacctgcagcatttctgcttctgcggcatcatccacctctgagaaccactccagaggacaagctgaggagccttccaagagctccatgtgtctgtaaatgccttcaaaacctggtctcagtgcatcctttttgcacccacagccagatagctgaccacacaacatcaggatagagtggtcaccacccattttctgtcatgggaaaggaaattgcccgggaaaggccttgcccagtgcagacatggcaggcaatgctgagagctacaaaatccttctagaagctgttgtctttcagttattaagactataagggctgggcatggtggctcacacctgtaatcccagcactttgggaggctgaggtgggtggatcacaaggtcaggagtttgagaccagcctggccaacatggcaaaaccctgtctctgctaaaaatacaaaaaaaaaaaaaatgcgcatgcctgtaatcccagttacttgggagactgaggcaggagaatcgcttgaacctgggaggtggaggttgcagtgagccgagatcacgccactgcactccagactggatgacaaagcaagactccatcacggaaaaaaaaaaaaaaaaaaagaaggcaggctgcctagcttagctttgccatgactaatctacttaccagctaagcaacatttgtgcaagctatttcacctctgtgtgcctcagtttcttcatctataaaatagagataatcattttacacccctcaataaatgtcttttgaatcaattaatgaatacttgtaaaacacctggcatattgtaagcccttgttaaatgtaaactttaaatgttaaatggtttctttctttctttctttctttctttctttctttctttctttctttctttcttttcctgtttctgttctctctctctctctttccctctttctctctttctctcttggaaggtctcactctgttgcccaggctggagagcagtagtgcaatcatggctcactgcctacaaccccaccgtaagtccctctgggattccatgatagaggtacttattccaattagggtcaagctggaggaagaggcggctgtggcctagctgtcaattcctcagggctggtcattggggaggaagggcaggaaccagctgagttcactgagagttggaacaggagacgcagaaaggtacagatttggaaactgacctgggtatcacagttagggctccagggcactccagcctgcggtgggagtttgtaggtgtctaagctgtggctgggagggcagtggaagaaagtcaagctgtgccaattttcctatttgaagagaaagggagcaggggaaccagagttctaggtgacaccatcgggaagacaagctgtgtcctcagcccggcctggggggaggactgggttgcaacttacaggaaagaggattgactggattcttagaaaaacaagagccaaggcttgttgctgtgcagagggattggggtcaccagctggctgttgttaccgtgactgattcctgatgcttcggaattcaagggcaggaggcacttggggcactggctgaaccttggctccctgacccctcctcagtccccttcctgggctccacaacatataagatgaacgttctgattgtctatttctcctcccttctcgttttactcttcatttggtggagtgtatggtagggataaaatcttagagatgtttatctgagccatagagagaccttattgggggtgcatgggaaatacacaagtaatcccaagctcaccttgcctgggtgcctgcggagggcaattgtgcattagcggtagagtgtggtggggacctgggcctgggtgggcaggggagagcttctggacaggggctggtggattaaggtcatgcccataggtgggaagccacccacacagaatcacagcatctcagaagggcagtgccagaaaaatccccagggacctcattttccttggaacacaacccaattccttggcttggccaaccaggcctagcgcatctgggcccaacttcatctgccttcattcctccactgcatcagtagggtcatttgggtgtaggccacagaagtaaactctggcaacataagcgaagggggatttgttagaataggataagggagccaggcaactggagcagacatcaaggtgggaacaccaggcctcagggtcccgcagttgctgtgcctgggctgccattgttccatctgtatctatgtcacgcgaggtcatatgagtgggccgggcacggtggctcacgtctgtcatcccagcactttcaggtggatcacctgaggtcaggagttcgagaccagcctggccaacatggtgaaaccctgtctctaccaaaaatataaaaatttgccaagcctggtggtgggcatctgtaatcccagctactcaggaggctgaggcaagctaattgcttcaacccaggaggcagaggttgcagtgagtcgaggtcatgccattgcactccagcctgggtgacaagagtgaaactctgtctcaaaaaaaaaaaaaaaaaaaaaaaaccatatgagtgtcccattggctcagcctagattacagccccaccctggcagggtagtaggaggaaggcttagaactgtcttggcttctgaagagggcaggacagtaacccaatccaccttcccagaaacactgtcctcagtggggaggagggacaactcccaaggagatggggacacatgctcgccaaccaaacccacaaaagctcattgtgcctgtcgctctgctccagccacagtggccttcttctgttcttcaaatacaaaaaagcttgttcccaccccagggcctttgcacttgccatctgctctacctggaacactcttccccttgttctgcatgtgactgcttcattttcctccttcaggactcacacctaacaagggcctccaagaggccctccctgacgacccattctcaagttgccctcatcagataatcttgacctcatccctcccaggtctcctagccatctaaaattaccttgtgtatgagtctgtttgctctgtattgcctgtctccccactggaatgcaaacgccacaagagcaatgactgcggttaattgctgctatatatccagcactcagcacagggcttaataagcatttaccaggcaaataaacatatagagacagagagccccagagggacggtgctttggccgaggatgcccagagaaaatactgatgtcattgagggtgcagaagccaaatcttgcttgctccgggggcactggatggcaccagcctaagagtgtgggcaccagagcagattgcctgggtcaacactcactctctgtgtaaccttgagtgagtttcttaacttctctgtgccttggtatcctcatgcataaagagatgaccataataataatgcattctcaggggctgtggcaaggatcacatgaactaatacatgtaaagtacttagaacagggcctaacaatattgtaacactgtcaacaagtgcaagctattatgattggaagacttccatgtccttatttctgattgacaggtcactgcccagccccaccctcgacccaaccaggatgaagaatgggcaagccagatagctacagtaatcgacagacagacaaacaagagcatcgtatgacccaggggccaacaagtcccaccccagtgacaccatctcacttttgcagagctcttgctcgcaaagtgcagctaggagaacccaggcctcctgatgacaaatgctccttctttctgccccccacgtgccaagagcgaggagggaagatagctgctggctcactgtgtggtcgtgggtgagtacatgttactctctgggtccccatttcctcaactttaaattgcaaacaagaacctcagcctgtcccgtctccctcttaagaggataagtagtgccaataaatagtaaatgagctttctgagacgtaaagtggatgctgattttattaccaaacaggtgaggagcaggtgcaaataattcagcagaagtatttgtacggtcatgattctcaaaattttccagagttaagaatcgcacgggaatcttgtttaaaatataaattctgtggatgcattcccccaaattctgattatgtagctctaagatggagtcccagaattttttaaaaaacctcatcctcaggcgatgctgaggctgaagctaatggaccgtgattgtgcattaaagccactagatggtgccatgagcccagagaatgggctgatctaggccgctctgagccctgaggctgcttctccaaaagtggccaccagatggcgcagcctatctgcagaaggaagcgcgccttagaaatgtgggatcggggctggagtcaccccgccttagcgaacctgtggtctgagagaacagatccttccctgcccaggtaattctaagcccaaggaggagctcggcggccaaggaggcccagttctattgtagggtaatgagcatccaaccccatcctcatcagagcgtcattggccaatggtctgggcgcctcctcccagcacaaaaaccttgcactcagtaagtactcaccaaagacttttgatcttttgatttggacagatacacacacacacacacacgcatatataaacatacatacacacacacgtatacacatacacacatatatatccacacgcacacatacacacacatataaacatacacacaaacacacacgtgcatatatacacacatatctacatacacacatatatacacacgtgtacacatacacatacacacacatccatgcacacatatatacacatacatactcatacaacacacacatatacacatatatacacacacacacacctgtacacgcacacatacacatacacacaggcctgcttggtgaacactgtagggaacacattattataaagataatgatcaattactagatatctactgcatgcattccaggcactgtaaacaccaacaaattcttgccacagccctgagagagagttgctacaattattggacaaataaagggagtgaggctctatgaggttgtcacctggggtcacatgatctggaagccatattcagtacccaaacatggctgcagatgaagggctcggaatcaaggaggacttcctggaggcaaggagttttgagctgcctttgaaagtagggtagagttgcagatgggtcaaagggagggcatttggagaacatccctaaactagggggaaccagtgagctgagggcagtggagggtcagagggatgttggctgcagggatgccacaaagaggcacgagacagcagagtggggagctgggcagagagagaacccagccgtggaaaaggtagcagcagctgcagaagaaagaatcaacgattcgggttccagtactgtgcttacttgctgtgtgtccttggtcaaattccttaacttctctgggctcacttttcccatcatagtcatagcctagtcacccctggatttactgggaggactgagtacaacaacctgtgtgaaaatgcctggcacagttcctggctcaaagtgagcccaggggatttctgtttgtcctccctttgttgtgtggcccaggcaaatactttcctgtgcctcagtttccccatctctccgggaagtctatgtaatgtggtggttaggtggaaaggctatggcattagagaaccccaaggcatatcctgatgctgatattaagtgtgcggccacgagtaagtcatcctctctgtgcctcagcttcctcaactattaaacaggttgctaaccatgccacccgtttcaaagaaataccctggaaattaacatccataaaagacctaccacagtgcctgacatgcagtcagtgctcagtctctctcccagcattggctgtcattaaacagggaaattgaattggatcatctctgggaattgtgcagatctgatatgctggtcttcagtttgcagcccctaactgcccaaggaccccacttctggctatgccccgatctgggcctctcctttctccgaccatttgtggtcttcgattctacaggaaggcaggcctggaaaggctaccagtaacaaatgtgtggctaccatgttccctttcctctggaaaagtattgtccccaaccccaccccacctaagggacagtgccttaacccaaaggaacaagtgtccatgaggaacccatggtgctatgggggattttcacaggatggactgcctaggaggcccagactttgagacaaagagtaagcagaagatttatcaggaagtgttctcggggtcaccaccctcagaaggggaaggaaggaagtggaatggggcaggtagagaaggtgggctgctgtgcagtctccacaaaggcctcatcccacctcacagggaagctctagaactgaacggcacttcagaagtgttctaaattgggctgggcgcggtggctcacacctgtaatcccagcattttgagagaccaacgcgggtggatcgcttgaggtcaggagttcgagactccccaggccaacatggtgaaaccctctctctactaaaaatacaaaaattagccaggcatgttagcaaacacctgtaatcccagctactcaggagcctgagacaggagaatcacttaaacctgggaggcagaggttgtagtgagctgagatcacgactgcactccagcctgggtgacagagtgagactctgtcttaaaaaaaaaaaaaaaagaaaaaagaaaaaaaggaagtgttccaaattgggaaaaggagggagtggagcctttctaattgggcaccaaccaaccttggatgccttgctccaggaaaagacgtgaccttcagggaggctggtcccttctgccagggcagcatcatactagcagctggacataggtcctccaatcagaggcagatctgggtgggtagcgtcctctctgcagcctcccccagtagaggagcccaagctggtctgagcacattcccgtacagcacagggagttcgctgcttggtttccaactagctccccataacctgggcttcccagggttgctcaaacagcagcaggaatgtggccccttcctcactgatgtcctggtgctccatgggggccagatctctactctgatctcttccaccccatggtgcccagggaaaacccaacccccagaagcacaggaaatggcaaggtcactgcctggcttagtgacctgcagacagacagactcacaccaggacctatggcaattcactagccttatccactgaagactccttccctgggggatgagtcctgctggggagaagcttagtggtggcctttccaaggttacacttctattgcccaggagcttttaggtacaaataatagaaacgttactgaaattggactaagtataaaaagggctcactagactgaaaaatccaagactagattggtttcaggtatagctggatccaggatctcaaacagcatcacaaggccatgtcttctgttcccctgctcctctctgaggagccccttgccccagacagacacgttcaacagtctcctatgcccattcctgaagttagcatcatgtccctgagggatcaagtctcccaccgacctggggcacatggctggtagggacacctgctttcttgaggacagcctagtctgctgtgagcagaacagagagtgggggtgagcaggcacaagcaacagctgccccagcgccacatcctaaccagtcctgaccatcccagccagaggccacacatttggacaaaaccaaagtaagaggctgtggctaagaacacagcagggagagatggggaagtgggccggggcagagtcttggaggacacagtgactcagggattcagagaccccacgttgggtggtggagagaaaattggatgggggaagcaatgagcaaggtgggggtggcaaggaaggaagccaactgcccgcttatccttcccatcccagccagaatcttcaagctgtcttaagatcctggagtccacccatgagtccacgctaggccaaagagggtctcaccagtcctctgtcttgctaaggtccctcagggaagtgggcctaccttatgaaccctttaaatcctcattctttttatttgctgttgggaagtcccacctagagcctaccctaaatttctcctgctgttggttacaaataaacaattctaccttcagactgccaagtctaaagtggtctatccttaccttacctccacatggcagaaagggaagctctaggatggaacctgtgcctttataagacaagaaaatccctagagttttgagtcagcaaaatgactcctgagcagcccagggcagagcccccagtgctctgtttagcctttccttctaccctggggaccaccccaccatacccaactccagttaccgggcctgcctttccatctccccatatctagggaagtatcattcatttcttcaaccatgtatttattgaacagatgtatattgagcacccactatgtgcaaaaccctgttctaagtactggagatgcagctgacattcaagggcaggagtcaattttaaaaagtcagaaattaaagtaacaagattgtttcaagacagcagtagctgccagaaatgaaataacacaggagtgactggttttaggggatggtcagtcaaggaaggctttgctgaggaggtggcactggagctgagaccttaaagatgagaagctttgcagttcaagggaacattgaatgcaaaatccagtggggacagatgtgttagttgcgtcctccaggaatcagagtctgagatgaagctataagtttgggggactaagaaaaaaaagggggaatgaagcatatttgaaaagagagaatctcagacctccacacagctctgaaaagtatcaacccacccaatggggagctctggagaaaggatagagtcccacatttaggcagatacaccaggctctagccccctgccgtgcttaaccattagctggggcttgactgaaaggaggatggcttaggcttaaaggctgaggctgtcatttcactgcattctgctgctgaatggcaagttctttctttttcttttcttttctttttttttttttgagacaggatcttgttctgtctcccagggtggagttcagtggcgcaatcttggctcactgcaacctccacctccggggttcaagcaatcctcccacctcagcctcctgagtagctgggactacaggcatgcaccaccactcctggctaatttttaatggagatagggtttcaccatgttggttaggctggtctcgaactcctcacctcaagtgatccacatgcctcggcctctcaaagtgttgggattacaggcgagagcgactgagcccggtctgcaagttctttcttaaaagaagacccgagcagccacctttatggccctcaccacagggttgctatctttcaggaatagagagaaggctagtgtggcccaagctgaaagatcaagggaaagaatgcaaagatagaagccagagctgggccctcctctttgcctccccaggtggctctgcacctcccaccctcagactgcattgcccagctcctgtgctccctgggatggactgggttctgccaatgggaagcctggcaaaagatcagaaggagagaggagaataaagtcagtgtgtttatttccggattcctcctgggaggttgcctggggctggctgcttcattcatggcctctgctgtgtgcaattttccctccttttgggttccaggaactgctccctctggtcagccctctgggcctggtgcttctggcccaggtccctgcgtgccaccccttggcttcccttataccctacccctgtgctttggaattaatccatcatcagtaagctctcctcgaattatccttatccgggagggccatctgctccctcctgggatcccgattgctgcagagaggtcacagcagggtgtggagggttctgcaggctgtggcaaggagttgtggttttatttaagagtaagtcaaagttggcaaagggttttaagaacagtaaccaggacttctgagcctctggagcttggaatccatgagcctggtgttgaggagcccagcagagaacctaaatcttctgggatgtcttggccctggggaacgccctgcctctgctccttaagggctgtgtgttccagcccacttttgggcccttgaatgcttctcagatgtacctgggacctgtgacaaaaccaaggagggcagggacctcgggtagagggtctctgtagccttcatgctctttctggcctttccttctaccctggggaccaccccaccagccctaactctgtttactgagcctgcccttccatctgctcatatgtatggaagaatcattcatttcttcaaccatttatttgttcaacagatatttattgagtacctactatgtgcaaaaccccgttctaagtactggaaacacaactgacattctagttcagaagtcaataaagaagtcagaaataaaagttacaagattgtttcaagacagcagtagcttccagaaatgaaataacacagaggtgactcattttaggggatgactagtcaagcaaggcttcactgaggaggcagcactggagctgagaccttaaagatgagaagctttgcagtttcttatctttaagatgggaggtttctcggctaagaggtttctcagctaaagtctttcactgtttcagtcaagactttcaggttgcaagtgacagaaactcaacccaggcagctttaagcaaaaaacaaaacaaaactcaaagttgagaggaggagatttattggctcacaaactaaaaagtgaaggatacttctggctacaggcagggctgggtccagggtttccactgattttttggctctgttcccattggtgaagcttcaacctcgggaagcctctatctaaccttaaaggtagctccacgcttaggtcagaccaacttcatttacaggtgaaagtgtaggtgcatcccaaatagaggcataactcctagaggttgcaagttcaattccaggcagccaccatgaagcaaatattgcaataaagcaagtgacacacagtttttggtttcccaatacatataaaagttatgggcagggcatagtggctcacacttgtaatcccagcaatttggaaagctgaggggggaacattgcttaagcccaggaatttgagaccagcctgggcaacatagtgagaccctgtctccacaaaaaaaatcaaaaaaattagctgggcatggtagtgcatacctgtggtcccagctactcgggaggcggatgtgggagtatcacttgagcccaggaggtagaagctgcagtgagccatgattgtatcactgcactccagccttggtgacacagtaagaccctgattataaaaaaaccagttatgtttacattacattatagtctattaagtgtgtaatagcattatgtttaaaaaaaagtacatactctaatttaaaaacacttgattggtaaaaaaaaaaaaaaaaaaaaaaaaaaaaaaaaaaaaaaaagagcaccatcatctgagccttcagtgagtcatagtctttttgctggcaaagagtgttgcctcattgttaatggctgctaactgatcagggtggtggctgctgaaggctggggtggctgtggcaattgcctaaaataagacaacaataaagtttgctgcattgattgaccgttcttttcacaaaagatttctctgcagcatgcaatgctgtttgatagcattttatctacactagaacttcttttaaaattcaagtaaatcctcccaaaccctgccaccactcctttatcaactaagtttatggaatattctaaatcctttgttgtcatttcaacaatgttcacagcatcttcaccaagagtaggtttttgtctcgagaaaccactttctttgctcatccataagcagctccttatccattcaagtttgatcatgagattatagcaattcagtcacatctttaggctccacttctaattctaattctcttgttatttctgtcacatctgcagttacttcctccactgaagtcttgaacctctgaaagtcatccatgagagttgcaaatgacttcttccaaactcctgctaatgttgatattttgacctcctccgatgaaatcatgaatgtttttaagggcatctgaaacggttaatccttttcacaagattttcaatttactttgcccagatccatcagaggaatcactatgtatgacagctatagccttatgaaataaatttcttaaataataagacttgaaagtcagaattactcctcgatccatgggctgcagaatggatgttgtgttagcaggcatgaaaacatgaatctcatacatctcaatcagagctcttgggtggccaggtgccttctcaataagcagtagtagtttgaaagaaattttcgtaagggcccaatatttttgaattagcgggcaagcattggcttcaacttaaagccactagctgcattaacccctgacaagagagtcagcctgtcctttgaatcaggcattgacttctcatctctagatataaaagtcctagatgggatcttctttcagtagaaggctgtttcatctacactgaaaatctgttgtttagtgtagccaccttcatcaatggtcctagctagaccttctggataacttgccgcagcttctccatcagcacttactgcttaccttgcacttttatcttatggagacggcttctcttcttaaacctcatgaaccaacctctgctagcttaaacttttcttctgcagcttcctcacctctctcagccttcatagagttgaagagagttagagccttgctctggactaagctttatcttaagggaatgttatggctgttttgttcttctctccagaccactcaaactttgtcagtatcaacaataaggctgtttcaccttcttataatttgtgtgtttactgggatagcactttgaattttctttaagagctttcctttgcattcacaacttggctacctggtgcaagaggcctagtttttggtctctctgggcttttgacatgcctttctcactaagcttagacatttctagcttttgacgtaaagtgagaaatgtgcaaccatccctttcacctgaacacttagaggccattgtagagttattaactggcctcattttgatattgttgattgtagggtctagggaggcccacagaaagggagagaaatgaggaatggccagtcagttggtaaagcagtcagaacacacacatttacaagggtgatttagttcacccttgtatatgggcacagtttgttttcactcacgtccatctgaagagaccaccaaacaggctttctgtgagcaacaaggctgtttatttcacctgggtgcaggcgggttgagtccaaaaggagagtcagcgaagggagataggggtggggccgttttataggatttgggtaggtaaaggaaaattacagtcaaaggggagttgttctctggcgggcaggggtggggggtcacaaggtgctcagcaggggagcttttgagccaggatgagccaggagaaggaattccacaaggtaatgtcatcagttaaggcagggactggccattttcacttcttttgtggtggaatgtcatcagttaaggcaggaacaggccatctggatgtatacgtgcaggtcacaggggatatgatggcttagcttgggcttggaggcctgacatttgtggcacttcaaaacaattaactagtaagatcagagatcactgatcacagatcactataacagatataataacaatgaaaaatttggaaatatggcaagaattaccaaaatgtgacacggagacaggaagtgagcacatgctaatggaaaaatgacatcagtaagcttgcttgacgcagggtagtcacaaaccttcaatttgcaaaattgctatctctgcacagcacagtagggcaaagtgtgaataaaatgaggtaacctgtacctccagctaaagtcccagaattaactttccttggctccagtggattcacaagccggtatctgaatcatcacctcaccaagatgcctggatctgccttttagcccagcttgggtcacattgccactgtggagccaggaggtgggtcacatctgctgaattcagacctagagttggggagaagtagcttcccaatgggaaactaaggggcagctactaaaagtaggaggacagggtcttgggaaggcttacatggcacacggccactacctccctcaatgctctgtcccctgcttagtgtcccgcactgtaatttctgcctcttcatcaataaaacaccaccttaatgccactgtaccccagcaccaaaaacagtgttcatcaaaaacttcccgaataaatgacagaattcatgtcatatcgcgacgtcttctaatcacagcctgcgtagttttctggggctgctgtaaaaaagcactacagactgggtggcttacaacagaaatttattctctcagagctctgagactagaagtccaaaaccaacatgtcagcagggccacgctccctctgaagcctctgggggaagaattccttcttgtctcttctagcttctgggttgcaggcaactccttgggttgcaggcattgctccaatttctgcctccatggtcacatggagttcttcttgctgtgtgtctctgtgtccaaagttttgtcttcttatcatgacaacaggctttggattagagcccactcatcttaacttgattgtatctgcaaagaccctatttccatgtgagggcacagtcacaggcattgggacttgaacatatctttttggcaacacaattatatccactaaacagcatttttgcatctatattaagaatgactaaaagatgctgcagtaacaaacatatcccaaaagctccatggttcgttgcctaagagtttgtttttcacttacgaagtctgtagtgggtctggttgctttcattttacgactttgctagatcaacacagggctcccagggttaccgtggcaggggaagagagatatacaggagtgcacaggggccctggagcatattgcatgtgctcaccaacaagcccattatcatcagatactgcctgttctctcctcgtcccctgggccattctaggccccaagtgagggttcttggatctcacacaagaaggaatttgaggcaagtccataaagtgaaagcaagtttattaagaaagtaagggaataaaagaatggctatttcatcggcagatcagccccaaaagctgctggttgcccatttttatggttatttcttgattatatgctaaacaaggggtaaattattcatgcttctgccttttaggccgtataggataacttcctgacgttgccatggcatatgtaaacagtcgtggcgctggtgggagtgtggcagtaaggctgaccagaggtttttctcatcatcatcttggttttggtgggtcttggccagcttctttactgcaacctgttttatcagcaaggtctttatgacctgtatcttgtgccagcctcctatctcatttcgtgattaggattgccttaatttactggtaatgcaggccagcaggtcttagtctaacccctattcaagatggagttgctctggttccaatgcctctgacatagtcattgctgggcacagaagcctctctctcactgagtgctgcttctgcagccattgccatctctgaatgggcaccaagccccacactggaaaccgatacccttggaatgccaaaaccacagaggctgtgaagaggtacagtcaaagctgccctctgccagaggagctccaaagcatgttatgcagactccagagactttctgaaaaggttaaaactcaaattgggcaagtgtaaatgaacaacacctagtgaagggagtcacatacaaggcaatacaatagagagtggtgaggactgtggcaaaccaaagtatgtgcctcatctaaagggagcagtcactactcaacttcagcaaattattgccatatggaaactggcatccagtattgccagatttttgggaaatttttttaaaaaaagaaaaccagaaagtcagatttttacatgaagtttcccaaatttcaaaatgctgttcaggctggatttagcccacaggccacgagtttgcagcccctgctttagtgagataactttttccattttcactctcagctctcagctctccaacttggctctctggctatccacaggacgtggacatgagcccagtggggctgggccaggaggcaatcccccttcccaactgacctcagtctcgccctctccaaaacagccaaggtttgtcactgggtcaggctgaagggcctggctccctcctgcggggcaaggtccctcccaagagggtcctttaaaactgactctggaaagtcagagcacacacccaccagacaagcctgaacttgtctgaagcccactgagacccaagccgcagagacttttctagctgtgatgatcaagacataatcgtgacctccaatgccccccacaagtatattgctcctgattctttcagcccctgaccttacttctcaaactgttccctgctgacccccagtcctatctgcccccttcctaggctggtccttactgacccctccagctccatcccctcaccctgtgccccacctttttcagatagaaaaaactttcttctccagtgcctcttgctgtttttcatctctgggccattgtcaatgttccctaaaacattccccatattccccacccagcactccacctctttagctcttcaggtctcagctcagaagtcacttcttccaggaagccttccttgattgtctttactagtttaggggctgaagtcaggcgttcccaacagcctgctggagttccccatcacagcttatctctcaactgtctttcctgagagagggagaagacattcctcagagacggttgtcacagggagaacttcaaaattgggattcgacctgagaggccacatggattcttggcttggcgcaggaaaggattcaagagtgagtggggaattcgtggaactgagggctcctcccctttttagaccatatagggtaaacctccccacattgccatggcatttataaactgccatggcactggtgggtgcttcctttaacatgctaatgcattataattagcgtaaaatgagcagtgaggatgaccagaggtcgctttctttgccatcttggttttggctggcttcttcactgcatactgttttatcagtggggtctttgtgacctctatcttattaaaccagtcttgcccaatttctatctcatcctgtgaccgagaatgcggaccctcctgggagtgcagcccagcaggtctcagcctcattttacccagccccctgttcaagatggagtcgctctggttccaacgtctctaacgcggggcccctgactgctctatttcccaaggtgtatctagcatctcgcactatacgaggccaagttaaggcttacacatttgcagaaggaaagaggtaaggaagcaacctgggaccttccactgtctctgtttccatctctctctttccatctctgttcatcccagaatctctctgtccctatccctaaatatcgaaaatttctgtctctgaccatctatcattgtggctgatcatctgtttctgaccattccttcccgttcctgaccccagggagtgcagggtgtcctagccaagccggcgtccctcctagtagtaccgctgctctctaacctcaggacgtcaagggcctagagcgacagatgtttcccagcagggggttctgaggctgtgcgcccagatcgcgagagaggcaagtggggtgacgaggtcgtgcactgagggtggacgtagaggccaggagtagcaggcggccggggaaaagaggtggagaaaggaaaaaagaggagaaaagtggaggagggcgagtaggggggtggggcagagaggggcgggcccgagtgcgccccccgcccccagccccgctctgccagctccctcccagcccagccggctacatctggcggctgccctcccttgtttccgctgcatccagacttcctcaggcggtggctggaggctgcgcatctggggctttaaacatacaaagggattgccaggacctgcggcggcggcggcggcggcgggggctggggcgcgggggccggaccatgagccgctgagccgggcaaaccccaggccaccgagccagcggaccctcggagcgcagccctgcgccgcggagcaggctccaaccaggcggcgaggcggccacacgcaccgagccagcgacccccgggcgacgcgcggggccagggagcgctacgatggaggcgctaatggcccggggcgcgctcacgggtcccctgagggcgctctgtctcctgggctgcctgctgagccacgccgccgccgcgccgtcgcccatcatcaagttccccggcgatgtcgcccccaaaacggacaaagagttggcagtggtgagttgctgcgctggcctcaaggaaccacgtttagacaaacttcggaggcaaaggatgggggtgtctctccccctgccctcggcggtgggcacacagcgtgggggaggggcttcggtaaacagcttggggggtctttggcaagctattggagtgatctcttgcaaacggtgggggatcttttgtaagcaaagaaaacctttgataaacaatttggcaaccttcagcatacagcagtggggcgaaaaacaagccagagagtgggagaggggtgacctggcaaactactggaaagggactcttatgtaaatagcggggacatcctctagtatctgggacatttggcggggggggggggcggtctttgtaaacaacttttggacacatctgggcagttgctaagggctcttgccaagcgtctaggtaagcctttggcaaacagctacaggggtcgtttttgctaatgtaggactttgggaacggtgctctggcacacaatttgggtaaacttatgcgcgcataaggatgggagggagcttggtcaaagcggggcttggcaaatttctaggaaccttcggcacagatccggagagggacctttaaacaaacagctcgagggggccatttgggaagtgattggggcaggagggaagcagagagcgcatcttttttctcctggcttaatggacaaattggtcaagggctgggcctcggaaagtttcctcgaacttctccaaagggtcggagaaaagaaggagagagctggcccggcaggagggaggaggagtggggcaggcgctggagggcccggcgcgtggggcgggggcggactgcgctccgctcgggtcggagagcggccagagagccctccttcctggctgggctcccaaaccgcggttcagatgttgtcttgtgagcgtgcgcgcgcctggctggaggggcactgagcctggccgcagtgttgcgtaagtagggcctgaggagagaggcaggccagggacccatcaagatgtcctttccagtccaggggatatctgctcccttgttgcttcagccaccctgccctccagcctccccctcaacctgtccgggagaagacgcccatgccctctggtcaccctaggaactccttcaggaggtgacaactaccctctcccaactctcacccttccaaacagctaggtctcagccccctctggatagatgggttgggaaacctccatacatttttagagggctacttttttcaaggatctggagctggctggcataatgatgtggctgttgggtgggggtgagagtggagctttgggacaatgacaaagctacttggtttcctacaccttttccagccaatgggtcacaggatgaacccctaaattggggttcagcctgggggccacatgggttcttggcttgcacaggaaggaattcaagagcgagccaacagagtaaagtgaaaacaaatttattaagaaggtaaaggaataaaagggtgattattccatagacagagcagggaatgggctgctggactgagtatacatatggttatttcttgattatatgctaaacaaggggtggattatttaagagttttccagaaaaagggtggggagttcctggaaccgagggtttctctcccttttagaccatatagggtaacttctcaatgttgctatggcatttataaactgtcacagcgctggtgggagtgtctaatgtatttaacatgctaatacattataattagcatataatgagcagtgaggacgactagaggtcactttcattgcagtcttggtttgggtgggctttctccagcttctttactgcatcctgttttatcataggggtctttgtgacccgaactgtatatggtgaaatcagtcctaccaacctcctgtctcattctgtgactaagaatgcatgcctgccctcctgggaatgaagcacagcaggtctcagcctcatcttacccagccccccactcaagatggaggtgcctggtttgaacacctctgacaaatggaagtctgtgttgtccagaggcaatgcagtgggggcttaagaagataactctggacttagaccgcttggcttcaaatcaaagagtgcatgaaccaaccagctggcctagtgatgatgttaggcaagtgacttctcagtttcttcatctgcaaactgggaaatttcctatctcagggttaaaagagaggtaatcttaggtgcttacctagcacatggtaagtactcaataagcactagccattattctattatattattattattgttatgtcctccatttcccctttcctaactacttccaacaaggctaggaccgttgtcagaagatctcctggctcctttcaacattctaacacagtacttatcacatacttcattttgttttatttgggatctatcagcctccctgctaggatttgaaccttagagacagaattgtctatctttttcacctgtttttcctcagcagtagcactgggcttggtacatggtaggtattaaaaagtatttgttgaataaataaatgagtcggttgctccctgaacctctgcagggacctgctcagtttgggcctcagtttgggcagggccagttgtatgactcatgaaggacaggactactttctttttgcaaatggctgattcaggatttaaacccaggtctgtctactgccagagcccatgcacatagtccttgaatctctttagaagaaaacaggaggaaaaaagtccccaagtcaccagccgcaaggtagataaatgagttgatagaggtaaaggaaggatgctggagtataatgattccatatcacagcctctggagccagattgctttgtcccaaatccagatctaccatttgtgaactgtgtgatcgtaagcaagtttcttaacctctctgtgcttcagtttcctcctctgtataatagggttagtatatctacattacagagttttgagcattaaatgagttaacatattctgactttagtgcctggacatatagtcagcacccagcaccaacaagtggtagccatgctctctatagctgtatgtcctgtcgctcaactaatgggtgaccgtgctggtttgggaacccagtactccacccagtgctctgggacccctggcttatttcctgtctggactatggcactgggttggggggctgattgctacagcctgctttggtcagtactgtgccatcctaatgtggctaattgccttgggggtgtgcatttctttcagcaatacctgaacaccttctatggctgccccaaggagagctgcaacctgtttgtgctgaaggacacactaaagaagatgcagaagttctttggactgccccagacaggtgatcttgaccagaataccatcgagaccatgcggaagccacgctgcggcaacccagatgtggccaactacaacttcttccctcgcaagcccaagtgggacaagaaccagatcacatacaggtgccggggcagggcttggggaggcagggccatggggctgagggacacgagtctccttgacccatgcattctctccactcaggggatccatgaggtgtcttttgtgaaggcttgacatcttagggagtttcaatacacagttcttagaaaatgaagtcagacagacttgagtttcatacttgctggccatgagacattgggttacttttcagtgctgtgaatgttggctttccaatctacaaaatggggcttaaaaaatgcccttatatggtatgttggggaactaagctaggctgaactaatacaaacggcttctatgatttttgacacagagcaagagtgtagtaatgctagtcattgttattgtttttagatgaggtcattgggatgggcagaaggaacgtgatgattggtagctaattgggtttagcagcccaattgggttataactggttgctaattgggccaagagctgtgctctgtatgggtggtgctgggttccaatggtgggatctttgccctgtgccccataatgcactacttatggccctcccccaccagccagaagtgacagatggaactcctgagctggggcctaaaaatgttggctggcctgggactccctgggtcttcaaggcattctgggagggttgtccttggcagtgagccctgcccagcctacacacacatacacgcaggcacatgctcacatatacatacacatacctgtgcacccttcccgtgcttgtgcatatacttgtatgttcacatacacacacacactcaaactttttcatacatctgtgcacacacacatacttgcatatacatacacttatgcacatgcatacacactcacatgcagttctaccacctccaggatcattggctacacacctgatctggacccagagacagtggatgatgcctttgctcgtgccttccaagtctggagcgatgtgaccccactgcggttttctcgaatccatgatggagaggcagacatcatgatcaactttggccgctggggtaggcagaagatggggcagaagaggggccagcagggatcagtgttgagacgagggggtgagatggacattagaggggcgtggggatcctaagggcggcttagataggacagtagatggtgtgggccctgggggtggtttagatgggggcagcacaacacggagtggacactggagagccacgttgacatgggggcagatggtgtgttgtggtataacctggaggccgtctaaacccgaagcaagtggtctactgtgctgtccaatatggcagccattaggcagaatatacatggctgtttaaatttaaattagttaaaaattttaaattagtttcctggtcacactgggcacattttaagtgctcaaaagacacaggaggctagtgactattgattttggacagcacagacaaagaatattcctcttaatcacagaaagctctgttggatgatgctggtagacactgaggaactgtagatatatgagagtggtttggaaacagtggagcagtgtagacactagaggaagggtcgtagaacctggggccaggtggccatgtgagtttatggtgtgaacactgccagtagcacagacataaaggtatgtggtatagacactgagtggtaagtgatgaaggtaaagagcaggggaaacaatgtagacaagtgggtgggtggtacaggccttggtgacaaggtgggcatgaggattcatgttgcagatattggtgatagtgtgacatgaaggcaggattgtggttaagagggcagtattgacaggatggaggatggcatagacactggggatgatgaagatggggtgaggacactagtgtggtaatgtgggtatgtggtacatatagtgtcatggtggtagagtagacaatggaggtagagggtatggatactgggagtcatgtaaacctgggagagcagtgtagaccataggatggtaacaaccaggtcagcagatctctactgagctcctgttgacagtcctggataaccccactgggacaagggaaggggacagatgctgggtgggctgacaggctccacatgtagatggggtgtggaggggtttcagggtctaggtggcacagctagacgctaagacccagtgtgtgtttcagagcatggcgatggatacccctttgacggtaaggacggactcctggctcatgccttcgccccaggcactggtgttgggggagactcccattttgatgacgatgagctatggaccttgggagaaggccaaggtgagaaaggggccctctgcatgccccagaccttctctcctgtcctctctccactccatttgcttggaccagagaggtgggaggggaggaaagtcacacatctgggtgagtcagaatcttggtctccaaagaaggcctggagaagtccaacctcccccttccatgtcactctttagtggtccgtgtgaagtatgggaacgccgatggggagtactgcaagttccccttcttgttcaatggcaaggagtacaacagctgcactgataccggccgcagcgatggcttcctctggtgctccaccacctacaactttgagaaggatggcaagtacggcttctgtccccatgaaggtgagcatccactctagtccccaagactttccaccccaagcctccagcttcccgggctccccagtgtgctcttccctccacactctccaggactggctgccactgccagttaatgagcatccctccaacgtccttcactcagttcccccccatcctgatctgagccattgctgtttctctcccaccagtaccatgatgaacgtagtactctaattaaatcaagttgattttttttaagtttcaccattagcaatcatttaggaagtcacagatttgatttgctaattatttatttctaatatatattggagtgaacttagaactattacaatgcccagtggttctctctagaaccagtctttacacttcagtcaagattgatacttcaagggcatgaggaaaggcttgctggtagctggaaacctagcagtgtgatagggaggcaggactcagaccagggctggactcaacctggtttgcgtactccaactgaggaatttcagctattgctcctgccttggtcctgatgctgcctctgctaatgcgtgtgtgtgtgtgtgtgtgtgtgcctgtgtgtgtgtgtgtgtgtgtgtgtgtgtgtgtgtgtgtgtgtctgggcacgggggctatactatctgcctctcttgggcactgtctttttctgcctcctgtctagcttgtgtctgcatctctgtgtcttgataaagactttaggcttgactcagtatttgtgtttgtgtgcttgtcagtgcctgagatgcaacatttcagagattttgaagccacatgggggaaatcttttaaaatggggtacagatattgacatacacactcaatcctttttaaaaatatccttgacacacttaatagtcataaatcacaaaaagacaatgtaacttcatactctatgaagtcatcatatttgataattctgcagattgaaagcccagaaaacctggcgaaaatggaaaaaagtctaaaaatttttaacactatcttctttcccatgtcacaaagactctatagtctacatagactaaagactgtctttttgtctgtaattttatgtctgtgaatctccctaaccccactgtaactgaaaactaagcaccaaccatcttgacagaatgaaagaaacaaagagctagttaattcccttcctgtttatgcttttactaccagagctaaactttatattaagtaagagtttaagccattcaccattaataagtcagacattttgaaataaaaatattttttgtatcttgcgtttcccggtagggattacatgtggcgttaacccttccctgtgtcacccctctgataggaacagaaagctttggtgatagttagatgtggaaacagctgtatttcataaatttgggaagggttattccctgcattggacattagccatttactttgtgcttagccagatgcaagtacgcacaacacgcacgtgtctgggtctcgaggcagagattgttgttactcagcccctgctgatggctgagtcagtgtctgattcttgccatccttgtcaggggaatttgggaggagacaggggcttcctgggtggtagaaatgagaggtcagaggcagggggctggcattggtcgaagttaacgctttgcctttctcaactctgaggccactaaggtatctggactcagtcttgccttttctctaggtgccattgtttctggcattgcaggacaaggtcttttggtagagaggggagtggtgaggatacagggcctcgagttctgtggtgggaggccagggactgggctccattccggccatggtggagttaacgggggctggtgaggtcacctctggcgccgttgtgcacagatggtccttgttatggacttgtggttttgctggttggcaattccagagacaccattttttagctttgggtggatgaggggaggatggggagaatccaagacagacaggccaggctctgaaccccactccctcccccaactctccatttatggcccctgtcttgaagatgtcaaagtaggagcccagagtgtttagtaaaagggacctgaaggcaccacctccctctccctccctcctcctcttcattctttctctccttcctacagagactgcaacaaggccatccaggaaggggcctggggttgacaggaggtaaagcaagctttctgtgtatgcgtgtgcacgcacacacacatatatgagagtgacagactaagcaagagagattgagattagtgtgttttgtagtttttagttacaaccttcattcacttctttcatttctgtgaccatgagcagtttgagaaccatctttgtcctagccttgatttctccacctatcaaatggagagagattctcgtggtcctgcctgccatgactgatatattcatgtcatacatcattattacatgaaatttgcatggtacaggtgtggaccaggcagaatggacagtgcccttggggctgaggcagggttctagaagcccttgctgtgtgccaggtgtcaatcattttgttgttgggtggtccacaaggtcccacgggagggattgggataaccagggaagcaggggttctctctgggagctcagagaagcagctccttaccaaccagtagagatgttttcttaatattttaacaatgcatcaacttcactggtgtgaaccggcaggtgggcagccagccagccctgtgcccatggaagcatgtctcattcacatccttccctctctcccccacccttagccctgttcaccatgggcggcaacgctgaaggacagccctgcaagtttccattccgcttccagggcacatcctatgacagctgcaccactgagggccgcacggatggctaccgctggtgcggcaccactgaggactacgaccgcgacaagaagtatggcttctgccctgagaccggtgggtgccactccctctccctccctcagggcccagcacctgctgtctgacaaaaaaaaaacccataagactccgagtgcccacctcctttccccaagacaggggtgctaagacatctgtgcgaatgacatccacaccaagatgtccgtgtagctagtcaggatacttgtcacctggtatggcctgggcactgaaatcagaacagacattgggcatcaacagttgaattggtgacacttaaatgtcaggcctgctcaggatcctctgaccgacctgcatcccttttctctcaggctctctggcagagacttctctctcctcctctctgaccctgcaatctctcttccctgcctttcctggtctgtatctccaccttttagtctgttttttattaagagctccgtgctttcctccctgtctccttcctgccctcctctctatccctccctcctttccttcttcccttcctccaacaggaatttactgagcgcctgctttgtgcagcatacacagaggttggtctctgcaaagccctgcccaagggggctcacagctgaggggcatgtgctggtgccatcagcttcatccaactccctttgcccctagcccatctgcccccttccatgggaggctcattagaactctggaatctggcttcctgggtttgaattgcagctctgatacttcctagcagtgttggcttagggaaatttcatcatctctctgatctatttcccatccatgaaacgcggtgctattcagtccctcctgcacaaggctgttgtcaggggtgggtgagatgagtctaaagatacagtgcctgggactgagtctaacttaggtgtggttcattaaggtcagcgtcatgtcattgcttcctggtggtagcctcagactctttgctgcgccttgacccgtatccctaaccccacagccatgtccactgttggtgggaactcagaaggtgccccctgtgtcttccccttcactttcctgggcaacaaatatgagagctgcaccagcgccggccgcagtgacggaaagatgtggtgtgcgaccacagccaactacgatgatgaccgcaagtggggcttctgccctgaccaaggtacgaggccctggtcattggacagagaccctggacattgcccttgcccctaaacttgctccaaaaaccttcctgagacctcacccacttcaagcatagacactgccccccagacacccacctacccagacccgcccacctgggctgagacaatgcccatctctggtggagccaaggtccctgcttagatcctgcccatccaggtggaggcacagcctccaaaatcagaccctggtagaccagatgctgctactcacctcctgggtaagaactggccttcctgaggggtcactgctcttgtcttccccttcagccaccctccaggcgggcttgtgactaccaaaattggctgaattctgagcacagattaccagagagacaattctcctaagagacattcccactgcacaaagaggtgccttcaaggagctggtaggcagtagaagaaaggaaaaaaggaagagcctcatgcttgatctgacaccatggtccacgcagccctgggggagcccccagagccctctctcccccatcagtcagcaccatctgttaccagggtgtaaatggtgggtcctcgtcagtcctgggtgctgaggatggagctgactgggacagctctctgccccctaggactcacaagctcaggggagagagtgaccaggagacagcttgtgaccttactatgtgctcagtgcagtgagcagggtgcttggggccctgtgcccaatctaggctacagagcccagggttgcagggttgcttaaagctccctgatggcccataatggccaggtcagtgggcaggtccagggcctgtcagaattaggcaagcctgtctttatgttgctttcattctttttaatcatcatgagatggaacttggcagatgtcagtggacagaggctggccaaaggaggttttcttatcccctgctaaattccttgctaggacacagtctgattttaccagcttaaaggtgggattctccaccttcctgagtggttcaagtatccagagctcagtggctcacccagggtgaatattatagtctcctggggctgccatgacaaagtgccacaaactgatggcttgaaacaaaccccatgtattctttcatgcttctggaggctggaagtctaaaatcacggcgtcagtaaggccatgttccctctgaaggatgcgtcactccagtctatgcctctgtcatgacatggatggccttcttccccctctgcttgcctctcctccttttttttttttttgagacggagtcttgctcttgcccagctggagtgcagtggcatgatctcggctcactgcaacctctgcctcctgggttcaagtgattctcctgcctatttccaaataagttcacattcacaggtccctagggttaagacttgggcaaatcttttctggggggacgcatttaaccacaacagggtgtgacacaggttttgctcgctggctgtggctcagcctgtgcaaccacgctaagtgtgaaaggtttttactgctttcacctgggcagaaatggtggcaacatggggccagcctatccccactcttcttacctcttcagagaggctgaggagctgggtttgtagagctcatcttttatagagagacataaaaagccaggaagcaggattttaaaatgaatggggttttaagtagaaaattcgcagatactacttgttctgttcctttatagcacacctgtcctgatactgacttggaaagagacaagaagactttggctgaccccacttggaaacaataggcactaatcccaaaattgtgtattgatcccagaattctcaggaaaagaaaaaaaaaatcaatacatgccgcttccagggttctcagccttactgtggggctgtcctcaaaagtctgcatcactgggtcaggtcttgacttctctctcatctctcttcctgtctttcaaccctctctcctccctgcaaccctcagggtacagcctgttcctcgtggcagcccacgagtttggccacgccatggggctggagcactcccaagaccctggggccctgatggcacccatttacacctacaccaagaacttccgtctgtcccaggatgacatcaagggcattcaggagctctatggtaaacctccgggcgggggttgggggtggagggtgaggaggggggaggtcatgtagcctgggatggaggcccagggggtgggaccagcaagatctcatccagccaggagtgctggagacgagggcaggaaatgggagtgttgacctggtcttgggaaggcagagcagctctccaaggggatacttggataactcttccctatccgaacaatgctaatatccatgtcactcttagcgctccatttctgggtttctcccattttctaggtgagtaaggtcacctggtgcaaggttacacaggtttgagcaacccagtggagtttagaatccaggagaatagccaagtacaggacagaattttccatcatgtggaatgaccttaacaatacgggggtggaagtttctagttttcataataagctttgatttttagtatgtagtagaaacagaacaaccagtgccttaagccaattatttatttatttatttatttatttatttatttatttatttatttattgttggttcttacagtgaggctagagtttaaaaagtcagttcatttttaaaaaatatttaatggtccaggtgatatctgagccaggccaaaatagtgaaagtggtgcttgagtgatgaagtttggggactgctagactcaggaaaaagcccaaggtctgccgtgaggggtgctgggttcaaatgtggcctctgcccttcactagctgcaagatattgtgtaagtctttatacctctttggactcagtttcctcatctctaaaataattgcttatcatgaaaagtgccatactgtcagttctggacacaccagcggccccctgaccgccctgactcttgtgggcataagaatctgagctttgggtttgaatccttgggcaagtcactcaacttttctgggcctcagtttcctcacctgtgaaatggtgcaatcatgataccccactcccagggctatagagaggactgatttgggtgatgtcagtaaaaagcatatataaagtacaaagggccccaggactccccaagtccaggcatcttcttgttaccttacggagcttacactaaggccagaaggcgatttcttctgactcttagatggttgggtgggcacccctgggggctcaccctagtggggagaacctctggagctgcagagagtctaaggtcaggtgttctccccaggggcctctcctgacattgaccttggcaccggccccacccccacgctgggccctgtcactcctgagatctgcaaacaggacattgtatttgatggcatcgctcagatccgtggtgagatcttcttcttcaaggaccggtgagtgcaggagcttgcttcttgtcctccttgtctcctgtcctctgctcttataccattattcttttccctcactcttcgctgaagactccgccaaatgcttcccagaatgacctgaattaggcagtttctgctgtgtatcaaacaacctccaggtttcagtggatttgcacccaagcattttgtttgctctctcatagtctgtgggtctactagttatcttgactttcagctacagtttgggttcaggtgtgctctgcctgttgttctcatgggattagcagctactcatggcagatgacagggtgcaagaggccaaactgaactacacaagctcatttaaagcctccactcacatcttgtctgagaatattccactgcctgaaataagtcacatggccaatcccaagacctaccctagagggtagtactgcaaagtcacatggaaatgcatatgaatgcataatcctaaaatcaaaatggagggaagaattgggaaccataattcagtctaccacaggccttctagaatggcgttgccctcaaatggccaaattactctgtgtatgggtggtgagtgactgcagagtagaaagaggtggtattcttcatgctatagataaagatcaccactcagttgactaaagactgaggtttaccctaatgccctagttccctggagaatggcaggcagtatctaggacctcattaaagggtctgtccttccattcttctatcatccatccatctacccatccatccatccatacctatatctttccatccatcatccatccagccagccagccatctattatccattatttatgatccagccatccattattcattattcatccatttattcattcatagagtatagtagttgagaaaatggactctgaagccagattctctgggttagaattctgtaactgctacttactggttatgtaatcatagacaagttaattaagtatcttctttgtaccttggtttcctcatttataaaatggggctaatattccaacctatctcctagggctgttgtaaggattagatgaacttagtgctgagaacaaaaacaatgcctgacacagagtaagtgtattcatattagctattgttattgacaaataattgtttggcatctactgtgccaaatactttgctaggctttagtagctggaggaggaagaatgatgttctcgggacagtggggtggggggctgctagatcagtgttctcaaagacaggcgcatgggcctcctataacagaaccatctagagtgtgggtattaaaaggtgggttttctgccccagcttcagaccctcctgactggaactctggggctaggccccaggaatctgcgttttagcaaattctcccagtgattctgatgcacattaaagtttgtgcatcacaagtccagtttgagaaataggcatggagaactgacatggcaagatgaaagaaaagtgatcgcagaggtgttaggtgcttttgtgagcacgtcccagtcaaggaaggcttcacagatgcagcagcatttgagcagagccttcaaaggagaagcaagaatctgatgggggtgacaagttaggaggttctttgagacagagggacctgcagagccaagccatagtgatgtgaaagtttctggattagccagtgagaatctggtgaggctagaagatgttccataaactttcaggaagagtttcctctactctaggcactgggccaaattctggggtgcagatgccttgcccttcacagggtctgctggccaatggggaaatggcaagaatgcaatgagagatgagacttagaatgtagtgagaaatcaggtcccgtcaggcctcgaatgcccaaatcaggatatataacagcagatgtcagcactgctctgcagttcccattgtaaggatctggcaatgtgcttcatctggagctcctcccactaagaaagccctgaccacacatgcagatctcagatgtgtggggcctaggaaaggatgcagagcccagacccaggctggagccatccctggcctaccacatcacagttttctttcaaaaggaacgtgatgagtgtttaatgggtttatttgattaaccagtaaatattaaacttcaaccatgagcaaaaattgctgctaggcactggtgagggtgggggtcatgaaggacagtattgcagggtgattaaactcagactttggagtcagatctggatatgaatcttggtaataactaatttatttagtcattgatgtagtgataactaagtaatttgaatcctaacctctctgagcttcatttgctaaataaaaattgtgacaccttcctacgctaggatgtttttctgcaaataacagagaccatccctctgcaaactcaatccagcctaaacagtagagagaaattgctttcatttggtacaaagtccaggggtagagctgcctgcaggggcagagagagggtcagtgacttgatgtctttgtccactgctagcctctgcacttacttcatcctaaggccggttctacctcatggtcacaagaaggttaccagtggcagttggggctctaatccctgccctctcccaggaagcgagagagaaagagacacgcacagatacacacacacagacccccagatgtgaaatacaagtctgtgtgttccgtctttacaccactgtaagtcatatggcaactgctgaatcagtaacagtgctagggaatgctaaactctgattggcttagaccagtagttctcaaaccttggcatgcgttagaatcatctggaaggcttgttaaaacacagattctgggccccaagcccagagattcttatctgtagatctctgtaaggacccaatcatttgcatttctaatgagttctcaggtgacgcagatgctgctggtcaggagactgcactttgagaaccagtggcttataccaatcagtatctacccctagaatgggggtaggggacacagggtcagaggaggtgaaggctggatcataaatgtggagttttgtgaagaaggatggtggggaaatagataattaatgctaggtagaccatccagagtgcatgctgtcttaaaagattgtggggattaaattacaaggcacataaataaagcacatggcatttagtaggaccctcaataaatgataactcttactcttgacaaagtacacaaattcatttcattttaattcaggaaatacttgagtgtcatcagctcctgccccaattggcctctaatcaaataggagagttaagacaaacagacactactgttccaggcactcagagttgatgattttgagaggcttagagagggaaaacacaatatggatggaggtagtcagggaaggcttcctggaggaggtagagggagagaacagggtaggaggatgtttctcagctccagcagattgcagacaggaactctgcccgttctccagtccttctccaaccttcctttgatcctgcctcccactcccatcatggaatcatctctgggatgtttctgggtgggtttgggggtgtgtgtggttcgagctgcagggtgactgaagatgtggtttcctgtgcccccttgcctcctgccaggttcatttggcggactgtgacgccacgtgacaagcccatggggcccctgctggtggccacattctggcctgagctcccggaaaagattgatgcggtatacgaggccccacaggaggagaaggctgtgttctttgcaggtgtgtgggaagcacccttccttggccctcagctccacagggctctgcaccagggctcctgggtgtcccaggctcactccccctctcaaaccacagttcctatgcacccgtgggtgctccctttcctttatggattcattctttcaacattatttcctgaagtgcgcagctcctctgggagattggttccgacacccaacatcagatagcattaaccctcagtgtacacatttcattttcttaattcttttcaatccgtctcatttcttttctagaagaaaaaaagtctcagtttagtgctggtgtgtccctaacgcctttgtagtgatacagtctttggcaggtaacagttttagttcgaatgttttaaagaatatttgttttcatttttacttttagacataaattggttttaacagaggcagttagttataatagtgtggagtttcaaatcaggacagaaacggattattcagtaactgatattttgacagtcaaaaaacattttttaataaatttatttttaaagatttcaaaatgaattcactgaaagcagaatgttaagtaaataatagtacagggagcccctagaagtggtagaaatcatcaaggtgaggtctgtatggctaaggtttactcatttaacatttattggagcatttccatgcgctgggctttgccataccctggggatacaagctctgccttcgcgatgctcacaaaccactcagggagacagacagctgggctcttatgaggggtaaagaaggatttaggaggtccctgtcctggtctgaggtgggatcctagagaagataaaggctcagccaagactattgtctccaccacctggctcccacctcccccaatccaccgtaatcatgggtcccggagaggacaactgctggctcctagggcacctttttgcaaattagcaaaaggtgcctctttatgacagcaaggcccttagagtgcacgacttggtgagcagagtgtgagctggatttatcccccaactcatgtccttgaccaggcaccttctgtaattgacttctaaagccctctgtgtgagccctgattctgggcactgcaaccaggagtgagcaggaagttgcactctgttgggaatggctgcagtggggcccgtggacagacagatgatgggaggaacaggctggcctagggcatgtcagcaccagccaacacaccctttgcttccaccccagggaatgaatactggatctactcagccagcaccctggagcgagggtaccccaagccactgaccagcctgggactgccccctgatgtccagcgagtggatgccgcctttaactggagcaaaaacaagaagacatacatctttgctggagacaaattctggaggtaagggagggcggtgggtaggacagcagcacagttggctgcgagagacagagaagccgccctgaggcttcaagcctcctgggctgagttcagaggttggtgggctctggatgccctctctctggtatctaacctctttggtctctggcacctctgagatgttgccaaaggtgaaccattcttgtacacattgctgatataattctggtggaatatcctttctctttgcagaattcttttgattggcccatgtctggtctggaccctcacattttgaaatgactcactgaagaagggggtaataaaaataaagataataactgctcctattgacactatgtgtcagagactgtcccaagggttctatgggataggaattattattcctcccattttacagatgaggaaacctgggttcagaaaggttaggtaaccgtggctgggcacagtggctcacgcctgtaatcccagcactttgggaggccaagatgggtggatcacttgagctcaggagttccagatcagcctggccacatggtgaaaccccatctctactaaaaatgcaaaaaaattagctggacatggtggtgcatgcctgcaatcccagctactagggagactgaggcaggggaatcacttaaacctggaagacagaagttgcagtgagctgagatcatgccactgcactccagcctgggcaacagagtgagactccaactcaaaaaaaaaaaaaagaaaaaagaaaggttaagtaaccagcttggagtcacatagccaggtagggacaggttgggatttgaaccctggcattctgtctcctgggaaaacatgttagtcttcactcttcactactattctatacccgagatggtggaatgggggttccaagagatgggggaacatgaaggcagtggacaaaatatgaagaagacttagagatgggtgcaccagtcatccatagaagccagcatccaaatcagaccccatggaaggagcaggtgccctgtgtcatgctcacagcaggcccgtggctgtgggtgcaggttggcaggggaacaatttggaagcagatggttctgtgctccaggttatctacaggaaagggtccagttctgaggggctatagtcatgaccagggaacctaatatccaggagtggctggtgagaggtagcccaaacctcaggagtttgactgtaattcttcacactttctagaaaaggaaacggaggtccaaagaaattaaataacttgttcaagctatagagatatgtgtatttgcacaaagccaggattatagctacttctcttgtattctaactgagtaccccctccactatacctgccagtccatttgattagtgaggaaagagtggtcggggcacaaagacttgtggtgtgtctttccatcccctccctcctggtatccccacattccttccatggctgccactgcatctgggccctacccaagaattttagagggcacttcctgaggcctttgtctgccatccccaaaacaatcccgcttacttcctaaggcctctgtcttctcccccttccctcctccccactactctgccccccagctgccctgcattcagaaactctttatatcccaggcctgcccatgtcagggtggaattccagacatattgctaagacacttagcaacctaagctgattgatatctcaagcctcaagaaagaaaacagtcaggcaggaaaccacagagcaggctttccacccaccagctccagacactagccccagacagtgtgcacgcacacgcacacacacacacgcgtactgcgaatggcatctcagcattgtaggagccctgaatctccaagtcttagaattgtggctggtgagccgcacagactcacagaaacgtgaatcttagaatcctaaagccctgaagttttcaaattatggtgttggaagaactttttaaatcacttttccatgcactgtatctatgtaaacatgcaaaaacagacctgttcctagcatataggaacatgattgtgtgcgcatgtgcgcatacacacacacacacacacacacacacacacacacacacacacacaggcatggaggttgtggcagtgccttgctggatttccaggcagagttatttgcctcccagtccttttccacacaagcccacctcccaaagccagagccaggacagacagcgtgctctacagaggaaccaccctgagacttcctgaaaagggacagagctgaagggcctatcagaagctctgggctggcttccaaaggagacagatctctattccaagagaagtggtgaatgagcttgtgacactggccctgccgtggagtctgcagaggccccagaggcatctttgctggagaaggagagagagccccagagtgacagaggctgagcagctgtcttcagcatgccaagaagagctcaggccctgcttgtagaagctttcactaagccacaaatatatgttccacatctgctgtgtgccaggcacttagctagctgctggagagacgggggtcaaaaaatcatcacaccctgccctcatgtagtttatagtagaatgagggaaaattatgtaaacacatttgaatcagataatgatggctctcagtatggggcctctaccatagcccagcctgaggctatgcaggtcacctatatttctcagttgaggtagatactgttagctccttttcccaagtgtggaaactgaggctaaagtggctcaaggaaaagctgggacacaaatatctgtgttcttaacacctgctatacatggcaacttctacagctgcagagaagtaccacatcttctgacaccacagtgcttgtattctttctggatgaaaagaacttggaagcaaactaattctcttatctgagactcagtttcctcatctgtaaaatgggcttgacttctgccatccccaccttctgtgggtagaatgagaaagaaatgagggccagttcaagtgtgggacacacatctccaaactatcctaacgctagggaatgtagtttgagggctcagtggaggtgccttggatgggagtgttgggattttgagctagggaacttggttttggtgacccagggcatgaggaagcatgccaggttttgtaagaatgagttttatgctgcacctgggattaaggaaggcgttagttcttcggggtgatggctgagggagaagtccctttgagggagaagtctcctctagaagggagcatatagggaaagctgctgttggggtccagggtggaggtggtcaaggctggctgcagaaaggaagggagccccctaggaggcactgtggagcaaaaggtggctgctaccaggatgggatgcgaacacagattcatctagaaacagctccacttgggcaagacttgtttactaggatatccatagctcccatagtgggagctcagtaaatatttatggaataatgaagtggagaggcaaaggaatcaacatgacagcagcatttaaaaagttctccaaaaatcttaaaagacagaaggattgctagccagggagaagaacatactaaccgatgcccaaagtatttacctgaattaaaggcggggcccaggattgctgccgccggaactgaggtggcatgtggcccaccctgtgactaacaggccttggacttacacgtaccttccaccttgcattgtaacctcactgccccagccatggtcatctcccagggcagggactgtcatctccctgtggcagatgaagaagcagcaatttttccaagccatgaagtgaaagaatgatggggcagattcccatccctgggcttctagtttagcactcctcggattacagcagggatttgtttgtaagggagctaacatttcttaagtacctactaaatatttatgagacatggggatagaggctctgcatgtgctgttttatttaatgcatgcattaaattaaatacactaaattagacacaaccccattttacagctggtaaaactgtagctgtatggaaagtggttaacacactgtttggcatgtagtaagtgctttataaatgttagcagtaatcatgagattgtttttatggggtcatccaaagtcatataattaaaagtggtagatctgaggctcagactcaggtctgattccatgcccttccttccactgcagctggctgcttccctgaagggctaggtccagtttccgaggcctatccaggagccatcagctgggtgctcccatccaggccaggggggaagtgtcctttagagaggccctgctggttcactgtgtctgtttctttacagatacaatgaggtgaagaagaaaatggatcctggcttccccaagctcatcgcagatgcctggaatgccatccccgataacctggatgccgtcgtggacctgcagggcggcggtgagccacccaggactgtctccgctttctaggactccccgcccctagccagggcccagctccttgcaaatacacacttctttattgtgcagggcaggcaggcaggcggcgcccaggaaaacaaatcaactccttcatcctagtgctgggaaggtttccagatccctgacctctgctccttggcctggctccaggcagtaagacccagaaagacttctcacagctgcagggcctggagccagggcaggggagggcggaaggcctgggccaggggagaaggaacatgggctctgtgccgtggattcattctggggtttgatccaggcccatttgcgttttgcaggaggcctgtgaccacctcccattagcagaaggatggctccatttgagacaaggcaaactttgtcatgctctgttgctcatgtggcaaagatcctccactcaaccagtttgcccctggccccctgctgattaaaacacaaccagtagcagcgagggatagaatttggagtttgaaaatcatactcttgaggaggcatctgtgagctttctagggtcctggaaatgggtccagtttggctttttttagaggagatttcaactaaattccacagatttttttttttttgagcacctactgtatgctaagcacaggccctgacctccagtagctgaaggtcttacatgtccaagaaaatgcagtgtacaatcagatgctagattaggagttatcttcaagaataaacatctattgagcacctactacatgctagcatattaatagtaaatgagattatgtatgtcaggagtcacaaactccaacagctccatgtgtcaggcaggtagcacaaatgagtaaagcaggcaggggcagacagtggggaactgtggagtctgtgcggaatcagagcacatgcctcatttacaggagacactttcttctcaccttcagataattattggcgggcaagattaggggcctaggcagctgccatggttcacacctgtcatcccagcactctgggaggccaaggcaggagaactgcttgagcgcaggagtttgagaccagcctgggcaacatagtgagactctatctctacaaaaaaattttaaaaaacattagctacacatgacggcgcatacctgtagtcccagctactggggagggtgagcagagaggatcgcttgagcccaggagtttaaggctgcagtgagccgtgttcatgccgctgcattccagactgggtgacagagtgagacctggtctcaaaaaaaaagaatggggcctggtgttgttagatattctatattagatattctagtttttttaaaggaagccagaaatctgtacttctgtgtgactttttggatgtttacatgttggcaagttattcagatttaaagacaaaacaaaacaaacttgtgagagtcaaataaaacccatctgtgggcctgacaggactggatatatcctgttttgccacctctggtacatggaatgtgcttagtttgatgcttgtgttaagtggagttattgtttttaataatagcatatgttatctgacttaatgctcactgcaagccctagaaggttgataatctttatcctcatcttagagatgagcaaacagggaataaaagagcttatttcacagccatttcccttcttccactcccagagggggctcttctgggcttttgttgtgttttggttttgtttttgttttcttttcttcaatcagctcagattgaaacaattgaatttttttttttttttttttgagacagagtctccctctgtcgcccaggctggagtgcagtggcgcgatcttggctcactgcaagctccgcctactgggttcacaccattctcctgcctcagcctcccgagtagctgggactacaggcgcctaccaccacgcccggctaattttttgtatttttagtagagacgaggtttcaccatgttagccaggatggtcttgatctcctgacttcgtgatctgcccgtctcggcctcccaaagtgctgggattacaggcgtgagccaccgcgccccgccacagttgagttttttttttggcggggggacaaggtcttgctctatcacccaggctagaggcacaatcatagctcactgcagcctcgaactcctgggcttaagcgaccctcccacgtcagcctcctaagtagcttggactacaggaatgtaccactatacccagctaatttaaatatgtttttcgtagaaatgggggtctctctatgctgcccaagctggtctcgaactcctgggctcaagcaatcctcctgcctcagcctttcaaagctctcttctcgtttaaaagcttcttccctatgccaggcagaaattcaaagttcccaggaaccttctgtgtgccagaatgtcaggataagggggtcacggtctcttctttctctatcccaggtcacagctacttcttcaagggtgcctattacctgaagctggagaaccaaagtctgaagagcgtgaagtttggaagcatcaaatccgactggctaggctgctgagctggccctggctcccacaggcccttcctctccactgccttcgatacaccgggcctggagaactagagaaggacccggaggggcctggcagccgtgccttcagctctacagctaatcagcattctcactcctacctggtaatttaagattccagagagtggctcctcccggtgcccaagaatagatgctgactgtactcctcccaggcgccccttccccctccaatcccaccaaccctcagagccacccctaaagagatactttgatattttcaacgcagccctgctttgggctgccctggtgctgccacacttcaggctcttctcctttcacaaccttctgtggctcacagaacccttggagccaatggagactgtctcaagagggcactggtggcccgacagcctggcacagggcagtgggacagggcatggccaggtggccactccagacccctggcttttcactgctggctgccttagaacctttcttacattagcagtttgctttgtatgcactttgtttttttctttgggtcttgttttttttttccacttagaaattgcatttcctgacagaaggactcaggttgtctgaagtcactgcacagtgcatctcagcccacatagtgatggttcccctgttcactctacttagcatgtccctaccgagtctcttctccactggatggaggaaaaccaagccgtggcttcccgctcagccctccctgcccctcccttcaaccattccccatgggaaatgtcaacaagtatgaataaagacacctactgagtggccgtgtttgccatctgttttagcagagcctagacaagggccacagacccagccagaagcggaaacttaaaaagtccgaatctctgctccctgcagggcacaggtgatggtgtctgctggaaaggtcagagcttccaaagtaaacagcaagagaacctcagggagagtaagctctagtccctctgtcctgtagaaagagccctgaagaatcagcaattttgttgctttattgtggcatctgttcgaggtttgcttcctctttaagtctgtttcttcattagcaatcatatcagttttaatgctactactaacaatgaacagtaacaataatatccccctcaattaatagagtgctttctatgtgcaaggcacttttcacgtgtcacctattttaacctttccaaccacataaataaaaaaggccattattagttgaatcttattgatgaagaga

SEQ ID NO: 95 - DNA, 183825 bp, Homo sapiens
cccacggatcatcagaaggcgcggacctggaggaggcgccccagaaggcgacgcctcttgcctcctgtctctcgcctctcgaaggaagtttgctcttaatttcagagccgggttcgccgtcggatcaacctccaggagctagcagcgggcgcggaccgggcagtttccgcgctcagcacaggcagctcgcggtcatgggcggctcagcctccagccagctggacgagggcaagtgcgcttacatccgaggtacgcccgcccgcccgggggcctggggagcaccctgacccgtgcaccaggctggctgccgcggtcggggccccaaggggcgcgccccgggccctctccctgtagcgcgcggggatccccgaccgcagcccgcccgcgcgagtcgggtttcctgccccagccggcgcgctccggcgcgggtgtggaccggggaccgggagggcttgggagcgaggcaggtgcaggatgcgggtggggacgccggcgccttcgccgctcccgccgcctcggggtcagtgccgcccccgcccggcgcacttcgccctccagtacctgccctggactgagttctgagcggtttctgaactggccgccaagagagcagcggggatatcccgcgtttctagagatacccctggggattcccggcagctaaagcagaatttccctcttagtaatgttggcctggctttggaaagcgcggcgttggccgcagcttcgctcgcacttcatcctagcacttgcaggatgatttcatcagcggcaaaaaggacaatgtcatgccgttcccttcccgccccggagaggggcgaagcaaaagaggaacactggcgtgctttgtaactgcccgaaagttacagatggggagaaactcatttagggagaccctcagagatgtggggactcagtagagagcgtgaggctgcaaaacaaacaaaacaaaacccaaaccgaactgaaactgcaggaagtcctgactcgttatctcctttatttcctgggcgtatttggcctcccctcttctcaccccccaccccaaacttgccttcaaccgctacctaacatttggttatcttaccaatttactgtctttcccccgccccgccgccagatcccccaccctcggcttcagaaatatcttccagactatgtattaaactctaggtttatttggcccttgaatcctttcctaagaggaaatcatttatttggtgttcttattccacatttgttttcagtcaccacaacatttaagaccgttttaaaaagatatcaaatcagggtacgtgaagagcaacggagctgattttacagattcctgctctggtgcttttggaggtaaaagatcctcaacaacctgtactgtcaggggataacacttggtcaagtatctctttgcttttgtttgttaaaggggaaaagacggatgatttatttatattagtaaaagagctgaactaagcttaaaagaaataaatgaagcctgccttagtcttaaaaatgtggctacatgcttgtgttaccagtgtatagggactgaaagggcaatcaacagaacgtagtgagaaagggcttgcatttgaatgttagcaaagttgtgtttaaggcatttatataagactttatttcactggaaagcttaggagcacctaatgtggacgcatggccaagtacactaatcatttgaagttaagcaatgtgaaggattaacatgcttaaagaagacttcctggccgtgccatttgttgctattgatgcaaacattgtactcagataataagaaaatgctattaatttctttattctgaaagctattaaattattacatatacaaaagtacgagggagttagggcagatgaagaacttgtaatgcaagtgtttgaatgagtaaacctatagcatatggtgtgacagtcattacatttcccagtcttgttcagctttctctcttcattctatattcaggagggcacttgcaaggtatgtgtagtgggagagggaagagaagagttaaagttagaatacctccagggaaaaagactcatcacttcatgtgagaatgctagtcttgccaaaagagaaaagaaccttggaaaaatgcatggtgttgtacattgttagtgcatgagcaaatgagggtcacagggctgtgatttcctgatggttttgaagcccaggttcctgagtaaaatcatagccctatctttacctctttgcccattttttagcctataaatattctcaagctttgattcaattgtaagcaaaacgattggaagtatgacagtaaagtttaaatatacttttatgacctgtttctcataaagtagccatcagtgaaatatagatttgaaagctcctgaagctgagacaataactttcttttaagcttgataaactttgctaacaaggagagtagctagtcaatatattttgagtgacttttgttaactttattttgtatgcatcataaaccgctgtatgctactgacgctgaatcagcctttactttaagacaaatcatttaacagctgccattccttgtgtgcctcaaaacatctgtgtcatatggatgttttgaaaatacattgtttcttaggatttagttaatcttcaggtaaagatatatcatctacgttaaggagttacttcatttctaaagatgttagtttgggaaattacggcaatgctcatgtttcttacaacagaataaatttttaggattgtttctagaagcctttcagtagtgtcccttgataagatgtttctattaataaataatactgagaccaacttgtgatcacatgagctgtgtcatatgttagtcttaagtgatgcttttagcactgacctaaaatgatcctttttttttgagacagagtctcactctgtcaccaagctggagtgtagtggcacgatctcggatcactgcaacctctgactccctggtccaagtgattctcctgcctcagcctcccgaatagctaggattacagccacgcaccaccatgcccagctaatttttgtatttttagtagagacggggtttcaccatgtgggccaggatggcttcgatctcctgaccttgtgatctgcctgcctcggcctcccaaagtgctgggattataggcatgagataccgtgcccagccaatcttttttttaatgaggaagaaagctcatagattccaggcatcagtgatcagtttgggtgctcttctctctttatgccatgttttcttttcttttctttttttagttttctgagatagggtctcactctgttacgcaggctgagtgcagtggtacaatcactgtgagccttgacctcccctggctcaggtgatcctcccacctcagcctcctgagtagctgaaactgcaggtgtgtgccaccacgcccagctaattgtattttttgtagagatgggattttgccatgttgcccaggcaggtctcaaacttctgggctcaagcagtcttcccgccttggcctcccaaagtgctgggattacaggcatgagtcaccatgcccggcctctttttctgtaaagcttttggtatgcatgaaattaaactatagcttaaaaaaaaaccccaaaacaaaaccaaaaaaccccccacactgtgttttcctgtttatgcaataattttatttccttctaaaaattacccttgaatttttaacgaatcaaaaagaaagcaaacctgaaagatctcccacataagaagtcctgtggagggtcagaaaagtactggacagtcagtgccgcagctgaaaaccatgggataaacagatcctagtgggcacttgcaggcctgccagcagcaaataccagttaggaaaactgttttcccccactggatttattattgcatagtcagttacataatatataaagggcccagtggcttcctccaaaagcttctcaatgatctgatgcttataaaataagaaatgagtttcagctttaaaatagcacatatttttctcagggaagttccctcttatttatacaagggttaacttaggtggctagatacaaagtttaaagtgatgtgtctagaatgaagtctccatgggcaaggtggaggatggggagagctgtacacatctgtagtctacttagtgtggatgtgtcgtactagtccacacatttgcttcttcggtcataatttgttggtgggagatgggcataagaactggtctgacttaacctgaatatttttggtagtgtgatcttagagtccaagttggctagtaatggcaatatactatgatgagaaagttaggaaatgcattatggtagacaccgtggtatgtcaacccaacatctttttcccactcctccattttttttttttttttttttgagacagggtctcactctgtcacccagactagagtgcagtgggacagtcatggctcactgcagcctcgacctccctgggctcaagcgatcctcccacctcaccctccttagtagctgggggtacaggcatgtgccaccatgcccaggtagtttttttgtatttttttgtagagacggggtttcgccatgtttcccaggctaatctcaaactcctgagctcaagtgagccacctgccttggcctcctaaagttctgggattacaggcatgagcctctgtgcccagcccccattcctttttctaacagaactccagttttgttcaggcattaaaactcctggccaggtttggtggctcacacctgtaatcccggcactttgggaggctgaagcagtaggattgcctgagcccagaagtttgagaccagcctgggcaacatgacaagaccttgtctctctctttaaaaaaaaaaaaaaaagaaagaaactcctgatattgccctctgtttcagagacactagccccatttaaggtccctgaaaggtggctgctgattggtctgtacctgttgtggtggtgtggtctccttgccagtgattatagtaggcatgggattatgttgccagctggtcagtgatgcttgaggggaagtttgccacctgcttctaggcgacttttcttcccttttaaaaaggaggcaaagtgaagggcacttcttctccatcttttgactttgttgcatctgaatgtgatgcctgcaactgctgtttttatcttgatgagcaggaggggagctagcctaaagacaaagccaatacttggagcactgcaaagctgaggtgtctcagagaaaagaagctagagccctgacaaactttgctgatagccactatatactaaccctgcataattcgtattgtgagagccactaaatcccctttgaattggaatagtgaagattgctagttatccacaatagcattctcccattatgtttaatgatagaatccccaaattttagctgtccacatgaactcccataataaagatatttcccaaactcctttgcaactaaatgggagtatgtagctgagttatggccaatgggatgtagatagaagtgctgttctagaaagtgacattaaaggggaagggtatgaccatcttcgtccaagtctccacactgctggctggattgtaaccatggctggacagctgtcatggaccatgaggtgtcctttcaagaaggagcacatgtagggcagagtaactggacaaaaggaggctaagttcctgtggtttcatagagaagaacctccataccagccctggaccatttacctctggaccttaaaaagaaagaaagaaagaaagaaacttccatctctttaagccagtgttattgtggttttattgttgtccatagacaaacctcattctatctaatacagttatcttctttttacgtgcggcccaaagcatcctaaccagtatactaaatgctgccttattgggtcccctttcagaaaaagtaatccaaagaaagtagaaagtgggtaaagattatagtatttgtctcagctctaaatttgtagacatgaataggcttttgtaagaagtgagaaattgcagctcctccagagtagtggggatggaggaaacaggagaaagagggtccactatgaatagtgcacaaatgcatattgatcactttatattttaagtgaaaaaaaatgccttcaagcatgccagactaccaaggaagctagcaggagtttcaaataagtaaaactactgcaaattaggagttgctagtatcaataattactttctatttcctttggtctttgtgaattgaaaccaatactttagaaatgggaagctctttaggaaaccaaatctcatgttgcaaagccatgaaggattttgtgagttgtgatttctttttttttttttttttttgagacggagtctcgctctgtcgcccaggccggactgcggactgcagtggcgcaatctcggctcactgcaagctccgcttcccgggttcacgccattctcctgcctcagcctccccagtagctgggactacaggcccccgccaccgcgcccggctaattttttgtatttttagtagagacggggtttcaccttgttagccaggatggtctcgatctcctgacctcatgatccacccgcctcggcctcccaaagtgctgggattacaggcgtgagccaccgcgcccggccgtgagttgtgatttctaagagtcaaccacaaagacagaaaagacagtagactgagacagattaacattttctcctgtacttgtggaacaaagagtgactttccctcttgtggcttctaatacaagccttgataaatcccatggagttagatgatgaatcaagccctggtcttgatgaaaaacttctttttactatggacgttggctgtaagagggccacatcatcaaaggtgctctagtaatagtaactactaggatgacaatagtaatttttattatcttttactgtgaactactgagctttttactttattgtaatctctgggaaggtttgaactgggttcacaggtagaaagtgcaatagcaggagcccaatttgtaaaggtagtttctaatttcattaatataaatgtactgtgaacgttttacaaaatatgcagtgtgaatcatggcagtgaactttaatctcctaatcagaaattttaattttttttagtatagctgggtaactctaagaaataaggtacatataacaatttgcactgtgaaatgggaaatgaagtcagaagtgaagataaaagcataatggaaaggaagacaggagaataaaagcacaattcatctgctacagtctgtttaaggcactttcccaacagttcaaaactaacacacatatgtacacacacacacacacacacacacagagagagagagagagggagggaaagagagagaaagagatttaacagaaccccaaatgcaatacagattttctcctttgaaactggaaaattcattttaaaaacagactagcaagttgctgccaatgcgaaaatgcatgccagcttttaaaaagtgccccctaccttggtactgtatgttttttctcacttagaaaagagaataaacgctttagaggtatgaaagcaattaattcacttttgcaaattgcaggttctaggacctaaggaagtttgtatttctatgcttgatgttgtatggaatgagtctataggattaaaataaattaatagtttttactaggagccccaaagtgacttttaaaaggtccatggtctcaaggaattttggaagaagggtaaatgtctctatgccaaaccatgtggttttttttctttttcctttttaaaaactatttttattttaaaagaaaacataggcccagacagccacacaaaacaaatgcatagcttagtgaatcattataaggcaaatacttagtagccactacgcaggtcaagacatagaaagagcttcactagtcatcaaaggaggcttctgtgtgccccgtcccagttctagacctctttgtttctccaaaaatgaccactattttcagttatctatttataactacctcaaagatcctgactcttaaaacaggtatttatttgctcacaattctgctgaactgggtccaggctgggtggttctactttttatttttgctggtggtcattcctgtggatgcatgcatctggtggatcagctggtggctggacttagctgacaaggctttctttctctccaggtggcctttctacatgacctctccaataggatactgaactgtttaaatggtgggtcaggatcttacattgctagagtgtaaaagcatgtagaagcttctaggacttcttgtggcttaggcctggaatggcgccacattactctgccacattttgttggttaaagctggtctcagagccagcccagattcaagagaggactacacacaggcatgaacacctatgcaagggctaccctggtaacagactaccacctcactaatcctagcttttataataatgtctgcctctatttccttatggtttcatcacccaactatgtatttgtaaacattatagtcttactcacttaaaaagatgtctcttttaatctacacatttcccttacatcttttactcgcagattatctgttgaaagacttgagctgtttgatatgcagagtttttcacagtctggagtttactcatggtgcagttccacacatttctcctgtattttctacaaattgacagagatagtgagacttgatcagtctcagaatcaatccttttttttaacttttattttaagttcaggggaagatgtgcagcgcgtgcaggtttgttacatagggaaacgaagcgccgtgggggcttgttgtacagattatttcatcacccaggtattaagcctagtatccattagttatttttcctgatcctccctctcccctccaccgttcaccctctgatagggctcagtgtctattgttcccttctatgtgtccatgtgtacttacctatcatttagcgctcactcagcagtgagaataaatggcatttggttttctgttcctgcgttagtttgctaagaataatgacctccagctccatccatgttcctgcaaaggactgcatgcatgtattcattgcagcactattcacagtagcaaagatatggaatcaacctaaatgcccatcaataaagaaaatgtggtacatatacaccttggaatactatgccgccacagaaaagaatcaatccttttgtgaagactataggtggtggtgtgtattcttctcttttttttttttgagatggagtctcactctgttgcccaggctggagtgcagtggcgcgatctcggctcactgcaagctccaattcccgggttcacgccattctcctgcgtcagcctctcgagtagctgggactacaggcgcccaccaccacacctggctaattttttgtatttttagtagagacggggtttcaccgtgtcagccaggatgttctcgatctcctgacttcgtgatccgcccgcctcggcatcccaaagtgctgggattacaggcgtgagccgccgcgcccggccctgtgttcttcatctggaggcacataacagctggctgcctctctttttgtgatgttagtagctgttccattgatacttatagctgagacccattaattcactgggggttgaactgtctccgctttagaggaacttgaaattcaatgagaaatagaattaaagtttttgaacggtgaaataataaaggcaacatatattaggtacttcaaaatcatctctaccctcttggaaatgccaccatgaatttcagtattctctgattcggcccatgagcaacactggccaggacagacctctctttcctctccgccaaccttccctcttgtcttcccctagaaagctgccatggagtcttcgttgaacccttaccatgggacagacactgagctaagagcattgcatgcatgagctcacataatcctcacaacaccaaatggagatatcattagctccgtttcacagaagaagcaatcaaggtttacagagaatagagaacctggccaaagtcatccagccagtatgtagtagaagaaggtttgaacttaaatactttctgcctccaaagtccttgctgttaaccgagctgtgctgcctcccagatggtcacagtcattgctcctttcatctgaatttcctcttctctgtgcatgctttttctcacatgagtaagtatcagaaacttttcctgttcttggattttaagccttctggttttctttagagcactcggaaaatcctatcttttgctagaagtcctgactgaagggagctctgtgaaaaactccccatctgcatcctaggcaaactcgttgtcccttccactcctcagcagtcactcaggcattaaacacttacaggattctcattcctgcaaactattaccatcaatggtagaactgaactgaactcattgactggaaatgtatggctcttggttccttttttttttttttagcttatttagtccagtcccttggtttatttgtctaatctctgtgctggtataacaccgatttagttattattgctctatgataaatcttaataaccaaagggcaagaccctctttcttcttactcattgtcagaaggtgtaggctatccttccatatttgttaaactgttaatttcatgaaaaaccattttgtaattttattgaaattgcatgaaatctacagatgaatttaggaagaagtgacatctgtatgatattgagtctttcaaaccttagtatggcacatctcttccataatacatgcttttctttcatccttaaagttgtatagttttctacataacaattttacaaaaatgtttaataagtttatttattggtgcctttcactttttcttactattgggattgtgttcttcttttctattgtattttccatctggttattttaagagcaccagaaagctattttgtttttgcatgttgatctttgtatcctacaaacatctcaaggcctcttattagttgtaataatttgttcattcactctgattttttgtgtgcatgtattatctgcaaatttgacagttttcaattcttttaaatctttatacctcattttttattgaatttactaggacctccagcacaatattcagcaataagaatgacagcaaacatccttatcctgttcctacttgaaaagggatgttccccattttgctattaagtgtgatgttaaccatagatttatggtttagcttaaggatactccccccttttcgttaagttgcttaaaatttttaatcataaatatatactgaattttattaaagacttgattttttctaataatattttaatgtggtcattagaatttcaatatttaaaatattgttccattgctaagatataccctacttggtcacagtgaaatgtctttaaaaaatttttatttttctattacatggaattttgatttgcttatgtatttttttcttactttaccacttgcattaataaaagtcatacaaaatgaaaaaaaatttattgggggttgaaaaatggtgatattctaatatgtcattttgttttcatttattagctgggataattttatagagcaatacttcccatatctatcatttggttacctagtatgatagttcaaaagcaggaaaaaaacattattttttccttttatttaccagtgtttaatataagttactggtttcttgacatcccttaaagatgatcaattgactataaaaatcattatgaactcacaaatcccattgtaattcttattttattgaagctccaatttcccatcattggccaatgaaaaactcttcaagttggctcctgaatcttttggaaattaccccagtagtatttgatagcttccttgccatctggtatgtcaagatgttttaggttcatcctgtttctttcctgtcccatacagggagtaagcaaaatctataagaacctctgatttcttttagtgggaaataatatttcaatattacaatttgaatctagctatgtttactgctacaactgggttggccattatttctggacttttttagtttatagaactagggaaaatatatctttttaatattatatttatacatatccttttccacactgagaatcatggttctcaaaggcactaggcaatgatagaattaaatatacacaaattctcatttgctttatcataccaaatacacacaacagtctcagaataataatacaaatactgccatcatcaattatgattatggaaagctgttgaacaaactgtttttaaaatcagagacaaactttttgtatatgctaatccaattcttccccacgtttattttatgattttactacattaaaccatataatcattatattctattctcttttctcattcactctttgtttcacaatgaagtgttatttaatgcatcagtccttatgttgatgtctctctctggtgtttagagctcatcccagtagattcctcaagaagagctcatgggaacgtaacaaagaagtatgaagataggattaattaagtggctcagtgatatcaccaaaagccagcttatttcttcctactgtctgtggcccaggtctcttatgcttgaaaggtggctgcagcagtaaatagtattaaattcttacgcacagcaatgtcctagaggctaaaaagagatctgtctattctttgagtctccttataagagcaaagaagcctttcccagatgccttactagcagactttcccttacatcccactgatcaaaatggggtcacacattccttcctaagccatcactggcaagagtatggaattatcatgatttggttagaccaatcaagattcacccctgaactggggttagagccatttctctgaagcacatggttatagggagggtcatggatacccaaacagaatcaggttcagtttagcaagaaggaagcatgatggctattaagtaggtaaccaacattacagattttgataagtgtcacgaagggattaaaaacagcactgagatagaaaactgatggtggcaattgggcaaggagatgagatagacttggctgtggtattcagaaggataataagttgctatctgtgtgaagaaccgggggagtatattttggttagaaagaacagcatgtaggctgggcgcggtggctcactactgtaatcccagcactttgggaggccgaggcgggtggatcacgaggtcaggagacccagaccatcctggctaatacggtaaaaccccgtctctactaaaaatacaaaaaaattagccaggcgtggcggcaggcgcctgtagtcccagctactcaggaggctgaagcaggagaatggcgtgaacccaggaggcggagcttgcagtgagccgagatcgcgccactgcactccagcctgggcgacagagcaagactccgtctgaaaaaaaaaaaaaaaaaaaaaaaaaaaaagaacggcatatagaagggggaggagggggaagtacttgaaggaattgaagaaagggtgttatgttgggagtgtagtgagcaagagggaggtttgatgggaggggatgcctattaatattttgttgcctggctgagcgtggtggcttacgcctgtaatcccagcactttgggagtccgaggcaggtggatcacctgaggtcaggagttcgagaccagcctggtcaacatgttgaaaccctgtctctactaaaaatacaaaattagccgggtgtggtggcacacgtgcctatagtcccagctactttggaggctgagacaggagaatcacttgaacctgcagtgtggaggctgcagtgagccgagactgtgccactgcactccagtctgggcaagatagagtagactccgtctcaacaacaacaacaacaacaacattttgttgttgttgttggtgttgtctgtctgccaccactagaatgtaagctgtatgaaagcagggtctttgtcttgattcattgttatgaaatgaatagcaccctcagcaaatagatcagtgtttggttcacagttcctgacagataaatatttgcttaatgcatgaatgaaaggagaagaaaaaattttaaactgtaatgaatatcttagaaaataagagaagtatttcatttgtaaaacaagttcaggatgtgatgaagaaacaataatagaataagaaagagctcttggaaattaaaaatctggtgatcaacattttagaaaatacaattggtgccttggaaaataaagttgaggggatcttgcatctaaattctaagatctaaaattcttatttaaatttaaacagtacatttcaattattgttattaatttaattcttctctctaaaaaatcattttaagcatgtatatgtcagatattacacatttgccatagttgcttataaaacttgtctttattttaactttaagcctctgtctgctttgcttagacaatagagtacaaagattaacagatggaaaatagaagaggcaatataaaaaaaattaaagggtcaatccaaaaatttcaatatctgactaacagaagtcccagaaaacaagagaacaaagaaaatgaacgggagaaaattattaaacaagtaaaagcttattttctagaacagaagatcatgtgtctctgatttatagggccaaagaattcctggacttcactcagagctggaaatagttcatgcttccatcatccaaagtagaaaggccttatgatagatatgagttagagtcttcagcagtagtgagcagaaattagccctagactagaaggctgctctggacctgctctaataaaaatttaaaagcaaacctcaaacagatcaaactgatcccaagtaacttaactgcctgcttgaataaagtgcaaattctttataagaatgcaacaaaatacccatacaacaatgtaaaattcacaatatctaatatccatcatccagttaaaaactatcacagtaggcagaagaagaagcaggaaaatatccacaagtataaagaaaataaatcaatagaaatagactcaggaattatagacatggcgaaattagcagacaaagatggtaaagcagtcattatatgctccatgtgcgaacacagaggcaaacgtgaacatgatgagaaaaatggaagatataaaaaaatcttcctagtctccagtcttcaggcaagagcaatatgactactgtgtttctgtagcctgctggaacatctaggcagaatgtagctgtactgccctgctaccaacattctccatggagttgggagaggaacgaagtagcctgcagagaactgaatgtacactgggagctgctgagatgtggctggtctggggccagacagctgagcaggatcagttcagaaatgagggaaaactgtggatgttcctttaaaaagcacatcattattggtggccttgtgcccttaattctggttcgcacacagaacaagtgacaatttccatgattagctaaaaagaattcagagattttccaaatttggattgaatgcgtttgtttaaaggattatttcctgtgtaactcattcaacacaagttatacaggaaaaattgcctaagcaaagcagatgcaggcttagagttaaaataaagccaaattttatgagcaacaatggcaaatgtgtaatatctggagtataaatatttaaaatggttttgttagagaggagaattaaattagtaacaataattgaaatgtatggtttacatttaaagtaagtaagaattttagagcatgactaagacctgagcatgtcaagtgagatatcagttcctaactaaaaatgctaactcctggcctgagaaatgataatcactgtagtaaaagctaacatttattgagtgcctactatgtgccaggcaagtaaatatcttagacgaaaggtaacagggtatcaaatgctcttccagaaattctaagtgtttcttttagaaattccaagtatacatagctttttctttaatgaaaaggagtatcagcgtgataggatttgaacgctcagctgctttagctaccttaaatgagctaagtggaaacatttactaaacttttgattcaatatcttaattctaaattatttggctatttgtgtgtgtgtgtgtgtgtgtgtgtgtgtgtgtgtgtgactcctctgtcacacaagctggagtgcagtggtgtgatcttggctctctgcaacctctgccttccagcttcaagcgattctcatgcctcagcctcctgagtagctgggactacaggctcctaccaccacagttggctattttttattgttttgtatttttagtagagatggggtttcactatgttggccaggctggtcttgaactcctgacctcaagtgatccacctgccttggcctcccaaaatgctgggattacaggcgtgagtcactgtgccaggcctttggctactttttgaagtggatattttcagtgggtgagatggtagattataaatagcttaatccagaaattaaaagtcacctaaatgttagcaacacctaatatggaatttatgaatagcccaaagcagcctttgcagccactttaagctaactttaaataaaatgatacctttatgcaacttcttcattatcaaataaaatatttatatttgggaagtaaggcatacaataaaaaataaataaatggagctttcacctttggaaaacaggcacgataatttcctgaggactcgctgaatctgaagttggattctctggagattttggacttgtcaactggctgccttcagtttctcctatgaaaatgaggacagtagtaatgcccagtgagaaaaggagggtcagaaatgaataatataatgtaataaatgtgatataattctcacatttcccagtcctaccattatgttaatcaatttgttttactatcagtaatggcatcaggcctttgcagagtaaatgattggctttcacatactgctgaataatacctagcccacacatttgttctgcagactaattaatgtttcagagtgtttaaacacaatgcctctacagaagcaatggcattataatgtgttgggacactctagtgttgtaattagtactaattaggttcttttcaacagcttgttgaatttacaaattactgcctgtgaggtattctgctttatttattcattatgaaagagtcggacgcagggtttaaataggcacctttaaacaactattctcaaggtcctacacatactcctcccctcaaaccagggaaggacaataggaagacacccttctcggaatggttgtgagggagagcaaccccagtgctgtgctaggagccagctcacactggctggcaacagctgaatccaggcatcttttcctaactgtgagctcagtgatatcacattgatagcttgaaaccagcgatggtgggagtctttttgtgttgttgttggtttttgagacccagtttaccagcacatcactgctggtgtcttctcttcaatgcagggaagctggtggcaatgttaaccagtggcagtggcctgaagccatgtttcagttgtacattaattagaatggtctaactgctgaaacagacatcaacgctcagtggcttatagtgatttgtatctcactcatcacactatccagggtgatttggtggggggctaatgaagggcagtgggcttgtgtgtggacccagactcttttcatctagtgcatggtaccatggacacctttggtggtttgttaaagcctatggacccctttttagagtaacatttttaaatgaaaaaaatatagagaggatgataaaagaaaccaattttattgaactgtagttatcaaaatatttttaaaatctgtgatatggtaatatatgtgctctttattaatgcattcaatgacaaggtctcatggagggtttaataactactgtcattttgaagaagtgctattctaagatatgcagcaacttaaatgtgctacgaaaacatctgtgagctctattggtgacaaagtcacaagtactgctaaattacactgttttgttgcctacattcagggttggagaagtgctgaatttgagttgaaggttaataaaacacaggtgttcttttcctccattcagtgtttggatggcctgaattctatccacagagcccatgagggtctacaggctccagatcaataatctctgacctggctgggcatattccagcaccttagaaggcccaaggcaagaggatcgcttgagaccaggagtttgaggccagcctgggcaacatagtgagacctcgtctctacaaaaaacaaaaatgagccaaatgtagtggcgcatgcttgtagtcctagctgctaaggaggctgaggtaggaagatcgctggaacccaggatcaagagatgctgcagtgagctgtgattgcacaactgcattccggcctaggcaagagtgagaatttggctctaaaaaaaaaaaacaaacaaaaagaaaaaataatccctgacctaatggctagtggcttcatgattcttagggccacaaagacactaagtggacactgtgcatacatctgcagataagggcagatagacagtggaggattatgtgggtagattttgtgctccaggcctggaggtggcatacattatttctgcccaaccttctcatctctacatgacacaccttgcctttgtatctttccattggcaattcctgtcaaaagtcctatcccttgtttttattgtcactttttcctttatatcaccctcaacatgttgaacctaacatttcaatgaatacattttctactttaagtggattctaattttgaaggcagggtataggcttcatattctttatgtaagaaaagttgagtctgggctctgtggctcacgcctgtaatcccagcactttgggaggctgaggcaggcagatcacgaggtcaggagattgagaccatcctggccaacatggtgaaaccccgtctctactaaaatacaaaaatttagccgggcgtggtggtgcgcacctgtagtcccagctactcgggaggctgaggcaggggaatggcttgatcctgggagacagaggttgcacactccagcctggtgacagagcaagtctccatctcaaaaacaaaacaaaaaagaaaaggaaaggaaaggaaaggaaaggaaaggaaaggaaaggaaaggaaaggaaaagaaaagaaaagattgaagccttttatatctatttgtccattgcagcagccattagggacatataactaatgagcacttgaaatgtggctagtccaaattaagatatgatgcaagtttaaaatacacaccaattttgaagttttagtacaaagaaaataatgtaaaataattaatattatttaatacaaaactgctatttaatagcaattacatattgaagtaatacaattttggccctatgattgggctaaataacatatattaaaactaatgtaatcagtttttaaaaaattttaatgtggctactggaagaccaaataacatttgaggcttacatctatggctcacatggcatttcttttagacagctgttctcgaataaagattcatagaagattcatagagctgcaaggaaacttagagataagcatctaatccaactcttttattgtaatctcagaagctgaatgagctgttctcatctgcctagctagtaaagcacacataggcttggaattcaggtctccacactcctggtgcagagctcttttcataatccatggtatccaaccaaaccaaaccaaacatttccaagatttaagtttccagttcaaaccagaatatactctgattctgagttacacataagcatcccgaaaatgacaagccttttttccaatctgatgtattttcaaccctagacttaaaacttaagtataatttgccctgcccctgaagaactgcaggcacaagcagccagccagacaggctcgtgcttgactccctcattaacccagataaaagaggccctgaggtcatttgcctttgccctggtcttctgcatttcccttagctgaatggttaaactcacaaggaaatgctaagattttcttatctcttctgaattttctcttaaagggatggaaagatatgaaaacctagtatttcacatgactacccctttttcctagccaggaggtggcaccgtggatagcagttaagggaaataacagatgagtttcattctcttttgtctcattttctgttcttggcttccactctagacctataaccaaattcccaaggtctggaatattttctgaactttttgtcctagaatagtccaaggtttcccccatccaacttactctccctctctaactcaccgatttccataaaatcacatttgagccgttgtgtatgtagataatgtttcagataagggcttagatgtttaaaaagtttcttatcttaaacaatgtagtaccaatacataatctttcccccttaggaattttgagtaatgaagtgctccttgaatcatataatttgcagttgaaattgaaataacataattaccttatccagtgttctttggaaaacaccgtcactagactctgaggttgtctcattttctctgaactttctcacctttttcagtgatttctggaatgttaagttctgagaagccataagatatgtctcctgacccatgacaactttagtgactaacccacttactcacacatttcatgtttcagcatttcctcccttcggtatcattatttggcacttccacgagaaactcctgaggcgtactatagctaactactttgtttatttcagatcatcactgctattgacatcagtggatgtctgagaaagggagcacaaaccttcatgtctccacatgtttttaatgaaaatatttgatgccttaaggtgtgctgataaccaaactcagcatttctccagggatatgtttaaatttctgcattgttcattctaaggagaaatatacacatatgatgtattttgcaaatgagcataagtttcactaagatatgtaaaagacgctttcaaaatgatatttataatatgtctcatttttagaagagtggacaaaataaaatgaacttacagagcaactaaacccttaagaaacatttaccataaaatgttaactgtgtagctttcttgattcagtagggcattggctgtggaggtagagcacccaagtacagataatggccccatctcttgctagctgtgctaccttctgcaagttatctagcctcctctaaccttggtttcttccactacaaagtggggataatagtacctccgaaggctgttgtaaagactcattgcactaatcctcgtaaagcacttaacactgtgatagggacatggactctcaacaactggttttatcacttataatagtataccttctgcaacctaaagtcaaagattttaaataaactgtacatcaaataaaatacttttcttcaaaatccttagtcaaccattcctggagccagttggaatcagaactgaatttctatatattttctataatttatggagttgagacttcagtatgcttcagacttaatagacagcataaacttgaggggcaagtacatgaacttggtgtagaagaacttgtttgaatcctggttctggcacataccatgtgactttgggcttgtctttaggcctcggttttctcattagtgaaacaagttgtttaattgattgattaagtcttttcaaaaaaacttacttaggatgaacttataaaccttaatttgcagcatttagtttagtccaagcttgtgcaatccatggcctgtgggctgcatgtggcccgggaaggctttgaatgtggcccaacacaaatttgtaaactttcctaaaacattatgagatttttttgtgtgcaattttcttttttagctcattagctatccttagtgttagcatattttatgtatggcccaagacaattcttcttcttccaatgtggcccggggaatcccaaagactggacacccctggtttagcccttaaaacctcaaacgtcatggaacacatctatttctttttctttttctttttttgagacagggtcttgctctgtcgcccaggctggagtgtagtggtgcgatggctcactgcaacctctgtctgctggactcaagctatcctctcacctcagcctcctgagtagctgggactgtaggcatgtgccaccacacctggcttattttttcaattttcttttgtagagatgaggtcttgctatgttgcccaggctgatcttaaactcttggactcaagcacttgcccaccttggcttcccaaagtgctgggattataggcgtaagccatcatgcctggcctatctatttcttataataatgaagcattcattgtgtgtctttccttctagtcatcaaatagaaatatgccctgttctgtgaaacgggatgaacaaagcagactaaatccctgctctcatgggacttacatcatagaggtggtggtagggagaaataaaactaagaaataataagatggtatcattaccaaggatgatgaagcagggaggtcagtgtggttacggaggaatgagcaatgggaactgtgagcagagacagggcagcaaggtaggtgggatcacatctcagggggacttataggccattggaaggacttgggcttttactctgtgtaagaagagaagccatggggagtttcgaggagaggaacgccatagtctgaattatctgactgttgtgtagagaatagactgtaggggggacaagggaggaagcaagccaaacaggaagaagctggagctgtgatccgggccagggattatggtggtgtggactagggggtagctggaggtagggagacatggttgggttataaatacattttggaggtagagctgacaggatttgctgatgaagtatgtggaatatgaggggaaaaaaagtggcttcaaggatgactccacaatttctgacctgaacaaaagaaagaatggagttgctgcttattgaaagaaggaagactgggggaacacatttgatggagaaaatgaagagttcacttttggacaggctaagattgaggttcaagtggagatgtcagctaagcagatggatgtctcatctgataatcactgtcatttgttaagtggcatccttaattacctgccaggcactagggtaagaacattacacgtgttacctcatctaaattctcataataaccctccaagataggtactgttatcatttgcagatggtgagactgaagcccagggagactgtggcaaaggccacacagctaatatttaatgcacatggtcctccttgaagccaatgcctcactcttgcatacaatgtcactcactacatagccatgagaggaggcggctgggtgtcagaaaaactgagctgagttcatgctcccatgaggagtttgctgtatggcttatatccattgcctcaacctctttctgtcttaattctcatggataccttgaaggttattgaattcaagtcagaaatatcacttactatttaagagcagaaagatgctgatgatatatgctcacaatatattttacttctgaggattacaagtaattttcagcaccaaatactgtaattcaagggagcggtaagaactgtcatgtaatgaaattattgtttcccaaggaaatcaggttggatgctgttctatgtcgattattgtcttcttttatagctgaattaggcatgtggccatgaattttcatttctagcataacctaatcgaaaaccagcttcttatttgtgatgctactgagcaagtgaagtttttcaatctatatttcacgatagcctttagatgaacaagcagaagtataatcatgatgttctcatttgcataagcatcttcttgacaggtcatcagatatctttattgttcttgggtacatttcatgggctgctgaaagcgtgcataatgatctctagcaattcatctttttacctagcttaatggcccttgttacatattaggagaatgatggagtgaaaagacaaagtgtctggggcctgcctgcctaagaatgtggagaaaattacattggggaataaattatattaactccttctcatcattcacttaccttttgtaaatttcatctcactatgctaaacaatcctggatggcctgggaaaaaagtcgtgcaccttctcactaacaggctcagattccttgttcatcgttaagataatagagaccattatattatctcatgagattatctgcatctaaattaacagactcctctgcactagtgaacagggtgaatgcattcatttgggttggggttgggtggggttcttacctttataactcttgttttttttaaaatgattttggagataaagcaaataaaaaatcattatcttgatagagtagttttaaataaacatttgatggaattatctttttattgtttcattcttggcatccattcaataataatgatggtggtagtgatggtgatgactgttgattgcctgggggtgcaagagccttacctatggctggtctgtgacagagcagggaccccaacccagtactgcataattttctgtggatattgtcatccccaatttccccattagaaactgagacctaaattctagtctgagattcttcacttgattatgtgccccttagcataatcctagttcagttttaatagtcactctgaaggaaaactttttcacaggactaatgactcctctgctttcaaagggaagtgcagtgtgctatctcttactcttatttaaacttatagttagttggacaagcaggagaaaaacttgggtagccatgtgactcaatggaaagagtggaagaaggattggggcagcccatgtttgggtcctctttgcgcaagttatataactgagcctcagttcctttgtatgtgaaatgggataataacaactaatttacattttgttgtgagaattaggttatgcgtgtactgtgttcataagggctcaataagtggtggttattcttattactataagccagtttatttgaacaatattccactttcatttatttatttatttattttttgagacggagtctcgctctgtcgcccaggctgtagtgcagtggtgcaatctcggcttactgcaaggtctgcctcccgggttcatgccattctcctgcctcagcctcccacgtagctgggactataggcgcccgccaccacgcctggctaattttttgtatttttttcttagtagagatggggtttcaccgtgttagccaggatggtctctatcttctgacctcatgatccgcccgcctcggcctcccaaagtgctgaatattccactttcaaagaaaagaaaatctctcaccaaatgtcagagtatagcaaatccaaaagataaatccaaaagattttagaacaaaaattagggaaaaatattaaaagccattatttttatttaaatattttaagtaacaattctgattctaaattactacataaaacatgaagaaaaatagaaaaaaataaattatccatgatccttcaatctgttgttaagtaatataagtatctatttcctttctcttctttctctttctcttttcaatgtttcatataaacatatccacacacataaaaaacaaaatttgggtcatattttgtacaaatcggtatactgccactccacattatattgtaaacatttcccttatcattaaatagtctccgaaatcttaagttttattggctgtggaggatgctggctgtcgtatatcctgtaatttatttaaccattctcttcttgttggacatttaggtcattttaaaattttcattattataaataatattttagtgaacatcctaatgcataaatatttatatgaatctctgatcactttcttagaattatttcttaggtgtcaaaatgtgaataattttttaaaattacagttttaaaaagaaaggccatcatagatgcataatatatcagccacactgaatttctaacctcttggaacacagtaactagtctggactcctggtagcagaagttttatcttattcattttcctaccctttttgtgttccaggatatctgtcctattaaggtcaacttgcttgtggcatgaatgaataaatgaatacatatatgctttgaacaggagttaattgagtctagacctgtttcagatagaaatgtgctggaattagctctttctaagtaccatatatatctaagaaactcttgaaaacaaattcataagcttatataatgactataattcttattcctaaggattttttttttatttcctatttttgaatatcccaatatgcttatctgggagtaggttgaataaataatttgagagttctttttctccattatttttccattttgctggaagtggaacatttgggggacatttctgtatgtcttatagtttaaggagattatggtaaaggaataaacatcacgtgcttgctcttttggaagggaatttaaaggtcattaaagataacttcatgcttgaatgcccttaccaagggggtaagcagctttcaatacctccagtaataagaaactcactatctcctgaagccagtcaattcatatttggacagttattttgttagtgaattgtgccaggactgaattcttcctaatttctgcaccaccccttggctcacacttagctcctgtgccaagtcctctgccacttcctcttgcctaggcccagccagctctctctggcctctggcccctggtcagcacaaggctcctgtctgtataggaaggggggttcaatatacaggaatctgggcttcaaacccaggattatttggtcaaagccaggccttttaagaaattattgctggaaaatatacatatttatcatgttaaacattggcaacttgcaattcagcagcattaactatattcacaatattgtataaccgtcaccactatctactcccaaaatgttttcatcatcgccaacataaactttgtgctcattaaataactccccattccttctcctcccagaccctggtaacctctatttcactttccatctatgaatttgcctgctctgtgtacctcataccgctaaataatacattatttgttcttctgtgtctgaagccaaacccctttttactacagcaccctaccttcatagcatcgctttctatcactaatgcaatttgtctacttaaccttcttaaagtcatttgagtacaagagctgtcatacttttacaaagatctcaaagacttggactacatgtcatttgatccaacagaaagcaaggtaggagaaacaatgcatttcttttcttttcttttctttttgagatggagttttgctcttgttgcccaggctggagtgcaatggcgcggtcttggctcaccacaacctctacctcctgggttcaagagattctcttgcctcagcctcctgagtagctgggattataggcatgcaccaccacgcccagctaattttgtatttttagtagagacaaggtttctccatgttggtcaggctggtctcaaactcccgacctcaggtgatccatccgccttggcctcccgaaacaatgcatttctttgttttgaaccatgtactccttttaaggcagctttttcttcctgttgttccagatttctttttatgaaaatatgaagagtggagaatgtggccttccactcccaatagcaggtattctagtttttattctgctttttaaaagaaaatatctctattatttctccaataaatttgatagcaacttttagtttagaaacagttactatttatgatctaattttttatcatgaaatttcaagacttcccattactgtcaactccataatctttcctggtattacagttaagctccaaggcgtaaataaatctgcatacatttccattcatccttcctctttcctctttttgagaatcagatctacaattgtccattcaactcttccagcactcccacaggttaacaatagtttagcattcttatttgtaaattttctcagcatgctggattgttgttattttatagcatctcaaggctcactttaaatctctttactaatcctcagcttcctttttctgtaaccatatttagtctactattttaagtctgaaaatcactattcttggaagagaagtaattgcgaaagtaataggggagcagttctcctttcactttgttattccagcaacatgatgtcattggtgccaaacatctggcttatttctcccttgtgttccttttgtgcctaacataaccattagaatgcttcttgttgttcttacaaattataggtctcaatctatctgtccctgtttttggagagacccaaaactctcttgcatttgttcttgaggagcccctctttcttttttttttttaatcccagcgctttgaaatcaggtcataatagaactatgtaggaacctccatccttccttccttggtggaatcaccatctgtgactatacagacaaaattgtccatagtctgcggacagatggatgctatttgactctcattcagaacgctcttcccacagagtcatgatgctgtttctgctgattcttttgaaatctgccttcttgaagtccatgctttcttgtcatattttcagcgactctctatctggctatcagaaatgtcagggtaaatgtcttttgtctattgctgttggaatggagtgggacaattaaccaaaagaccgttaaagtagcaaatcattaaaagatacacatatcttgaatcttttaacttaaaatatgttaatgaaacaaatatattcactcgctactctttgacctagggctaaggtctttttttaaagattgcttgcagttccatattgtcatttttgcatcatctataattttcagtcttaatttcttttaagttgggcaagaccttgtaaagaaatctgatgacagaatccatctagatctgtatttatagttgttttacctacatgtaatttaacagtaattatttttagaaactctttatcaaaactttctaaagcatattttacagagtgaaaagccttggatgagtggagggtggttaagagggtttctgccatgttctctcatgacatcattgatttcacccaaggttcattatttcacttcactagctggtatctctccaagtagcagttcccctggttacttcctctctctgtaaagaaaaattcagtgcaggcagtaacttgccagactttctgcttttagtttagtctccaatcaaacgcagtagaagtttcccatcataactgtttcgtgcctctgtgccagcattgtatactaaattaggaacatatctctcatttcttccatttggccagatagtttgttaatatctatttcatcaataatatgatttcttttcctcttatttaattctttttcgaatgcctctgtgtcctcattaccatctaggtgcatggattttcacacaggtgaggggtatttctttacctcctttccttacagatatttctctggaatacactaaatcccagtaattattatgagattgtatttaccaccttattctcaagttcccatgctctggcctgggcctatacaactaaaagacccttgagagtattactttgggaacattttccagttgttttctgtaggaatctcatggctcctctcccactattctttttcccatgacattactgcagacctttatgacaactggtttcatggttttatataagcattgctttctttactgtcctatactaagtttagagactgcttaatagtctccaagatgttcttgtcctcatgacatgtactccaaccctacccaaagtccattcctgcattacctaaaggcatcaaacagaaaatatcctattcaccacgtacctcttcatagttagctgttcactttcccaatattctctctttttcaaagtcctaaccattgagaggaagaagctacaagaacgccacctgtgtggctgggtcttctagtcttcagcttgtgacttcttagatgccaatgctgcttctctgtcttctagcagtgtggtcattcccataaagacccaagtactgaatcatggactagtgggcttagtatgtctcagcagactattataatctagaactagtcaccagaaagatggacaacaagcttgactgaccatatcttatctgcacagagcctttcactatcaccaatgagtggtgaccatcatccatcctctacctcccagggcagcagtgggtttcctttcactagtggtacttggatatcttctggatatgacttcttgatgctccatgtacacaaagacagcaatcagcaacgtccgtagaggtaattgtatagctgttgctgtacaatgtgtcagggacaaatgtagtgtatgatttttccatatgtctttttgcaagatcatcctatccatcttaccctgtttttgtgataagcttaaaatcctgagctttattttttccctttcggttgtactcttccatagtgaactatatactgttatatcacctcggtgtctagtgcagtgtgttagaaaacttagaacttaataaagatttttaagttaattcacataagctaaaattccacttatatgagcaaagattttgggagtcatttttaaaaattttatttatttattattattattatttgcttctctttgataaccttggtactaagatttttgggggtcatttttgaacaataatttgcagttgctgagttattagtctatgacttgctacattgcattccttagcaagttgcaaatattcaagcagcaagatatgtggtcaacttctaaataatatggttgttgctgtttttttcctgtgtcattcagcattaacattatcctctgaaccccaaatacaacctctttgcttctatcaggaaaatagaaattcttctctaagaaatggcattggtgcattgggagactaaagttgcagtgatcggatgcctatattaatcccaaagagtcatcatttgaaaaattgaatttaagtctgaaataaaacatccataaaattgaactgtagtctcttttctttactttctcaggctaaaccccttgtttttccatttgttggccaatgaaggcttctcatggaactcattctgatcaaattttgtaactgaaaatattaggcttgctagttttagaagggttcttcacagacatctaaatcgaagtgtcttgacttgaggtcagggaatgggaagcagcagaattttatgtctactatgtttttctggtatccaaagctttcagcagatcattaaaggggcctatgacccaaagctaatcatttttatagacaaattataagaagagatatcactttccaaaacagcaaaatgctaagctctcattccgccactgatgttcttctctttgcctattactttttcctcttcttggaaagaataattgaggatttttatggaacatcctgattttcgagtcacttggaggtcccttttctcatattcgatgtcacaaaccatagggctggctgcgttgtcagtgcagagttacaaggtgagtgtgagactgctcctaccagccattgcctcagagctgagtgtggccagttaggtaggcacatcagcaggcagcgtccaggaggaacctgattcttttttttttttttttttttttgagacggagtctcgctctgtcgcccaggccggagtgcagtggggcaatctgggctcagtgcaagctccgcctcccgggttcacgccattctcctgcctcagcctcccaagtagctgggactacaggcgcccgccatcacgcccagctaatttttttgtatttttagtagagacggggtttcaccatgttagccaggatggtctcgatctcctgacctcgtgatccgccagcttcggcctcccagagtgctgggattacaggcgtgagccaccgcgccccgcggcatctgtcagtttcatttgtgttcttcctactatgctagagatgtggtccaaagctgtttttgtattttataacccacagattgcatctcttttaaattgaaaacaactaaatggactaaaaaagtataactttaatgcacacagcaagtggaaagatacggtacttaccaagttctttttctgatagtttattattgtgtttcttggcctgtataactttcattatgatctctatcagctccctgagaaattattcttcagatcaataatttgtgtgtatttgagtaaatgataactcaaagacttcaataaactttaaattgtctacttaatttgtttttttaaaaaactgtaggcacaattatgatactatgcattgtcttaaggtagtttctgttattgggttattaggtatgggaagttgagtcaagattactcagagagtcgcagaatgagtggccgaaaaatttgttacaaattagggcaaatatggtctcctctgtctgagcagctgatctgctactgaaccccggttgtagctgcatctctgagaatactgcagcaacatgaccacagacatcaatctgtgttattacttagcatgggacacagggaaacacttctgactggcatttagtaaacagagtaaaacaactatcattgtaaaatacatgtgttatgcttccccatctcacacccccaggtatctaaattcagatctatgggatctttcccaggtttttttttttttttttttgagacagggtcttgctttgttaaagcccaggctggagtgcagtggtgcgatcttagctaactgcagccttgatcccccaggctcaagtgaccttcccacctgagcctcctgagcagctgggactacaagcaggtgccaccatgcctggctagtttttgtattttttgtagagacagggtttttccatgttgctcaggctggtctcaaattcatgagctcaagcaatctacctgcctcggcctcctaaagtgctaggattataggtgtgaaccactgcacccggctctcccacattctttaaatgaaagtgttgacattttaggtgtttaactttcctaatttagggtgttcaattaggaaaagaggaagtcaaattgtccctgtttgcagatgacatgattgtatatctagaaaacccctaatttagaataagacttagagttgagagggaaaggattgccaaatagtttcaattgctttagtttactttccttaatttcttctgtcttcaaactcttctcctttctttttcctccttcttccatttgtcaaaactgtaagtgctttgggtactgtcctaagtgatgttcagagtcaatgcaatgtatatcaaattttcccataatgtgaactggaaaataattggaatataagaaaggatagactgacgtgtgtccggatgccttctctgttgtacctgtttgcggcacattgcccgcttaacccgctaggagatgtaggaagtcaacctgttcaacacatctcaagcagatcgaatgatgaaatgttgatgatttcaccataccttttccactaagaaatggaatgatcctcctcatatttttgcagcggttatctatttcatctattaactgagaatgcagagtgtgcctgagcatttttactcacagaactaatgaaaaaagttaaaaaatttttatgcaagtggtttgcttgactttcttgcaaaatgctcataggaagttaataggaatcatattattatcagaaggttttaagacaacactagttctccccctagcccactaccaaaatacactgtggtatactaatttacacaaattaggttactatatacttgttactatgctttcatcacaaaagtatttaaaaccaacacatcatagattgttttctttcctatattttaaagccactcaaagctgagtggtatgggagaagtctgtggtattatacaatttgaggaattcaaaaagttccacattactgccaggcctgctaaagtaatttggaggaatttatttactatcatgcttccttgctaccatttacaatcactgatttgttaaaactagatgttttgcagtggaagtggagattgtatttagcctctgaggtccagccacggttctgctggtgccggcaatccaggggttttggctcctggggtctcttgtcaacatcatctctgggtagccagttacccccaatgtcctttttcagggcacagggtgtctggccagaatccccacttagcccaggacctggccccttcacctattccctcttattctgcatctggagacattgccttctcactggttttgtctcatcccagaaacagtctaaagtctttcaaattcagaatcaccatctgcttattggatattttctcctgaagatattctgagacactcccggaaccagatatttgtcactgaaaattttaatttattccatattttccaaatgccataatggagtgtggagatacaaagatgaataggatttacccctacccaccagaggtgtgcaatctagtgtgggacacagcgctctaagtatggaatagtgatagcagctagcacctattgagccctgaccttggtaggtacggcagtaagcccttgacataacttactccttgtaatcctagccagttctgtaggtatcagtatctccatttcctaaatgaggaaagcaaagcacaggaaagttagataacttgcccacagtttttctggtgacaagtggcaaagcagagacttaaaaccaggcaatccaggggctttaagtgattcttaaatattaagtgataaatgcatttaaaatgtgtccggaatgggctttgtgaattccagaaagggaactaaattctgcttaaaaagagaaggcttctcaaagggagtaatgtttgacttgagacccagagaaggagaaaggaaggaagcttgcagaggagccttggtgacaagaggcatgctctattgtggggacagtaggaataggggagaagccttggccttgtcactttctgctttttggtttatgcagttgtctctgcctaagatttttttctacctttgtttctgcctccagttactccccctggaagtgtcactctcttttaaattcagagagccttgtttatggcactgatgtggtgcccagtgcattctgctttgtactaaatatgctgtatctcacctttgtgtcagcaccaaactgtgttctttataattctgcagcttctagtacatttgtgcatagtagcaactcaatgcacatttgttgaatgttgaatgaatgctagtcaaggcaagacaagcaaaattctcaaataagtcaaaataatccctaattatttccagatggaatggtaatcaatttgcttcaggaataaattagccaatggatgtttgataacataaccgaccctaagtaactcgatttagctgctgaagccagcttttaaagatgcagtttatccactggccatgggatatcggccatgattactggagcaagccctagtaatacaatctttatataataaatataatcttactaaatgtcagtgagaattatctttatataataaatacagtctttaaaattgtatttatatttggcatttatgcctctcagcactatgtaatttcttattagaagtacactttaacttgagaattccattagaatcattaaattttctgaatagaaagcttaacagtgtttaaaaataaatttttagtggcttcatgatgtcaaaacaatcacttgaaagctgaaaaatatgttaaacctacttttgtatttatgtcccagtttgcttttttcaattcacaaaaaaagatttgacttgattacaaagaagaaaacacagaaagagcaaaaaagaaaagaaagatgaaaggaaggaagaaagggagacaaaaaaagaaacaaaaagaaaaaaagagaaagactgattatctagttgttttgtgattaggtagacataactcgagaatcttggagccatccttatctcttccctctccattacctgccacaaacaaccccccactaaatagtaaattcttactccaaaatgtctttgatattccttctttcttattcatttccatgtcactgcctgacttcaagcttttatgaagcttgaagttatatatcaaattgtaactgatctcctaattctcattttgtgtgtgcattccccaaatcattcttgacatatctgtgcaaatctcagcatgtcactttcccagtagtaggtatccatcagctccctgttaatctccatgaccagagattctgtccacctctccagcctcatcttgtgagcttctttccaatcacctcatcctttgcctccttagcttttgcctcggctggcctgataaacctctacctgcctgccaagtttcagttcaagccttagctctctgtcaagctcccgcagtccctcacccggactcacatgctccttgcacctgcagtgggtcagctgctttacatatattgtactctttacttctcacgtagctgtttaaggtgggtggtctttgtctccactttgcaggtgagaaaagtgaagctcagagagcttaagtaatttgctgacagtcacacagtaagaaaatcagtggcaaactgaaatacaaagaacctgagctcactcctcaacatgttgctccttggctttagctttgcccacacctgcttttattttgttacgacgtttgtcacatttactgtgtttgcaattctccatttctgctacactcgttgaaagcatcagccccacctttcatctttatgtctccaaagacctgcacagtgtctggctcatgagaggtagttaagaaatatttattaaggtgatgaatgaaccaagcaatatacaaacaatatacatattcttttctttgtggtggtgtggagaagaaagggagaagtaataagttccactttctggagtggaagggttctagtgggacaatagaagattgtatgacctccagaaccatcttaagagtgattttaggattagctactaagggccaggcacaatggcacacacctatagtcccagctagttagaggctgaggcaggagcattgcttgaacccagaagttaaaggttgtagtacactgtgattgcatctatgaatagccactgcactccacctgggcaacatagcaagaacctgtctctcaaaaaaaaaaaaaaaaaaaaaaagaatccagctattaacagaagtcagcaatgaataccaaggtcctcagtattacataatatttattgcttccttggatgaacttattaatttcttataaagaaatgcgcccgtataaggaagaaaggagcataggaggaaagggataggatggagaagagtcttgtagtgtgacttcatataagtccctcagtttctttacttgaaaacatctttatattaatcatggggatgagttttattaatgtggggtagtgggctgaagaatgctccccaaagatgtcaggtcctaatccctggaacttgtaaatgttaccttatttggaaaaaagtgtctttgaggatgtgattaagttaaagaacttgagattaggggattaaatgcaatcacatatatctttataagagaaaagcagagggaggttacacacacacacgcacacacacacgcacgcacgcagtgtgaagactgaagcaatatggagtgatgcagccacaagcccaggagtcccagtagctaccaaagctggaataggcaaggagtggagcctctgaagggaatggccctgccagagggcaggtgggcctgctaactccttgatttcatcccagtgatactgacttagacttctagcctccaggactgcagaggaagtttctgttctttttaagcaatgaagtttatggtaatttcgtatagcagtggcagaaaactcaccaggaggcaacaatacaggaacatgagaaatatgaggcctgacagagagctcctttggatggctgttcctccccacttcccttggaaagcttgctccttcactctccaggggatcaaaacctgggagactgtctgctgctgaaactacactcccggaatctgtgagttctcctgttgttctttttccctcaggatcctccatttccagcatctatcatagtccaagcagagcacataagcactcttttggagtacatatggctttcatggtctggtgatggaatctgggaacacagttatgtttggatgaggtcagttctgagtggcaagctcatgttacttaattagtttagcataagtgtaaacctttcaatagacgcttagtttcccctgtttttttttttttttcatctatcacaaaaataggttgggttagatatagctgtggttcgtcagctctgaaatcctgcaactctctcactagtctgcatttgccttcacctgtgagcctgtctcccgtttgtcccagggaaactcttctaacatgaaatccaagttgagctctctcagctatgtaggttcctggaaaaggattggttttcattctggattttaagtcaaaacttaaaaaaaaaaaaaccctaactcttgacttagttggtgtccctagattcagaccttgaaatttacccaactaggctttctttttcccaggtacctatgttgtactcagaactgtgaacaaagcttgatcaagccagtctgaatttttgcaaattttcatcccccttttattttcacatttaaaaaaatatatatatttctatgtattaaatgttgcttgctttagaccttccaagctcaatcagatcaacgttagattattgcccctttcttttatttgctggatcttattatttttaagacagggtctcactctatcaccctggctggagggcagtggcacaatcatggcccactgcagcctcaacctcctgggctcaagtgatcttcgcaccttggccttctgagtagctgggactacaggtgcttgccactgtgcccagcttttttatttttattttttgtatagacagggtctcactgcattgcccaggctggtctcgaactgctgggactcaagtgattctcccacctcagcctcccaaagtgctgggtgaaccacgattcccagcctcggatcttattttttatttccctctgaaaatctctacctcacagacagaagctttgattgtatgacagctgtagtatgtgacatttgctaaaacttaaaaaaaaaatgtctgctattaaatgatggtctaaaaataaatttcaaattgattttcctttttttgagacagattcttgctctgttacccaagccggagtgcagtggtgtgaccacggctcattgcagccttgagctccccggcttaagtgatcctcctgtctcagcctcctgggtagctggcactgcaggtgcatgccaccatgcccggctaatttttatttatttatttatttattttttgagatggagtctctctgtctcccatgctggagtgcagtggcatgatcttggctcactgcaaccgctgcctcccagattcaagcgattctcctgcctcagcctcctaagtatctgggactacagtcatgcgccaccatgcccggctaacttgtgtatttttagtagagacagggttttaccatattggccaggctggtctcaaactcctgacctcgtgatccacccgcctcagcctcccaaagtgctgggattacaggcgtgagccactgctagtggccatttatttatttttgtagagatggagtcttactgtgttgtccaggctggtcttgaactcctggcctcaagtgatcctcctaccttggcctcccaaagtgctgcgattacaggtgtgagcccctgagccaggtcaatttcaactcttattttggattcaaggggtagatgtgcaggtttgttacatggtatattgcataatactgagatttggggtacaattgatcccatcacccagagagtaagcatagtatccaatagtttttttaacacttgccctcctcccttccttctccctctagtagtttccaatgtctattgttgccatctttatgtccatgagtactcaatgtttacttcccacttataagtaagaatatgtggtatttggttttctgttcctgcattaattcgcttaggataatggcttctagctgcaattatgttgctgcaaaggacataattttgttactttttatggctgcatagtattccatagtgtatatgtaccacattttatccaatccactgttgatgggcacctaggttgattccattcttttattgcctctttcttgaacccatgatttcccatatgcattctgagatccctcacagctctcatcttcctcttccaacttccagtaaaggttcggtatgttcctgcttcacacaatgtcagggaggtcagttggttctcagacccccatcattgtgaaccagcattggcattcaccagaatacttggaacacaactttcttatgaaacattctttgagtagctgctataaaccaggcatttctatagcgagtgttgaaacttatgttagactgtataagattcaattcttgttttaaaatgtcattgtaatagagaaagtaagataaccacacaaataataataagatgaagtgggtgctgctgtaatattgatggaaatagccgcagatacaaaagttgataaaactacatttcatttcctaacaaggcatttgccatggatgtgaacttatgaacatcagttttcttacatgcccaggggtctatggaggccttatttgtgtatgaagatgtggtgtggagtaaatgatataaatgcatgtgaaagtgcccagcactatccctgattcatagtaggggattggtcagagattcttaaataccagagaaggggtttaaaaggaagaagagatcacaggtggtttggcagatccaaaagggctttgcggaaaatgtagcaattaagataggtcagactggtggctcctcagggcagggaccttctgaattacttttcctgtccttagtattttataaatagactgtagtggatatatgttgagtgaatggaccttaaaggatggacaggattctgaaaggttgaactggactttgagaaagggcactgcagcaggggcatagcagggatggtaaggtgtaggtcatgctgtcagaatggcagtctactttggtgggagtgtagggaagtagtagaagtaagagtgaaatgtaagttgggaatattctgtgagtattgaaagtgctttcattgttagactgagagcttgcactttatctaattactctttaatttttgtgtctctagtcaaatttaggaggaggagatttttgttatgctttctgcattattgagagtttaccattataattgccatctgtcgtgtttctcttttttgtcagaagggttgtaggcaatctttggctgggataaacagatagtttttctactcactaaagaaaatagatgcagagagactggcactaacaaggaatagagaaggagatagttttttctttgcttatgcctaaatcttgtctttgttaaatattatgttatacattattcataacttttaagcttttaaaaaatcaaaatttaagtcaaataagtcaaatatacaaaagaaaagaatatgtgagcctatgactttccatgtgttctagaccaggagttcccaaccgccaggccatggaccagtaccgtctgtggccagttaggaaccaggcctcatagcaggaggtgagcagcagatgagcaagcgaagcttcatctgtatttacagccgctccccattacttgcattaccacctgagctccacctcctgtcaggtcagcggcagcattagattcttataggagcacgaactctactgtgaactgtgcatgcaggggatctaagttcatgatccttatgagaatctaactaatgtctgacaatctatcattgtctcccatcacccccagatgggaccgtctagttgcaggaaaacaagctcagggcttccactaattgtacattatggtgagttgcaaaattacttcattatatattacaatgtaataataatagaaataaagtacacaataagtgtaatacacttgaatcatcccaaaaccatctgccaccccaaccctggtccatggaaaaattgtcttctatgaaacttgttcctggtgccaagaggttggggaccactattctagatcatctcaaggaacatttttacagcttgaaccagccttgtacataactcgttttataattagatgctatgtttcaaatattagtagccctgggaggggtaacactaatattcagaaatagctgggcagtatatgagatatctggaggaagggagaacatggagagggtgctaaagacaaacttgactatagtatttgatgtgaacatgacctcagttgaaagtacaccactattttatgtacctttaagaaaaaagtgctgtcaatgatgtttaatgattgtgctgcgctacacatgagttggtcatactggcttcttattgctttgacatttcctgcctttcttctgggatatttggcacttttgcctgccttcttgtatggcttggcataagatagacaattctttgcacatgtctgtgtagcaaaatgcaactcaacttcatttaccttttgttatagatcctgtaagacaactgattgctgtttgcaataaaatacagaattgtggtcattcttccaaagaaaaatatgtattccactaatatcaaatttatcctccaacttcatttctatgcttttctacttatacaataactttttgtttcaatgttgagttacatgtaaagacatataaaatggaaatgaaatttaacactataagtaaatcttagctaaagcgacaataatattaatgtgtatgaccaagattgtacacgtgcaactacatcatgatagcaactagtggaagccagttataagactgcattgattaaagacatactcacaatatagagaggttaaaatgagggctgggtgcggtggctcacgcctgtaatcccagcactttgggaggccgaggtgggtggatcacctgaggtcaggagttcgagaccagcctggccaacatggtgaaaccccgtctctactaaaaatataaaaactagccgggtagggtagtgggtgccagtaatcccagctacttgagaggctgaggcaggagaattgcttgaacccagaagatggaggttgcagtgagccgacacagtgccactgcactccagcctgggtgacagagtgagactcagtctcaaaaaaaaaaaaaaaaaaaagaagaagaaaaagtgcacttagaaacaatgaaacacgctctttttaaaatgtgcctgcagactcatctacctcatgctgaagtattttatctagcacttaagactaattggttgaaccacatccctttatggctctggttttatgatgtacactaatgtgtcataaaaccataatgtacatttggtgaccacaatcatcttatcaaagggctctgctggaagtgaggctgatgcatgagcatccataccttaagctctgttttccaagttggtggttgtatgattatatatagaagcgtcatggtcatatttgcccttgctcccttctacccactacgtgtaccagttaggagtttatttaatgggtgtcgtatgattttcttgtctggtttacctcttgatggtccacatttcataaatcatatctcctcatatatacaggaaagcatatgttgaaatcactgaaattacataacttgctcccctttgaatcagtttccttcttatcactttgaacatgctcatttcaggcatctctacgctacggagtgtgccctacaaatagaaatgtgggaaacctgccaggagaaattaaactgtcagtctcctcctcttccagatgagggttgatagatacatctctctatgttgtggcagccttcaatctgaattgagcagatttcaaacatttctctcagctgtgtacctagagtttaatctctgaagacttatttcattgccgatcatttgcaaaatggatagatttgagtcgtaccctatccatttttctcctgtcacttactggtaaaataaacactgagtaggaagttgtgaaagaggataaaggaaagctcggcaaactggatggtcctgaaaagtctgtaagagacacatggaaggtaaacaagctggttgcttttgttctgccagctgaggtcattggagcatgaacagggaaacttcaacttggagctgatgtcctgatcctttggaagctcttttgggatggaagggttctcgattcctgtttttggtcttactcttgttactgtctaagagggctgtctctgttctaatctgctagttgcaggcttacagttggttagatgatgaaatgtgatgtttacagcatcaagcacaatgttcagtagaagttttgacaaatcctcctgctagaacttcatgataatttgatctatcagatacattttaacaacccttttgaccacacgttagtggagctgatgcaattagctagttcttgttttattgttacattaagaaaaaaaccaaaatttaaatttaaatatacaactcatgtggtggaggaaaaaagacatactttcagagggaaaatcttacaagtgagttttatgcttaaaaactgaatgccttaaaatttatatatcttcttttttggaggtgaaaaaaatcttctaggaagttgctatttataaaaaaaaagtggcatagaccttcctttcaaactttagaaaaaactagacttattaaatctcacatggtcaaaggacaacaccatttagaagcatttaaaacattatgattttggggtacttgaacatttgaataggaataaaagcaatttttttagatggcctgaattgtttttttaagattgggtttttggtgtgataaaaatattttatttcatgattgtgtggtagttgtacaattataaatacgtgtcaaactcattgaattttactcttaaacttggtgaaatttttgtctgtaaattatactttaataacactgacaagaaaaataaagtattttgggatttagaaaaggactggctgggatttcaaggaagggagtttctgtggacacgcaatatgacactaaaatcatggataggaacagaaattattttaatcaaaagccaaatgtaatgaaactattaagaaaaatgatttagtgactgtattttacatgtttattatacttctcattacattggggttatttccccacttacattcatttgtatgtgtgcaggtagagtagggtggggacaaggggatgggagagtgggtgtgcatcacgtgaaaatgaagaggacttggggcagagcaagatggcctaatagaagcctccagcgattttcctccctgcaggaacaccaaattgtacaactattcacacagaaaatcacctttataagaaccaaaaatcaggtgatcacagtacctagttttaacttcctatcactgaaagaggcaccaaagagggtgggagaggcagtcttgaattgcctataccacccagtcttccattccctggcagtggtcgcatggcacagagacagaatctgtatgcttgggggagggagagcacaggaactttgcactggaactcagtgctgccctgtcacagtggaaagcaatgccaggaagaactcagctggcacccatggagggagtatttaaacaagccctagccagaggggaatcacgcatcccagtggtcagaacctgagtgctggcaagctaaagtactttggggtcctaaatacacttgaaaggcagtctagaccacaaagactgtaattcctaggcaagtcctggtgctgtgctggccttggagccagtggagttgggggacatgtgacccagtaacacaccagctggggtggccaagggagtgcttgcatcaccattcccctaaccccaggctgcacagcttgcatctcctggaaagactccttccttctgcttcaggagagggaagagtaaagaggactttgtctcacaccttggataccagctcagccacagtagaataggggaccaggcaaagtcctgaggcccccattccagcccctagttcccaaaggacatttctaaacacaccctgtgccagaagggaacttgctaccttgaagggaaggccccagttctggctggattcatcacctgctggctaaagagcccttgggtctcgaataaacatcagcagtacccaggcagtacttgccatgggcattgagtgagactcagagctgtgctggattcaggtgagacccagtacattcccagctgtgggggccacagagagagactcttctgcttgtggaaaggagagggaagagtgtaaaagatttggtcttgtggcttgggtgccagctcagctgcagtagaatagagcaccaggtagattcctaaggtttctgactctaggtcctggctccaggatggcatctctagacctgctcagggcctggggggaactcaccattctgaaaataaggacacaagccaagctcatcttgctatctgctaattgtagggccctaaggccttgagcaaacataggtcgtaggcaggcagtggttatcacaggccttgggtgagtcctagtgctgtgcctggcttccggtctgaccaagtatagtcccagtggtggtggtcactgggtgcttgtgtcaccccttccccagctccaggcagctcaacacagagaaagagactccatttgttttggagaaagcaggggacgagaacaagactctgcctggtaatccaggaaatttttctggatcttatccaagaccaccaaggtggtatctctatgaatctacaagagccacagcattacctaatgcagatatggcagaagtgaccaaaaacttagactacaacacttaagtccctttgaatacctggaaagccttcctaagaaagaagggtacaaacaagcccagactgagaacatgacaataaatacctaactcttcaatgcccagacactgatgaacatccacaagcatcaagaccatccaggaaaacttgacctcaccaaagctaagtaagacaccagggaccaatcttggagagacagagatatttgacctttcagacagagaattaaaaatagctgttttgaggaaattcaacaaaattcaagataacacagaggaggaattcagaatcctatcagataaatttaacaaagatatttaaataagtaaaaagaattaagcagaaattctggagttgaaaaatgtaatcgacatactgaagaatgcatcaaagtcccttaataacagaattgatcaagcaggagaaagaattagcgaacttgaagacaggctgtttgaaaatacacaatcagaggagatcaaagaaaaaagaatgaagcatgcctagaagatctagaaaatagcctcaaaagggcaagtctgagttattggccttaaagaggaggtagacagacagataggggtagaaagtttattcaaaggaataataaggctttccaaacctcaagaaatatataaatattcaagtacaagaaggttatagaacacctaacttgggttataggtttaacccaaataatactatctcaagacatccaataattaaactctgatagtcaaggataaagaaaggatcctaaaagaagcaagagaaaagaaacaaataacatacaacagaggctgggtgtggtggctcatgtctgtaatcccagcactctgggaggccaaggtggacagatcacttgaggtcaggagttcaagaccagcctggccaacatggtgaagccccgtctctacgaaacacacaaaaattagctgggcttggtagtgcatgcctgtaaccccaactactctggagtctgagacaggagaatcacttgaacccgggaggtggaggttgcagtgagcagagattgcaccactgcactccagcctgggcgatagagtgagtctcgtcttaaaaacaaaaacaaacagacaaataaaaaacatacgatggagctccaatatgtctggcagcagacttcttagtggaaaccttgtaggccagaagaaagtagcatgacatatttcaagtaccgaaggaaaaaaaaaataccttgtatcctagaatagtatatccagcaaaaatacccttcaaacatgaaagataaataagaactttcttagacaagctaaaggattacatcaatgccagacctgtcctaccagaaatgctaaagggagtccttcaatctgaaagtaaagggcgttaatgagcaagaataaagcattgggaggttcaaaactcactagttacagtaagtacacagaaaaagccagaatattataacactgtaattgtggtgtgtaaactactcacgtcttgagtagaaagactaaaagatggactgatcaaaaataataactacaagttttcaacacatagacaatacaataagctataaatataacaacagaaagttaaaaagtggattaacagaaagttaaaaaaatgaagttaatgtatagagtttttttttgttttctctttgcttatttgtttatgcaatcagtgttaagttgtcatcagtttaaaataatgggttataagatattatttgcaagcctcatggtagcctcaaataaaaaaatcatataacaaacaaaaaaataaaaataaagaaattaaaaacaccactggagaaaaatcatcttcactaataaaatggcaggaaggcagaaaagaaggaagagaagaccaaaaagcaatcagaaaactaataacaaaatagcaggagtaagcccttacttatcaataataacattgaatgtaagtgaactaaactctccaatcaaaagacatagaatggctgaatggataaaacacaagacccaatgattggttgcctataggaaatacacttcacctataatgacacacataggctgaaaataaagggatggaaaaagatgttccatacaaatgaaaaccaaaaaagagcaggagtaaactatacctatatcagataaaatagatttcaaaataaaaactataaaaagagacaaaaggggtcattttagaatgataaaggggtcaattcagcaagaggttataacaattgtaaatatatatgcacccaacactagagcacccagatattataataagcagctaataacaagcaaattaataataaagattggagcagaaataaatgaaatggaaatgaaaaaacaatacaaaagatcaatgaaacaaaaagtggggtttttgaaaagataagtaaaattgacaaactttagtcagactaagaaaaaaagacaagacccaaataaaattagacctgaaaatggaaacattacaaccaatgctgcagaaattcaaaggattattagtggccactatggctaactatatgtcaataagttggaaaacctaagagaaatggataattcctggatacctacaacctaccaatattgaatcatgaagaaattcaaaacttgaacagaccaataacaagtaatgagatcaaagctgtaataaatatatagcaaagaaaagcccagggcctgatagcttcactgctgtattttaccaaacatttaaagaactaataccaatcctacccaaactattctgaaaaacaaaggagaagcaaatagttccaaatcattcaatgaggccagtattacctgacaccaaaaacaaagacacatcaaaaaaagaaaactacaggccaatattgttgatggatgttgatgcaaaaatcgtcaacaaaatactagtaaattgaattcaacaaaacattaaaaagatcatttatcgtgatgaagtgggatttatcccagggatgcaaggatgattccatatatgtaaatcaatcaatgtgatacatcatatcaacagaattaaggacaaaaaccatatgatcatttcaattgatgctgaaaagcatttgataaaattcgacatccctttgtgacaaaagccctcaaaaactgggtataaaagagacatacctcaacaccataaaagccatatatgacaggtccacatgaaatcctttcctctaagatctgaaacacaacaaggacacccacttcataactgttactcaacatagtactggacatcccagctagagcaatcagacaagagaaagaaataaaaggcacctaaactggaaaggaagacatcaaattattcttgtttgtagatgacatgatcttatctttagaaaaatatgaagactctaccaaaaaaaaaaaaaactattagaactgataaacaaattcagtaaagttgcaggatacaaaatcaatatacaaaaatcagtagcatttctatatgccagcagtgaacaatctgaaaatgaaatcaagaaagtaatcccacttataatagatgctaataaaattaaatacctagaaattaaccaaaagaagtgaaagatctctacaatgataactataaaacactgatgaaagaaattgcagatggcacacacaaaaaggaaagatattccatgttcatgggttggaattattaatattgttaaaatatccataccacccaacccaaagcaatctacagattcaatgcaatccttatcaaaataccaatgacattcttcacagaaatagaaaagacaatcctaaaatttatatggaaccacaaaagacccaggatagccaaagctatcatgaacaaaaagaacaaaactggaggaatcacattacctgacttcaaattgtagtacagagctatagtaaccaaaacagcatggtgttggcataaaaccaaacacatacaccaatggaacagaatagagaacccagaataaatctatatatctacagtgaacttatatcccacaaaggtaacaagagcatactttggagaagggacagtctcttcagtaaatggtgctaggaaagctggaggtccatacgcagaagaatgaaactagacccctacctcttgccatatacaaaaaccaaatcaaaatagattaaagacttaaatctaagatgtcaaagtatgaaactactaaaataaaacattagggaaactctctaggacattggacggagcaaaggtttcttgagtaatgtcccataagcatgggcaacaaaagcaaaaatggacaaatgggatcccatcaagttagaaggcttctgcacagcaaatgaaacaatcaacaaagtgaagagacaactgacagaatgggagaaaatatttgcaaactatccatctgacaggggctgataaccagaatgtataagaagcttaaacaactctataagaaacaatctaagttaaatcaggcgtgatttaactcacgtctgtaatcccagcagtttgggaggccgaaacaggtggatcacctgaggtcaggagttcgagaccagccagacccacatggtgaaaccctgtctctactaaaaatacaaaaatcagctgggtgtcatggcaggtgcctgtaatcccagctacttgggaggctgaggcaggagaatcacttgaacctaggaggcagaggttgcagtaagctgagattgtgccattgcactgcagcctgggtgaaagagtgagactccaactcaaaacaacaaaacaaacaaacaaaaacaaaaaaacaaaacaaaagggacaaaagatctgaatagatatttctcaaaagaagacaaccaaatagcagacaggtacatgaaaaggtgcccaaagtgagacctttgtatgttctcacttgtttgtgggagctaaaaattaaaacaattgaactcacggaggtagagagtagaacagtagttaccagaggctggaaagagtagtgggtgaggtgaagggggttgattaataggtaaaaaaatgtagttagatagaatgaataagatctagtatttgatagtataacagggagactacagtcaacaataatttattgtacatttaaaaataactaagtataaatggattgtttgtaacacaaagaaaggataaatgcttgatgtgatggctaccctatttatactgatgtgattattacacattttatgccttatcaaaatatgtcatgtatcccataaatacatatacctactatggacccacaaaaattaaaaattaaaaaaaatgaaggagatgtgaaaggtaattggtgagggtgtagttgtggggagagtaattccttctactctcatcaacttaattatgtgcgtgtaattcacatttgtatttcaaaggacttgtgtgttataatataatacaaaaagcatttgcttttatagagaaacagataagccccaattggtattattgatattattatacaattactgcttctttaaagttgagcctacgtgctgaaaataaccagagcacagaatcatagtttagctaaattgccttattagaaccatttgaatgttcctgaaaataatggcagaattgatgctaatttggaggttactattgattgactgctcctcttgaaattattgaattgataatgctgtgctttggcagctgatggccacccatttgccttgatgttacatactaacttaatgatatgtactagttttagttgggcaaatattgtgtgctttctaagcagcctattactttgtactgtttctttggagaaaatttctttcttatccactcaaaaatgaaatatgtcttaaaagcacagccctttgtaaagacggaaggaaaaatttgtatctatgggcctactacccagtgataatcacttatcattttggtatattttcttccagtctttcttctctgctcagctggttctgtttcttttacttttttgtgatcgctgtctctataaaagtctgtattcacttttttgttgttttcgcttaccttaggatgtctttttatatgttagatatgttttacaaattttttttttgagacagagtttcacccttgttgcccaggctggagtgcaatggcgcaatctcggctcagtgccacctccgcctcccgggttcaagtgattctcctgcctcagtctcccaagtagttgggattacagccatgtgccaccacgcccggctaatttttttttttttttttttgagacagagccttgctctgtcacccaggctggagtgcagtggtgcaatattggctcactgcaacctctgcctccctgattcaagcgattctcctgcctcagcctcctgagtagctgggactacaggcgcctgccaccacacccggctaattttgtatttttagtagagacggggtttcaccatgctggtcaggtctcgaactcctgacctcaggtgatccacctgccttggccttccaaggtgcttggattacaggcgtgagccaccgtgcctgcctacaaatatatttttaatggttgcattcattttaaaatatagaatgccttacttccctgagtttaccattttcttgtatttcattatacataattagatcagaaaatacatttctttttggtaggagaaaattattgtttgcttcgacttttataattttaaagcagttgatagactaccaaatttaataataattaagatatttaataaatattgcatgttcttactcatgtggaagcttaaaaaagttcatctcatagaagtggagagtagagtagtggttactaatagtggttagaagctgggaagggtgaagggaatagggagaggttggttaaaggatgtcaaattataaccaggaagaataaattctggtgttctatagcactgtagggtgagtatagttaacaataatttgttatttattttcaaatagctagaagagaggattttttaatgttcccaacacaaagaaatgataaatgtttgaggtgatgagtatggtaattaccctgatttgatcattacacattgcaaatatcaaaatatcacactctgtatcccataaatctgtacaaccattgtgtcaattattatgtcttatgatcgcttcaaatagccataaacgttaattggttgtatttcatatctttccgataatttagtcatgggctctgagtttctttcttaagatgagagccttgattttccatttttacacgtcttgtaggtttcctcctcctcaatgtcctccagttggaggctcaaacccacttcctctttaaagtttgctgcatttcctgtccattcatttccctgactttggtgtcaggtcttatttatttaaaattataacaactataagttttttctttctatccctgggtaatgaattgcaacaagacttttcatccccaacacctccccctcccccagcccctgaaaaaaggaaatttcttctgcttgaaggtacttttgattgcctgtgattaaaaacaatttttttttgttatctggagattattaaagagccaatgactcatagaaggcattgtatatttacgtatatattatactcattacctaggatgtttacagaatttcccccttgggagttaatatgcagctgcgttttattcctcacctgttaccattaccctaatagagacaagtccaaagtaccacggaaacccttcaggagaaacagcaaaacagatgacaaagcagctcatttcttttcttcttaatggtctctttttttaaaattatttccaaagcaaatttgagtgtgttttgattttccaggaagtaaataacttctgatattaagaccgtttaaacgtggttattttcccctttgcactgaatcggattaagccaaccaagtattttgtgccatataaacatggtcttaatctaaatattcacctcaaaactttctttgtaaacatgtagttttgatgccttggcttccagcagaatggtaagcttcacatgggatttggagaaaaggaatcaaacactccagcgctccctttgggaactccttccctggaatccaaggctgcttcaggcaggtcaccttgattcacctataggtcaggacaggccagtttgtaccagatatttacatgcttaaattactgatctttttttgtttgtttgttttcaatgtgtctcacactaaatcactgcatagctaaacatattactttaggatgagtctttctgacaacttaaaatttatttgtagtctttctggttctctaatgaaggaataataaactcacagtatgtaagaaaaagaatagttttggaatggagttttctaaagaattttagaggtttttttttacaagtttaaatgttggtgtaaatgttccatttgtgtggcaaattaattttccatgtgcattccctttattccaatggtggaggatgttgggagggtggacagggaaaatacactcactatacagctaatatcaattctgtgcctgctactgaccactctaggctctcaggaacaaagatgagcaatgcactttcaatgagctgctatactggagagagagggcatgtaaataaatcactatattacattatggtgtagacattggagaaatgggggttcaggtaaaagactgggtaaatatagaaaagggaacaattaattctgaccaaggcgttaggtaaggagaattcaggagaagcttcaaggtagacttgcaatttgactttgcagatgaataggaatttatctgggtctataggttctaggaagggtgaacagtacaggcagttataatgtgctatgcttaaccactgtggggaacgtgccatagccagcatatacaacgctctgtggatagaggagaagctggacaggtgggttgggaccaacttgagaagagcctggaagaacccaaggtggcttttatcaggggaaggacctgatcagttatgtgttttctaatgttacctttgccgtgatgtgaagagtgggtttgaaaggggagcagttagaggcaaagttaggagctcattgcagtcattatttttgtaagagacgagggcctgaaccagtcgttggtggcaagattgcttttgagagagatccccaaagcccaaagggcagggtttgctgactgtggcacctagaggaggagatccaaaaggatgattctgaggtttctactgcaggcacccaggtgatggtgaatctgttaaccgagacaggggagcaaattcgaagtgcctgtcaggactttcacaaggagttattcagcaggagacatttggaaatatgcggcagggatccaggagaggttgggacagcaaacacacatgtaggagtcattgggttgtacaggcagttcagtggggttgcgtttttaagggaaagagtgactgattaagaagtggatagaggtgatgaatctgagaacaatggattcagggtattgtttcaagaggtttgatggttaagggtaaaaaagagggcagttgcctgagaggtagatgagtaattttcttttctgggacttgaatgcatgtgtgggtgaaaactagtggtgaggaagacaatggcaatccgagaaaaaggagataattaatgtagtgagtttggacgaaaaatattgggggggtcttccttttgaggtggacaggaggaggaaagtatagtagatgatgagatgaacttagaggtggatagaagagaaatgaaacttattatatctccatttgcttaaaagaggaagtctgagtaaagggagggtggagaagggagtttaaggatacttttgaagatgtgagagctgctttgaaaagtggaagagaccggccgggcagggtggctcacgcctgtaatcccagcactttgggaggccgaggcgggcggatcacgaggtcagatcaagaccttcctggctaacatggtgaaaccccgtctctactaaaaaaaaaaaaaaaaaaaaaaaaattagccgggcgtggtggcgggtgtctgtagtcccagctactcgggaggctgaggcagaatggcatgaacccgggaggtggagcttgcaatgagctgagatcgcgccactgcactccagcctgggcgacagagtgagacttcatctcaaagaaaaaaaaaaaaaaaagtggaagagatagtcatggggataagaaaaagtttgctgaacagcaatgagtccagcccaggctggggctcatttgtctgcagcggagccaagcgcacagcatagcagtgttttctgtactgctgggaagcctgcaataagcagccgggaaaatgggcaggtgggttgatccgtggctagatattggctgggcagattttgaagaaagattttcttagggataggaaaatcaaagatattcttgactggtgttagtgaatcaactatgagtcctggagatcaaggataagtagtgaaggaagtaaaacttggaggggttctagggttagggaaatcgggaggggcaagagcttggaaggctgaaggagatgaatagtagaataagcaggtttaaacgagaaaagaaaaaggaaataatgttatggatcaggcatagtattttcatacatatctagtttatcaattcataagtcattccttcaataacaaaaatatttatttttgtcttattataaatataaaatatctttattttgttatattaaatggaacaaacacttttcagtcttatcctggaaattgaatattttacttaaaaaaaacccctcattttaaaactttggccaagttgtatatggtttatttggagacacacacacacataattattcaaggggaataaagggaagttaatgaattggattttttttgctcatagctaatttattccccatctactgtggtagtaaaataaaaattaaatatttacagttagcctatcattgtcatgtacctgttacaattaaataaagtgaaaatttaaaatgtaagctgaagttaagtttccaacctaagtttcttttagcattacatgtaaataatgtatttacctattacaactttctttttcccctcattaccattttttcgttcccctacatcgatatctctgttacaaagcaatggtatctatttatactatgcagatcagcttcaatgatgtgaagagctcacagaaataataatagacacatttatttgcatattatgtttctgcttctgcaagtaatattctttcttataatgcttgtatcttttatttggagaacttcaagtgatctggaagaatcccattgtattccataaaggagagtagatgagcagatggcttccacatctgcaaaatgggaatgttcgtggacttctgaaactatattgaaatttcagaattctctgtggcagttatataatatgctccttgaaacaacagcatattcaggaatggactagaatccaggccttttgccaacaagccattctttaatcctactgaggtcattattttctctatttcctaaagtcaacaacctgacattaaggaagcctttgctatgcaggtttctttcaacctatgtctctctgtctctgtctctttctctttcccttttatatctgttattcaaattacatttatgtgtagttacacattagttgttctctcttacctccattctaagttccttcactagatttcaaaaatcgcttaccacatcaaatacagccgaggccatccatccttcaagctacccatcatcagagccataccttatatattattctattcctctccatcacaacaaaacaaaggaaaactgatcaagtgccctcagcattctggaatacaatctcccccatcaccccagaagtactaaaccatcttactattctttagagggctttgaagttggtactttgataccagtgagcacgtatgttggtgcaactaacttctccagaacaagagccttctccctctgcgattgtacagatccaggcatcttgctaatgcttacaaatgtcagatttattcttcattacaatgctattgaatataacaaactggcctcatcgtaagaatctcctggaggaagatattgaaaacacagtttctctgacttccctcatatagattctgattgagtaggtctgaggtagggaatggaattttctactttttatcaggcaactcaggagaatcttatgaccagtaagacaaaggaaacactgagattggtgatttttatccctattttaagatgaagacatgaaaggttttctagagacatactgctcaatatggtaaccattagccacacgtggctattaaaatgaaagttaatgggctgggcacagtggctcacgcctgtaatcccagcacttggggaggccaaggcaggcggatcacgagatcaggagatcaagaccatcctggctaacatggtgaaaacccgtctctactaaaagtacaaaaaattagctgggcatggtggcgggtgcctgtagtcccaactactcaggaggctgaggcaggagaatcatttgaacccaggaggcagaggttgcagtgagctgcgagatcacgccactgtactccagcctgggtgacagagcgagattctgtctcaaaaaaaaaaaaaaaaagaaagttaactaaaccattaattttgtaaaagtatgtgagatgagagatatgttaatcttcttcactacagtaaccatgttactacccatatgtatcccatagcatcatgttgtaatcctcaattatacataagaaaatttatcttaaaaactaaagagaaaagaaaaacaggtattaagtttttcagtcacactagccacatttcaagtgttcagtagccccatgttaccagtgactgttgtaccgcacagaacagatacagaacctctctgtcatccccaaaatttctattagacaacacttctagtagacaccacatttgttagcatgtgatgtttttgcttctgcgagtaataacctttcttggaatgtttatcttttatttggagagcttcatgtactctgaaggaatcccgttatattccctcaaggaaagcagatgagcagatggcttccacatctgcaaaatgttttctagagaaaaagtgacttgcccaaagtcatataattaatacgtagtggaaccaacttaatgaggatttagacctgcacctttctgaagtagaatcttgtgccactgtaagtccagctttgttcagtggagactgagtcagcttgagggaaaggattgaaagtttgctctgtgctgagattgaacaagctctcctcagatatttctgaaagcctagatgtctatgtcttcctttttgggtagtaggactgaaacagaatgggcctctgagaatggcttagtataaaccattaatggtaccatatttgggggaatgcagacagatgacagccattaatctgactgcacaataagccagatttgcatccatggctgcaatccacttcttacctacatccaatcaacaggaagttcacctggttcaagagagcatctacttttaaaatgtttccttttcgcagtgtggaaataacagttgctcttatgtctaggcagtccttcaggtactcacagtgtttcaaatttaaatcagtggtttggattctggagtacttttatcttgcataacaaatattattgaatgttggtttggttttcacctataaaaatctgcaatgtacataaaagaaataatacacctgaattataatacagaactataagtacaatatcaattatatgtaactgccatttacaacttgtcttttatgagactatacaataaacattccaactgtatgctgggaataattcttcccattctgttaacccataatagtttcaatggagtgcatgagctcaggtacgtgagctgatatgtcttgggctcttactaactttctacacctatataaatgatgcatctctcattggcaaagacacaaaagtttgagaacatgctggtgagcctgtgtgtaaatgatgatctcctatgataatggtggcagtgcaaacggtataattcctatggaggtcaatgtgtccatttttataaaaattacaaatgcatttcctctttgacttagcattttcatgtctacaaatttttcctatatatatatatacctgcatggtatgaaaggcatatatatataatatatatatatatatacctgcatgatatgcaaggcatatataaaacaattcattgcaatattgtgcatactagacaaaggaaactgcccaagtatccatcgataggggactgattaaaccagtggttctaaacttcagtgtggatcataatcacttggagggcttgctgaaacacagattgctggattgtacctccagaatttctgattcagtaggcctggggccaatgggcaagcagagctaaaatccagcccatgttgcattctacattcatgtggggctggctgcatctgccctgaagaaggggcacctttccatagtttgcacgtaaatgctatacagctagcagtagtctgagactctatgaaaaagctgtcagtctcataaaaatcataaatgtattgttattctgataaaaatgccagcattgtttttccataggacttgacataattcaccctaaatttataaacaattcctacatgtcagtaagaagacaaatggggagaggatatggagtcacaggataagaaaccgcaatggccagtaaatatatgaaaggttgctcagcctcactagtaagtgcaaatgaaggcaccatttttcacctgttgaaacaggcaaaaatgtggaagtgggacagtaccgagaattcctgaggatgtgggaggaggtaactcttataccctgctagtgggatgtgaattgcgcagccactttggagggcagtttggctatatgaagtgcaggtgaagatgctcaccctttgacctaatattcttaacacacgcagtagagaaacttgtatatatgcaccaggagattcgtgcaccaatgttcacatcagcattgattgtatgagcaaaaagagaggaaatatgtgagaggtccatcaacaaggaaataaattgtactatatgttagaattataaataacagttaaaataagtaaactagaattaaatataccatgtacatgtgtgtatatatatttacatacatatatgagctatatatcataatgtgagtgaaaaaaacaagctgcagaatgataggtagaattaagcttgaacacatggataataatattatgtatggatacatacatacgttgtaagagtctaaaatgattgacaggtgtaaacaccagttttagcgtagtggtgcctggtgatgttgtggggcagggtagagggggttgcaaatgtagctgtagtattttgtttaaaatttttttgaggcaaatgtggcatagtatcaccattttatttagctgggtagtaggtatatatattattcactttattattctgtctgaactgtttcataactaaagaaaacatgcacgtacaccaaactgttgttatagtagtctataactcaatgtatctcatctcttggctcatataaagttggatacagagcagggtccagagaagctttgttaaagactttttaaataccatgcagatgatgggactggttcatagcagtactttttaaccttgattttgtgcaaaacagattcttaatcagtagataagaaaatctacctaattagtgcattttcccagggagccttatggtattagccagcaaagactgcagctttaattgagacagtgatgcaacttaattggaacacctgaatgcgattaagggagggggtactcatataaggtcagctggtttccctggtgcccagagctctgctgggtctatacctttttgctgacaacctctgccaactgggatgaagctgagccaaatgcttttactgtctttcttagatcacttaatgaaatgttttaaatacagattccatgtatttcagtgtgtattgtgaaacacattggcatgctgattctactggtaaactttagaacttattacatagaagcactagatatttgcattgcttttaattgttattgatgcaggagtttaatatatattaagtgaaataaattgataattgtgttgagactcaataatgtattttagttgattacatctttatttgggttctccagagaaacataactaatgggatatatatatatgtgtgtgtgtgtgtgtgtgtgtgtgtgtatttgttataaagaattggcccacacaattatggagactgacaagtccaaggtctgcagctggtaagctggaggcccaggaaagctgatgatgcagttctagtctgaaagctagcaggctggagacccaggaagaacccatgctccagtgcatgtccaaagcctggaaaagaccaatgtccaaactcaagggattcaggcaggagaaaatttcgtcttactcaggctttttgttctactcaggccttcaactaattggatgagggccacccacattgcccaatcggctttactcagtccacccgttcaaaagttaatctcttcctgaaacaccctcaccaacacactcagcataatgtcttggcatcccatggctcaaactgacacataaaattaatcatcaaaacatctttttgcctaaatttaagatcatttcacaaggcttctggacaatgtagtttttattaccaaagagtacttatattcctttattaatttaaaaaagtgcttgaattcctccataaaaattaatgtagtactaacagagaagaaaactctttaaaaattgacactaatctttaaaaaagttttttttgtaaatattctattactaactagttttgtgaccttggatcaattaatttcttgatctgaaaataggagagcattggaaaggacgattgtgatcccatccagctctagaggtctgtaatctttgatgttttcatcagtatatggatgttggaatgtgactggcattggtatgtctatgctacctgctaccatccaaatgaactcaagttgctttcttaggtggattgtggaatgtagtggaatgtagtctcagttatttacagttctacttcatacttaatctccttggtgcgtataatgactagttagaagtaagtgaatttcacctatgaggcctagactccaagcagagctgatgtcatgagattccagcacatttattaagtgctaggtgaactcaccttatggaagagcaatttccataggaaaaaggagtgattttaaagaatgtactatctacatagtcaatactattggattttcaggtggagtttttggcctctatttttagagcatcatgtaccatagctttgggggtaatttttcactaacatacattacttaggaatgtttaaatttagtgattaactgatccagtgactggcaatcattagattgccaaataaataaaatttggctctgtgatgagctatattttcaactgttctaggtcagattttattattggagatgtttgagttattatcagaaaaactgtatccagagacatagtgcttgaccaaatcatgtggacagtgggtcaaaaccattttggcatttcacaaaatcttgtgaggataagttagaacatgctaaagtaattttcactagtgagtattctatcaaccttgtgaataatttcagaaaatattagctggctacagaaatgttgaacggtttatagactttttttcctggaccctcccaagcctagcaatactaccttccattttctagccaagttcattccttactgttacacatatccccagactaacagaatgcaagcatatctgggccccaaacacagttatctagaaatgcgtttttttacattaatggcatagattcttgagaaagaaaaaatgtaaaatataaagcaagcatttcaaacaaatgtatgtctgtgtggagagaagaaaaatgaaataagaaaaagaaaaaaacataggaaaataagagagaaacctagaggagacaccatagaacctgatgtgttggaagggaaatcactgaaattcctgggcttgtggcctggcttattttaagtctggcctgatttcttttaatgtgcatgttgtgttcatttgcatggttgcaatctttaagcaaagaatattttcaggattttggaataatctgagagcccctgataaaatgagtgcagaaaaaatttaatgactgtgattagtcacaaaaagagcaaagggaatctcattatttcagtttctgaatttcagttagatgttttccttaaaaccaagaaaggttgtctaatgggcaaaaacattgttattcttcatggattcatagttcctgtgatgctctctgaaaaagcagctatatcagattaattttctttttcacactcttccctctcatttttgtaaagaaaaagacagccaatctgtagcttccttggggggcattagacagcttagaaaagtggcaaaataaacaagatttattctcatcagatgtatcatgagaaaattggaggcgtgctgtgaggtaatgacaaaataatcttgaaaatttccaagcacttcttccaagtggaatggaaggaaatttaaagtcagctttcatctatttatagctgaaacaagatgtgtgcataaatgtatgggcatatatattttttctaacaatactattggtttcctctcctaaaaaagaggaaaccaaacttaaggtcttagagttctagaaaggtgtcctctggaaaagttgaccacagcgggattttagtttctctatggaataaggtagtgggaatagtaacatgaaatggtagtgtgttttttcctctctgtccatcttctcccatttctcttacttatattaacctttgaaggtattgttccagaaaatgcacagtgccaatgggaccttaatttatttcagtggtcatttgcagaaaacaatatttttgcctctgcttacccattggagctgatatatactcttttatgtagcatctgtaagtacatgaggattcattgaatgcctttgatgggctaagctttgtggccatattagagatactgggcttgcttttagaacaggacttgggaagaacttagggtctctcacacttcgctgcaggttttgctcacagaatttgggacctctatgagggtaagtgttggaaagcaggaaacgatgctttattgtttgttcttaagcatgccttctttccatccagttgctggctgagccctacgagggtcctggcttggctttgatatatttcatataagctcttgggagaataagtgtttgtttgtttctctttgtggatgaatatccaaagtaaatcacagagaacttaagttggtttttatgtctcttatttttaactcaaggtgggatttctacagggtaggctgcagaatcaaggctatccgtgaatcattttgccttttcctaggagagactgttcaaaaacctgactctcaggcaccaataataaatgtgctttaaaaacacacatacactcccttcagttcaattatggagaatccaatttatccccgttctctaaggcatttaccagaagaaaaagagagtccttgggcattattctgtgtaattagatttttacacctctgtattgtgaattgggatttccaatttctccaccctaaggtgtaaagtgatggtgcttagcaacctaagaccatagctgatgttataattcatcaggacttttagactgttataatttgagaaactctggtgaaaataaacaatagtggatattgtaatttcttttataaatattaaatctattttattttttagaaccatttgtcttatttctcaaaattaatcttcacctgaaacctcaacagtttttaagaaactgtgccaatggcctgattaatcttctcatatgtggattttcctcagttgccaggaaataaccacctggttaaaataaacttatttttatttatttctgtatgtttcaccttcatagtaacagtaaaaatgcaatatctgaaagtcgtgatttttttttttgcaattttataggaaaaaccaaagctaaaatgtggatataaaacataacagtctcaactatttttaaaaagaattgaaaaaagattagcagaaaatgtataaaaaacagtgtttggatttttgtatctttttgcacttaatcagtacatttttgtgcttttctaaaagtaattgaaataggaagctacatatttcagagaagattatagaatgtatcatagttgtgatgacacagaatgttgggggaacgaggcataatctgctataaatagtatcttccaagaaagactgctgataaacagtagatttgagttgatctgcttcaggactgggaactggttttagaagaaccttctagaatgagaaaatatacagatttgtcaggctcttcagacttcataaaagttttacccagagccttgtatttgctgtggtttcagactggttaaggaaaacagataagccaagaaaggattttgtttgtaaattatttcccacaaataatttcatggacaaaactcatttaaaagcttgaaaagaattaacttgtaagagtctgatttattattattattattattttcttttttgagatggagtttcactcttgttacccaggctacagtgcagtggcacaatctcagctcaccgcaacctccgcctccctgattcaagctattctccttcctcagcctcccgagtagctgggattacaggcatgcgccaccacgcctggctaattttgtatttttagtagggacggggtttctccatgttagtcaggctggtctagaacttctgacctcaggtgatccacccgcctcggcctcccaaagtgctaggattacaggtgtgagccaccgcgcccagccaagagtctgatattttataaacagatatgaattgaatttcaaatgtgtgtgtgtgtgtgcatgtgtgtgtgtgtgtgtgttcatttattttgagacaggatcttgctctgtcagccaggatggagtgcagtggtgtgatcacagctcactgcagcctcgaattcctgggctcaagcaatactctgcctcaccctcaccccacccccaccactgctgagtagctgcaactacaggtgtgcatcaccacacttggctaattttttaatttttttttgtagagtcaaggtctctctatgttgtccaggctagtttcaaactcctgcactcaggtgatcctcccatctcggcctccccaagtgctgggattacaggcatgagccaccatgcctggccaagagtgtatatttttggtaattaatattcaagctgaaaactgtacctttctcctttcctggggcattggcatgggttttgttgatagaatgcattgtaatttggtttactcttgaatatttactcagccattctttcattcattcaacaaatatttgctgagtatataaacacaatatacccttggaggagagataagctatatttgaacagctgcagtagaagtggtacacaatcttgggagaatgccaaagaaggtgtgattgcttccagctggggagatccaaagaggtttctactcgggttgggactgtcatgtgggcttgaagggtctgaaagtggctagcaggggacttagggggagaaaggaggagagaaggcacatgtatgcacaggggcaagaaggcttaagttgagtgaaagaagtgggaaataaagacagttgaggtgagatcccaggcccgtggtactaggacgaggggttactaccctaggcaatagggaaacattgaagattttttttttcttacaaagatagtgatatgatcttgcagcagcatgttaaatgaaagctgccagtccaggacaagtcagaaggttgtgcccctatgactaatgaggtgtgacccttatgactttcaaaagagtgtcttagtaacatcagtgccaagatttggttctgaaatacagttcccacctctaacatctgggcctttttgtaactcatgctacctttgagtgggaccaaggtggtcagctttgatttagcctctcctgttctgccccatcagccctggactccggccacttctcagaaccagcctctgccacacacaccaagctttggctcattccccataatcctccaggatcagccctggcactccccctcccactctggttttcacttttttgttcctgtttaagagctgagagttcctgtttttgtttttctcctctgtctctgctgtgatgctgaagtagggtagatacagagaattttttttttttgagacagatctcgctctgtcacctagggtgcagtggtgcgatcttggctcactgcaacctctgcctcccaggctcaagtgattctcctgcctcagcctcccaagtagctgggattacaggtgtgcaccaccacacccggctaatttttgtatttttggtagagacagggtttcatcatgttggccaggctggtcttgaactcttgacctcaagtgatccacccaccttggcctcccaaaatgctgggattgtgtgagctactgcgcccagcccaagagacttttataatgtcgttgagagatagtagaggcttgattgaaggtgtggtggttgggatggggaaaaggaaatggaatcaagaaatttctggaaataaaagtggcaagatctgatgattggatctgggaatgggagagaaggagtcaaatgaatgctgagtttttgagcctgtatagagttaatggcttcaaaggggccagcagatatttttcttaattttacaaaggtgaactgaagctaagttatatggacagagttgtcaaagaggtgtgttagtttccttccgttgctataaggaaatatctgaggctgggtaatttataaagaaaaaaaatttagggtgggtgtgatggctcatgcctgtaatcccagcactatgggagtcgaggcgggtggatcatgagtctagggattcgaaaccagcctgggcaacatggtgaaaccctgtctctacaaaaaatacaaaaattggctgggtgcagtgatccactcctgtaatcccagcactttgggaggccgaggcgggtggatcacttgaggtcagaagtttgagaccagcctgactaacatggtgaaaccctgtctctgctaaaaatacaaaattagccaggtgtggtggtgcatgcctgtaatctcagctacttgggaggctgaggcaggagaatcactagaacctgggaggcggaggttgcagtgagccaagatggcaccactgcactacagcctgggggataagagtgaaactgtgtctaaaaaaaaaaaaataataagtgtggtggcacgctcctgtggtcccaactactcaggaggctgagatgggaggattgcttaagactgggaggtcaaggctgcagtgagctgtgattgcagcactgcactccaagcctgggtgacagattgagactatctcaaaaaaaaaaaaaaaaaaaaaaggtttaatcggctcatggttcttggttctacagcctgtacaggaagcataatgctggcatctacttctggtgagggcctcaggaagcttacaatcatagcagaaggcaaagggggagcaggtgcatcacatggcaagagctgagcaagagagaggagaaggtgccaggctcccttcaaacaaccagctctcatgtgaactaagggaacaagaacacacctatcccaaggggatggcactaagccattaatgagagatccgcccccatgacccaaacacctcccaccaggccacacctccaacattggggattacatctcaacatgagatttgcaggggacaaaagatccaaactatatcaagtggcttcttttagcatcagtgatgattaccttgaagggtgttatgagcagcttagggtcaagtgaattgtactaacgcaatgcccagcacaagctgtaataaacaagtaggattagagatacatacctgtgccaaaaatggtggtatatcaaaatgtggaagaatcccttccattgcttttagtccttccattattgagtaatctcctttcagtataagacctggcactgtgttttataaacaatttaggaaagagaatgtgatactaaatttggtgacagggatatgaaaggaattcagtgctcaagaatcttgaaaacggtgatgaataatgtagtttcagctgaggttattttgtgtggcccctgtgggctgatcacttgtttgaatgttttcattgtggaatattaaatagtcaaaattgattgatcaactaatatgtgtcaggcactgtcctagatagttttcaatatacagaatattttatttgctcctcatgaaaccctgtgatatgggcatcttattatcctcattttgcaggtgagaaaattgaggctcagagagagaagctcaatgaaacacagcccctaacttacactttttcttcagttcattaatgttgatgttttatttagttggttttaattcaggaatgcactgagggtcttctatgctgaacctttgtgaaaatgtaggttgtatttgtttggagcctgcaatgggtggggcagctcttctgtatacagcagggcaggatggccctagtgcaagagttacagtaaacagccggcttttttcttctccttaattccttagttcagcttgaggactttatcctggtgcttgcctaagggacacccacatcaccattatcatcatcattttaattatgatcaattatggaacattttctatgtgccagctatcatgctgagcactttactgcattagttcatggaatcattagaataaccttatgaggctgctactcttgttttcttcatttaacatgtgagcagaaagaagtaactcacatgagatctcacagctggcaagtagtagagatgggatttgaacctgtctgattcctaaccacagtggtattttgctccaacatcagactatttttttttaaattagaggtggggtcttgctctgtttcccaggctggagtacagtggtgcaatcatagctcatcacaacctcaaactcctggcttcaagcaatgttcctgcctcagcttcccaaagtgctagcttacaagcaagagccaccaagccagaccgtcccctgcctcaacaccagactttgctctcagtcttaggatccctacattgggtacttatttatttggatttagataggcttaatctaaagtccagatacacttgccaaataactttaggttccccccaccccagaacatatgatattgttagctatatcatacatagtttgaactagttattagattaattacctaaagaagctgcaattgcttctttataagcgctacctggtggatgatgtgttaatgggacagtatgcagatattcaaattacagaagcatttttctcatatatcagaagagagcattatggcacctcaccagaagcagggcgtccctggggaggcttggtgatgtggcagaaaatcagctttcaaagctttatagagttcatcataaaatgacattcacctcctttcatttcaatccaagtgctttcaagagtacaaaaataaacattagaaattaacaggctgcttttctgatagaccaaacagtggctacttggacctaaagggcaaattttgttcatcatttatatgttttagtaaagtgagattcgttctcattgtgggaattcccacactgtcccactcctatgtaagaaaattatagacaagcatagagaattacactgcataaaagctgatagcataataaccaattagatgattataaagcctgagtatattaaagtattatgcaaatactgattaatagtaataccataaatgcacagagcaagcaaaagcatgcctgattcaaattataggagcttttatttgcatttctacagaatctattattagtgggtctcaaagcaccttacaagtaataattattaaagctcacatgaccagtaaatgccatgttatgaagtgaatatgaaagaattcctctttacctcatttatagtataagacctaaattcccaaacaaaagtaggattctctgcatatggagagtattcatacattatgggtgtttttggctatggttctataggcttagaaacgggttgctatggattcaaggctttcctattgagtacctcaatctatgtagttagaactcttcacttatttttgaaatttaacccacatgatagctctaaacaaatcttgccagtatattttaatatctctttattgactataatatcaaattttaaaagcaaaaatgatgtcaagttcatatgaaagtactttaaaatattttggaatattacagcaagtttatttttcctcaagctgtaccctgttctgcggactcatcgcttacgagcacaatcagtgaagcctgtgtttctttctgtaccctgcagcaagtagttgaaatgttgtaagggtttctaatctgcatgagaatgctcctacacccaccctttcccctctattcctccttctctcttccctcctttgcaatttccatactctctaaagctaagcacagattggaaaggcaagaatgtttcaggtgtctgactctccctgtccctccatctcaagtcctcaagcttcccccacatggttcatactcagtttgatttactttcggtgctgagagactatttaatatattgcagtttctggtcattgtgaggcagctggactttcgtactgtacttatatttcaatggcatgcagatccaaagaaatgtgtagactagtgagcaccttcctttatagttaggattctggagccttgagagtcgaatgacttgactgaggttgtacagctggtttctgcctcacagaatcgagaccagagctcaggtctctaggctcttaaaccaaagtttccccctctgtctcgtggtggttatatactgctttgaatcacacacaaaaattttaaaccagaaatattggagcagagtgagaggaaacacttgttgattttatccaggactgtgagtcacaagactagaggtggagcctcagggatctgaagaaaaagggagtgatggccaggtgtggtggctcacgcctataatcccagcactttgggaggccgaggcgggcagatcatctgaggttgggagttcgagaccagcctgaccaacatggagaaaccccatctctactaaaaatacaaaattagctgagcatggtggcacatacatgtaatcccagctactcaggaggctgaggcgggagaatcgcttgaacccgggaggtgaaagttgtggtgagccaagattgtgccattgcactccagcctgggcagcaagatggacactctgtctcaagaaaaaaaaaaaaaaaaaaaaaaagagagtgatgtgcttgcagaattgaaggcatagacctgggattatcatttggagggaggagctgaatgactggaggtcgaggagaataaagaacaagtagaagtggagagagggcgaggtagaagaacagtcttaggaggattagaaggatggttgagtttatggtcatggcgatagtctattgatagaaaataaagcaaaactcaataggttacgggatttagtccttagggtcaatttagtccttagggtctgtgaagcctctcaggatgatgccagaaggagagggagagatggggcatgtgcagcaggtagcaaagttctccgggaagacagactactggcaaatatctgggaaacaggggtgactggagggatagaaacaggggtgactggagggatagaaacagagagactggagggatggtttttggaactctgtagataggtgtatattctgtgctatacttaagaattctaattttcatatttttctagggaaaactgaggctgccatcaaaaacttcagtccctactacagtcgtcagtactctgtggctttctgcaatcacgtgcgcactgaagtagaacagcaaagagatttaacgtcacagtttttgaagaccaaggtaagccatggatatttggtttacatgtatttccccttgaagaaggctatatagcacagccgtatttctgaaataaacaataatttgaatggcagttttaaaaactctgctctgaagtcgtttcatgctcaaaaaactctatttgcctggaagttagaatgtatgatttcttgttgctgatataatccatagaaaaaggaaattagcttgaatccaatattgttatgtatttttcccacatggatgctttgtttgtctaagaaaatttgactttctgtagtgaagttttggtcattgatcaaatatgattttctctttgaatcccctaatttattcttactcctttgctccattataataagtaaccaccacctcgacaaatgtttgttagcacctactatgtgctaggctatagtccaagaactggggaattaagacaagttctctgccttcctggagtttatattcacacacaggaaacgggtaataaacaaattaatatcaggtgacatcagataataataaatgctaaaaagaaataaagcgagtcttattttatttttgagatagagtcgtgctctgtggttcaggctggagtgcagtgatacaatcgcggctcactgcaacctctgcttcctgggttcaagtgattctcctgcctcagcctcctgagtggctgggattacaggtgcgcaccaccacacccagctaatttttgtatttttagtagagacaggatattcaccatgttggccaggctggtcttgaactcctgacctcaagtgatccacctgcctcggcctcccaaagtgctgggattacaggtgtgagccaccacgcccagcctagagccttattttagagaagatggttagggaagccctctgtggagataacatttaagcagaaactggagtgcaatgagagtaggctgtgtgaatattcgtgggaagagtattccaggtctatggaacagcaagtgtgaagaccctgccacacagagggaaggtcggtctgctgggagcactgtgagcaagggaggagggaggaacaatgacagcagagagacagatcgggagcacatcatgtcaacctgtgggtcacaacagggttttgattttgttttgtaatgggaagtctcccactggagggtattgaatacagagtggcatataattttagatgatctgtctggcctctgtgtaaagaatagactatggggcgagaggggagaatggaaactggggagcaggatactgtagcatctgagggaagaatgatgccaaattggactggggtggtgatggtcatggttgtgaggagaggtgcttatgatagagctgacagaacatactgttgggttgggtgtgagataatagaagaagagagaaatcagtgatgacttcttggtttttaaccagagcaaataagtggatggagttgccttttacttagaaggaagagtcggagtgaatgggatcacgagttcccttttggccatgttaagtttgagatgctagtgtggaaatgttgaataggccattagatgttttcatttggagctcagcagagtgattgagcctggagaatagaaatttggaagatgttagcttataactagtattaaggccatgggccataaaacagggaaagactatagacagagaaaagaaacagtacactggccccttcagcatttggagatcagaaaaaggagaaggatccagcaaaatggactaagaagaaacggtctatggagtaggagaaaaatcagaaaagcataatgtcccagaaggcaaataaaaaaggggtttcaaaattaagaactcaatcccatttataatagccacccccacccaccacacacacacacacacacacacacacacacacacacacacttaggagtacatttaaccaaggagatgaaagatctctacaaggactacaaaacacggatgaaagaaattgtaggcaacacaaactaatggaaacacatcccatgctcacagattggaaaaatcactatcattaaaatgaccatgttccccaaagcaatatacagctccaattcaattgctatcaaattaccaatgtcatcttacacaaaattagaaaaattaatcctaaagttcatagggaacaaataaaagcctgaatagccaaagcacgcccaagcaagggaacaaatctggagacatcacattgcctgacttcaaattatactacaaggctatactaactaaatcagcatggtactggtacaaaaatagacacatagaccaatggaacagaatggagaacccagaaataaagccacatacctacaaccaactgatctttgataaaatcaacaaaaataaataatgaagaaaggataccccattcaataaaaggtgctgagaaaactggctagtcatatgcagaagaatgaaactggacccctatctctcattatatacaaaaattaacttcagatggattaaaaacctaagtgtaagtcctgaactatagaaatcttaaaagaaaacttaggaaaaactcttctggacatttgcccaggaaaagaatttgtgatgaagaccccaaaaacaaatgcaacaaaaacaaaaatagagaaatgggacttagttatgctaaaaagcctatacacaaaaaagaaatagtcaacaaaataaacagataacctacaaaatgggagaaatatttgcaaattatgcccctaacaaaggactaatatccagaatctacaagaaactcaacaagaaaaaacaaccccattaaaaactgggcaaaggacatgaacagacatttctcaaaagaagacatacaagtggacaacaaacacatgaaaatatgctcaatatcaccaatcatcagagaaatgtatattaaaaccacaccaagatatcatcttacagcagtaagaatgaatgtcattaaaaagtcaaaaaataacagatgatgtggatgtggagaaaaggaaatgctcatacactgttagtgggaatgtaaattagttcaacccctacggaaaatagtatggagatatcacaaataactaaaaaagaactatcattcgactcagcaatcctactactgggtatctacccaaaggaaaataaatcattatataaaaagactcctgtatgtgtgtgtttatcacagcactatttttaatagcaaagccatggaaccaacctaagtgtgcaccagcggttgattggataaaaaaaatgtggtatatatacaccacaggatgctacacagtcataaaaaagaacaaaatcataccctttgcaacaacatggatggagctggaggccattatcctaagtgaactaactcagaaacagaaaatcaaataccacatgttttcagttataagcaggagctaaataatgggtacacatggacataaagatggagagaatagactctggagactccaaaagtggggaaggtgggaggggagtaagggttgaaaaattacctattgggtacaatgctcaagatttgggtaatgggtacactaggagcccagtccccaccgttacacgtaatacccatgtaagaaacacacgtaccccttgaatataaaatttaaaaaactaaaaataaaaaagaaggggtttcaagagagaataagtgataagtgagtcacataatgctgagaagttaaccaatatatttagcagcatgagtacatagggataagtgattgctttccctcataaaacagtgatctcaaaatttagggagcttgttaaaatgcacattatggcccacagctccagagattctgatatagtaagtctatcgtgaggccccatttttaacaagcttatcagttgattaagtggtccaggttttaagaaaagctgcacataagaactatgaagttcagcttatgccatggtttcagtttcatttaaagagaagagattctctcttaccttttaatgaggcaagataggggactgccgcattatctgtctcctatcttgcctcattaagcactggaatttggaagggaatttgtttcatcccttagattattcttaaaagagattggcatatctattttttttctgtatagctcatttaaaattttacttgaaagtagaggggtaagtttctgaaggcactatgattttttaataaagggaaaatagatgtaaactcagtgacatgtaaaagaaaagaggcccatttgtatattttgaaataatatgaaaattacacaatgaagccggatgggaattatccttacacagttaatccaatggaagatgtaactaggaatctaatggaaatgcccgcacagcacatatatcaccacagttaataagaaatcctcaaacttttcagtagaagcggtggaactcaggtgttctggcttgatacctgcttgttctttaaccaaatagcaaacatgatctccttgagtagcatggagaggggtccccatggctttgggtttaggaaaaccattgagaattggaggcagcatcggcaggtgtaatggataggggaacggtctgttaattctcccgctttgcggggattaaccctgagtcatgttcagggtgtccaggtaggtatccacacttacactttcctgcctcactccctctctcccatagagtttatcaagcatttattgagtgccacatgcatgcaaggcataataaccttattactataattccttctaccatatgcttctgttcctatagcataatagagggaaatgaaaatcataaaaataccaataagacaaatatttacattgggtcaagtggagtaggaaagggaaattgtggggggagaggaggaagcaacagtttccccaggatctcagtggaagatagtttcctaaactattccttgaaatagcatggataactttgtggtaacaaggtgtgttatcttttgttgtgatagttaattgtattcatcttctttaagccaccattggcgcctggaactattttgtatgaagcagagctatcacaattttctgaagacataaagaagtggaaggagagatacgttgtagttaaaaatgattatgctgtggagagctatgagaataaagaggtaagacacttctttgttactactgattcttacactgttcttaaaagtttggctcggttgattggtgtgccctctccttcctacaaggctatactaacaaaatcagcatggtactggtacaaaaatagagactgattcattcaataagcactcattcatgtaggtatctatttcagctaacagatactgattgaatgcctactgcataccaagtgttatacaaggttctgggtatacagcagttgataagacagatgcttgccgtctagtggcaagatagactttgaacaagtgattgcaagtgagtatgaagacagaaggaccagtatttggcatgggagcctttcctatgatcattcagccttgaggtctttctcagccaccatcctgacatctctgctctatgtctctgtcttcccactctgaagccctgtgcatgacaggtggctcaggagttatttcataggttgctattaaatttgaatctgcctgggttttcctgggttcctaggaattcagaatgcctcacatactttatttccatggaggtatttttttttcatttaacttttttctggttatttcactattttccttgtctgtaaaatgtggagaaagtgagataatgggtgtaaagcattcagcccctgggaggactttagtttttattggttcccatttctttccttatgtaggaaggtagtgtggtataggggaaagaatagcaggcagtgaatttggcaaactaaaggttaggtcaagttgtgccattaactagaaatgaacctgttgacaagtgacttcttgccttcagtcctcaattaagctaaacagttaggtcaaatgatcccactatcctcccagatctcatactgtacacattttttagtctgcatagaccctcaagctccctttgaaatgaacagctactatttatcagtgaacgacagtaacagatttaaaactctgctctctggcctctaagctcaagaatagtcaagatggcgaggtgcagtagctcatgcctgtaatcccagcactttgggaggccaaggcaggtggatcacccgaggtcaggagttagagaccagcatggccaacatgatgaaacctcatctctactaaaaatacaaaaattagctgggcatgctggtgcatgcctgtagtctcagatactcaagagggtgaggcaggagaatcacttgaactcgggaggttgaggttgcagtgagctgagatcaccccaatgcactccagcctgggtgacagagtgagactctatctcaaaaaaaataaaaaaagagtagtcaagatagtcttcacagagcactgtgaggactacacctgatgctaggaagaggcttcagactgacagaccaatctgtttccttcccatttctgatggaaaatagaaataaaatatactacaaacttatttcacaggctaccaggcaaagctcaagtgctctcttgggtagacttactcttttcaacatttattaagctaatattttctctgcttatcaatattaggattttattcaacacttaatttgtactcagcaacaaagtatcaatacactacaaatagtgatgataataacaagacaccttatgttttgtatgactcattacaacgtcctttcagaggagcttgaggagggacagtgtagcataatatggttcatactatgggctttgactcatacctttaccacttactagataggcgcccttgcctaagctataaatcttgagcctcagttttctcatctgtaaaatgagatctgcgtgatttctttgccatggtgttgagaggagtaagtgaatgaatgtacggaagcatttagcatatggctgggcctgtggtaaagctagagctgggtgtggagcagttgctggtatgattactactaacccattgggaagaaacagccctagatcttgttcttggatttattaaagtttttcactgcatttaacactaactgaggtttcattttgaatcaaatgttggtgtttttcctcttttcacttatttcagcttgctctctcagcttgcagtttgtacattgcactgctttttctttgttcatcgtttttaactgaacctgttcaaattgttaagatatggtgacttaatttggtaataaccaagtgttttttgaaacttggaattcttttaaagtccacgcagtttgtcataatttcttgaagttttaataatatcttctttttttaatttatggaagtatcttataaaattatatctaagaattatgcattaagtacctgtaagtcatctattattttatttagagtccaattctggctggcaattaaacaggaaaagtaaaacattctcacttgataatcagtttctattttgtgtgcactggggctggacaggcatgaatataaatcctggatgtgtcacctactcactgctgggccatgggcaagttattcagtctctttgagcttcatgtttcccatttgaaaaatggagataacatgtaatgcatagtactgttttgaggattaagtggtataatgcttataaaagccaatattggggcctgttataactagtaatacaattcacttttgagtccagtctaaatcaaattgcttgtaaatcttcttaatatcatacaagtttagattcttctctcaacattattgtttcactataatgtagctctgtgggagttcttagagctgtaaggtattatttcatggggagccctcaattatgtatagatcctccttcctgggttaatcatttattcagaagagtcctccaatcgtctttcttaggatgaataggtcaggctgccagaattctgtgttagtgggtatattctggttccctcacatgcttaagcagttgattagtcgttgttacaagtaatttagatatctgagagtttgtttcatttggatctcttcactatcttattgctgcagaacgtgttatcgttactctgattatgttggtcagatcaacattatttagtcatttccaagagtaaattctagattttgggtctcaaactttcttagtttcaattctcaacttgcctttagattactagtttcagaattttgccttgacttaagccctcccgtcagatgcacatacttaaatgttatcttatctgcatgtccttgtgggcataggtgcttaccaaactgctttggcaatgccctgtgcctcttttctgtgtctcaaatagcagagcttcttgtctgctggccagcatttgttctgatgtcacagtgctgtacttccatctcaaccattttgctgcaaaacagtttcacatctgagggcaaaatagtggcatattttatgccaacattttcatgttttgatgaaaatccatggtaactatcattgcagctacgtgttccacagtctcattagtcatcctatgtggcccacatcagtcaccaagcattctgtgcagtatttgtgtgatcgtcacctttgtggttattatcagaatgatttagttgttagcatctgaaatggcaaatgtggtgcagactttcagggttactgagattatgttttccacattcgagaacatacctagggtaaatctccctgagattagggactctgatttaccatgttgtgactgtcacatgaaagtattaaaatattaccttgccattagcaggtattcaaaacatattttttgagtaaatgactataactcaataacatagtatggggattgctatctctgaatgtctgaatctgtctatttgttatatccctgatattttccaaaaatcaaatggggaaaaagatatcattcctgtgtgcctttccctccccaggcctatcagagaggagctgctcctaaatgtcgaattcttccagccggtggcaaggtgttaacctcagaagatgaatataatctgttgtctgacaggcatttcccagaccctcttggtgagttgctgatcattcttttccaaggcaaaatgactaagcttctttgtttagctggagcagtgtttctctgtgaaggagagggatttccctccagggacatttggcagcatctggagacatttttgtttgtcacaattggaatcggggtgctatggcatttagtgaatagaggccagggatgctacaaaacatcctaccatgcacaggacagaccctaacaaggaagagttatctggtacaaagtatcagtagtgccaaggttgagaaaccctgggctagtcactcatgtcccatagacaagtggaagatgtgatttctctagttgaggaaaacattttaccacttccattatttctaatcccattcaataatacacagtcagtctctgtgtttctagcacatggaaaatgtgctgtcagccaggtatcttgaagcttttggaatatattgcaggctttgatagcactccacaaggcagcagaaataaacaggtagggcccagtccatgaaatatacaatcccatcttctagtaagcaagcctggacctgtcagggaatactatttttctaattttaggatgatatgcaactaaataccctaaatagacaaaaaaccttttaataagtgttacagtaactcatagctactgtgaaaaaaaaaagcattgcattaatttgcatatctataaataaagctgggatgctgccatggaaagataattgggagattggatttttatctagttctggctgtgccacttaccaaatgctttagcttagccggctgctgaacagctctggtttctgtttctccaactcaaaaacagggctttgaacttaaaaacctagaagggtctttctaggtctaaccttctttgattctcattcattccactttttacatgtggagaaatgatggataatatatagactaaataaggcaattcatagagattcatgaagtgtggataatgtaataactccatttggctttgcataaatcatactacatagtaattacttggttcttgaagagagccctggttcttattaacggacataataatttcattagaatttatggagaaaaacataatcattttatcaattgttatttcggtgctgagtgcttaacatagtgtttttaataacacaattacaggattggtacatggaccataaactaagattaacaaattattactaagtaattcatgctaaaacaacactttatgtgcactatgcatattattatattttcttttacatctacttatatgcccttggcagtggagctgcagctagaaatgggaataccaacatgttgactcatccaaatctctctaaaactttccaatgaaatcagccagaagagacaatatgtttattgatttattgctgtaatcatattggagggaatgaaaaggactaaaaaacacaagtcctgtgtgattaatcccagttggcccaaggcttcagattggggcattttaatgactttttaaaattgtgtgttgtgaccttctgacttttaaaatagaatattctacagtagatcagttgtgatattcttgtaactcagaaaaaattcactgatggcatctggaaaattgttgtaaaaggttgagagataactagaggctaaaaggaatgaattttatgggtttgttgaggctttttaaatgcaaaggatcaatgttgcttttggttgcttgtacaaaattatgacattcttggagagggcaaggaggattgtttgatagaaccatgtcagtcaagaagactgactctgtgatattatttctaccagaaagaataaaggcataataaagatgggatgcttatgaataagtgcatttcttggaaaaagcactagaggcttatgaataagtgcatttctttttcttttttcttttgagacagagtctcactctgttgcccaggctggaatgcagtgatgtgatcatggctcactgtagcctcgacctcctgggctcaagtaatcctcccacctcagactctcgagttgctgggaccacagctacatgccactatgcccagaaaaacaaaacaagcaaaaaaacaaacaaagaactgcagagacaatggtctcactctgttacccaagttggtcttcaactcctgagctcaagtgaccctcctgccttggcctcccaaagtgctgggattataggcataagccaccatgcctggccaataagtgtattctttacagagtgttcagctaagttgatacagaaaaaaatgcccccgtgttttgttaaagtaattcacttgtttggcattttactggttagaatctcatttactgcatacaataaaaaactcaaagttttattatctcactaaagatatttcgatattagttcagggctggtgtggactaaatttgtctgaagctcaggctctttcttgctttctccccctttatttctaggttgtggccccttttggcagggtccagggtggctgctgagctcctaccatagcattctcattccagataatagggaggagaaaaggaaaggaggagggtacattcactttctttagagatacctccaggaagtttcatatgccacttcagcttatatcttactggacagatcttagtagctgtgggctcaccaagctgcaaaggaggctggaaatgtagtcttattttatgtagtcacttgcccaactaaaaatcaggggccttattctccccagaaagggaaatagatactgtgttacaactacaggtgtctctatagcattcaatcattcattcatttgctcgttttcatgttgattcattcccagcattgtgctaggtcctggtgggccatggcttgtgctggtggtgcattctcctctgttaccttcagattccaggacactggaacagggctcccatatatccccagaaatttattctttatttaaaccaatacggattgattgattgactgattgattttgagatggagtttcgctctgtcacccaggctggagtgcagtggcatgatctcggctcactgcaacctctgcctcccgggttcaagtgattctcctgcctcagcctcctgaatagctgggattacaggtgcatgccaccactcccggctaatttttgtatttttagtagagatgggttttcactatgttggtcaggctggtcttgaactcctgacctcatgatctaccctccttggcctcccaaagtgctgggattacaggcatgagcaatcctgatttattaatttgccagaactgatgcggttctgtagactcccatgtggtcatgattcatttccttgtattcccagtgctttcaatggcctcttagagagaccttcttccttacctttccctgagattggtgcttaatacatatgcaggaagcacagaactaacattttcttctgcttattttctgtgactctggaaaaagttggaactcatttaaccaagtgcaatatcatgtaataggaatgcatggaaaggagtaaagtttaggtaggggttctgaatagtagtcggtttaaaatgagttgcttggaattgattttgagggaagaggtaaaagtcccattgtctagggctttaaaaaaatatcctaggccaacaaagcacatttttcactcaacaaactgaagttgaacatctgctatgttccatgactgtgctgtgggctaaggatacaaagctatggaagatgcagtctgcatctctagacgttcacagtgggtagcagtggttctgctccttgcggaggggaacagcacgggaatccatctcattcccctcccccgcctccctaccctgagtgtgggcgctgggcatgaaaacaggtcattgcagtatttggggagaacagggtaggaagcacctaactctgtctctggtggcagtgggatgtgccagcaaaggcatcccagaggagtggcttttgaactgacttttgaaggatgaatgagaatttttttatgggaaagcatgatggaaaggagggaagagagggttctatggactgtaggaacaatataaaaagtcacggaatgggtgaacacaccctgggagggtacagactgagagtggaggggaagccagcacagaacagggcaggcaccgatgcttagcgaggagatggagagagtcagcagaggaaccaataaaggtgataaagaagaaacaaaattctacaaagcatgaaggaaaccaggagagaggcactcctggaagtcatggggagataatgttttcaaaagaaggggttgttagcagcagcaaatattccaggtcagatgaaaagaagcagccataggctggcagtcaggatgacataaatggcttcagcagttgggtttcaggagctggtggggacaggaatcagactgaggtgagaataaggttgatggcataaaaacagcaagtggtgtttggcagtgacagggaggagggagagagtgcagggcagagagctgccctgttggagctggagcctgcagggccagtagagtgagggggtgcacaggttgtcagtggcctgcagaggggcaggagggcagaggaagctccgtttgtgggtctttagacataaggaagttgagaaagattgtgcccaggctgggcgcggtggctcatgcctgtaatcccagcactttgggaggcaaagtcaggtggctcgcttgagctcaggagtttgagatcagcctgggcaacatggcaaaaccctgtctctacaaataatacaaaaaaactagccgggtgcggtggcttatgcctgtaatcccagctactcgagaggctgaggcgggcagatcacttgaggtcaggagcctggccaacaaggtgaaaccctgtctctactaaaaagacaaaaattagctggaggtggtggtatgcgcctataatcccagctactcaggaggctgaggcaggagaatcatttgaatctgggaggtggaggttgcagtgagcaaagattgtgccactgtactccagcctgggtgacagagcgagactctgtctcaaaaaagagaaaaaattgtgttcctggtatcctcactgtccctgtgatgttgggtaggaggccaggcagaccgcagtgggacaggggaagctggtggagggatgccagaggagccagtgctcccagtttccctatcctgtgaaaatatctcaccaactttccatcccatggcctgccccagatagtcaccctcacgacctgaaacacacatttgaaataaaagatacatgttttaaaaggtatttgtgttttcaatatttctttagcctccagtgagaaggagaacactcagccctttgtggtcctgcccaaggaattcccagtgtacctgtggcagcccttcttcagacacggctacttctgcttccacgaggctgctgaccagaagaggtttagtgccctcctgagtgactgcgtcaggcatctcaatcatggtatggcgcggctcccctctcatccccggggcgggaagtggggcagccctcgctgagttgttctggtccatcatctattgcagtgattcttagaaagagccacagatgagccaagtgcggtggctcatgcctgtaatcccagcactttgggaagctgaggccagcaaatcacaaggtcaggagttcgagaccagcctgaccaatatggtgaaatcccatctctactaaaaatacaaaaaaatatagctggacgtggtggtgggcacctgtaatcccagctacttgggaggctgaggcaggagaattacttgaacccgggaggcagaggctgtggtgagccgagatcgcgccactgcactccagcccagatgacagtgcaagactccatctcaaaaaaaaaaaaaaaaaaaaaaaaaagagccacagatggtgctgcccagggaagaagagggaaacaggtaaagggagagttctgtgcacaaggagcctcacctgcttgctggttttcaggcaggcctgggaggccccggtgaagcagaacatggggcagttatctggctgcaagttggggggtgtcacattctgactgtcctgagtttattcatgtagaccattttgcatatacttcactctccttcttcctgatttaaaaaaatctaaatgccagcaagaacatgccagttttccctggcaaatgctagtctttttgacatttcctttttattttcacctttatttctgaataacagttactcagttaagatgagtggcacggtccgtggtaatctagtatttgtttctggatcagtgtttcttaaaactttagggctcataagaatcaccaggagaacttaattaaaacacacattcttaggcttcacccccagatattctgactcactgggtacaccgtggggcctggacttggcttttctagcacacggccgagtggcactgatgctgctggttcgcgaaccacccttggggtggtgttgcttcaggccactttgcctccaggcatggacttaagcaatgtgacatcaatagtaaaagagacttctcattccaatatgtgatgtttttgatatactgaggtgaatgctggtttttctggactccacaaagtcttcagttacagataactgcgctctttgttcttggcacttggaaaggcagccagtctaagagtactgagggcttactctgtgccagcctctacgtaggtgttaggaagagagtaatgaagcatacagagttcctgtctctgggagttgaaattcaaacagggaggatggataaacacccaccaattatcatttgaaagttatcacagttaatgggttaaagagcaacgagaggttactaactagtgaagaaaggagtgccgaactttcagctctccaggggagtcctgtatgagcaggtgacatttgagctgagtcacctcacccattgtgcctttatttcctaatatggttaatttcactgtatacttattttaaaattcagaggtttccctgagagtgtcagtcccacagagtgagagtcactagtgatgcatctcaactaactcttggttttagctgtgtattgatggggactcacggaaaaagataaggtcagtctgttttgccacagcaaccctgagtaacattcatcatcatactggatcataactagttaggaacttttttaaaaaaatgatacccttattaaaatcttgccttgtgtttttgatgttctagagacaaaaaattgcccagcactgactgcaccctttagctcattttccactacacttgcccgtctgtgtttagggcctcggtctagtaggaacatgcagttggcactcagcacaggaactgcgaagtttcactgagtgcagaatgctccctgcccagccaaatgggacttactgcattccccctttcatgtacataataggactttctctgaggagtttttggatgttatgtagcctgcatttagactccatttatggaagatttcagcccattcaaaaccccactctgctctccagtatgttatcaaaggcaccaagataatgaggtctagtcatatttccttggttctgtgtcacattcctctgcccagaaactgttttatcctcgctgaggctttatgtggacttaatttggcataacttccagtagctccagtcagaaccagaagctgtgataacattgtagggaacagtccttgactatcatgggccaaggagcagacctttcttttctcgcctctttttctgtttttgacagcatgatgtaccactcatctttattgtgtcacattttctgttctagtctctgcctgttactcattgtattattttgagtaaaccagaaacaggctttcacaagctgccacttaaccactttttcccataattacccaaaaagttaagaaatatagttaaaattagggctgggataagggccagaaaccctgaggtggctgctgggagcctgctatcctctacccgcatgcagatgaggaagggctgtcagcctgctgtggccattgtttcattgactctcaggccaccgtgcttctctgttgagaaccgggtcctaggcattctagtatcagaggcgtgtgaaccagagcaactccatcttaaacaggagctggaaatgaggctgaaacttactgggctgcattcccagatggttaaggcattctaagtcacaggatgagataggtcagcacaaaatgcaggtcataaacaccttgttaataaaacaggttgcagtaaaggagccagcccaaacccaccaaaactaaaattgcaatgagagtgacctctggtcatcctcactgctacactcccaccagtgccatgacagtttacaaataccatggcaacgtcaggaagttaccctacatggtctaaaaaggggaggcgtaaataatccaccccttgtttagcatatcatcaagaaataaccataaaaatgggcaaccagcagccctctgggctgctctgtctatggagcagccattcttttattccttaataaacttgctttccctttgcactgtgcactcgccctgaattctttcttgcgcgagatccaagaaccctctcttgggatctggatcgggacccctttcctgtaacgctagcagctgatgctaggcatgttgatctcgcttggggttccaggacatgtctcctagcactcaaattccaccacaacctagcccacttgcgccagaagtgttgggtctgaatttggctacattttcatgttcattcattctgaatctagaacccccttgtcctgcttttccttatagggtgggcgtttcctatttaaccctgatgaagggcctgattatgccctgttctccaacagtaaggctagctcctaaggtaggtaagggccagtagagagctctatgtttctccctccttcaaaagagagagcagcctttaggagcctcaaagattattttgtatcctaaggagaataaaggttgtgtgtgtgtgtgtgtgtgtgtgtgcatgctcacatgtgcactttcatgggtgttttgcttttatttagttttggcacctcttcattgggcaggcataagaaaatcccacaagattaatccttagtaaaacatcccactccacctcactggactaaatgtcaagccaactgtatagtatgatcctagaatagtagctgctgtcctctgtcccttttggagtcacactgtaatcccttgtctctgatcagggaaggctgtggttctgaatgtctgctgccacaaactgagacttatataaagccaagatgttctgagacagtcctgttgtccaaaatgcaatcctattcttcagaactttagtttgcaaaatacgattgtagttatgggttatagttaaagctcctgacaatacagagggctgaacacatgcgatatggaataatgatcattatcgatgcaagtctgttcttccagctcaggataatcatttcttggcatgtaaatgtgcaggaagaagaaaaagtgttcctggaggaggaataggatatgggagggccaggaagtaagatagagtatggaccattaaaggaacaggaagaattttgtgtgactggtgcttagagaggagagaggaagatgggcaggatccatgctataaggggctttgtgatgcatattaggaacttggactctattataacagcaataggaagccattaggattttaagtaaatgagcaacttcatcagatattcacttcagaaaggtcacaatggctgcagtgtaggcagtggatgagagggtagcatggtgggtggccaggaggccacttaaaaagctttggctggcaacagatggcagtagcttgcaccagagtgagggaaggcatttgtcaatatcaacccatggtactcagactaaaggatttgggggaacagaggaactggatgttagaaggcagccatcactggatgaatggtgattctggaaaggaggtgtaatgctggcaaagttttgttcaacagtgctgtgctagcttgaaggacagccaggactgccactaaacagatgccagtgttcacatcgtcatgaacacaaagaaagagaggacagtagactatctgggaagcatgtgtgcacacgggttgaaaacggtagtatcaaagaaaagcccatagaattttggtgaaaagaccacaacaatataaagacactctgcaaatcagtgcttcaagttggactagttcaatcacttatgacaatggtaacatccaacattgcttgtatggagtgagtcaggtggaatgtggagctataacagtgattatgtgttggaattggttactctgtcagtattacatgccttaagctcttaccccagaaatcccatgcctttattagatttgattttgatacttgcaagttttaggtgttcaataaatgttgtggaattaaattgaaatttagaacaacaaaggaccttacaattcaaatcagacagagcaaatcctttttggtgtgtttatttgaacatgatcttcttgctgtgcaacactcagcagcaaatctcagctctattttccccagcttattgcttcctggtcacctacgaagcaagttcattacttgagagactatgcatctagtgtggagatcaatcaattataactgaaaatatacaatgaattttagtttgtaatatgtgaaaacatacttttgaattttgtggcacatgcttatgtttatggacatgcacatatctatgagttggaaaattctaacttttacttaggctcctttgggcactttagtacaaactaataatgtttagagatagataaggaagaatacaattgtcatgaacatatctttgaatgcttttacttataaaaatattctatagtatacatgtgttgaaatgcatacataaaaccctctatgcactgcaagcaaaatgcttgctagttactgttaataaataagtagatattaatttcctgttttcctaggaatatcccaagcaaaattctttaaaagtgttctctctgcttgagctacattctcttctggagtttagcctgtgctctttgcctcacatagttagtactctacaattagaaatatttctctctgtctccttgtgagtatgtggtttttacttaggaagtagtcattcccttccctccccaacttcccctcacccctggtccatgaaactctaaatttgggagggactttcatggtcacctattccagtccctcagggtttaattatgataaggctcaaataggtcacagctagttagtggctgagaaccagttgtcccaatacctggcctttgacgtctgtttcagttgtagatatcatgttgtcttctcagtgttactttctaaaagactcatctcttgggcattttaaacatgctgctattaaatcaatctattctttgcatgatatgtttgcatgatccagagtgaagcaaatccagagctattcacttaagatcacctgagacctggagtatatctggcttctcgataaattgtatgatctgtgtttaacttggtattttgtccacaggctaaccatgactatatcttttagtttagaagtgctctgaagataaaatatttgatagcatagcttctctactggtttagtgtagtttaaaatgcaaaccatgtatgatttcatgcaatttaagtaaaaactctaatttgtaaaggaagattgcactgcttgtgagggcatgggttggaatactttaaaaatagtacatctaaaatatgcctttatattatttatacttaacagatttacttaaattacttgaagctctcaaagcaatttaagagttggaactagaagaacaggtttccatcacagactagaataaacagaactgctctctattagccattcagtgtttctccccagcagtatatgggttatatagtcctgggttcactgttgtctaaagcagtgttgccaagaactacatttaaatacttcttttggcccatcaaacatggtgctctttcagtgcaatcacagacttccaccccatctccctcagttccaatgaaccaaatagttatttggtatgaaggtctaaaaattgtatggttatgatagttcaggatgacaaattggaacaatcattaaaaaaattacataagcagagttaaagttcatttaagcaaaaaaaaaaaattgttttgttcgtgctatttagattgggtagattccaaaatcactggacagtttttgatattactataatcaactgtggcaaagcctgaatagctttcaagttttgggtttgtttttcttcttttacttatagacaggatatattacaattgaaacatacttattagaatgacatagtaaatgcaatggctgttttaatatgtggttagataatcaacattatgaaaggactctatttggcatgcatatagcccaggatttcttttaaatataaatatcctggagaatttggataaaattctcatctgttgttattgaacagtgagccacattcattcttcccataccatgaacaagcttagagaacgtgatacgggagggaatcatgcttggagctattgtttactctattagttgttttgagtttttaaaattaaatattgagtagatttagaagaatgtttgtaaagtatgtatagagtataaagaacgttatcgttacctctgaaatttcttatgtgtctttccctgatcctatagccttctttttcctttgagaaagctccatactagattttatgtttggcttttctttacagctttatcacatatgcttaatcattttgtgtgtttttaactttatccatatggaattttactacacttcctcccatgacttctttttgttcagtattatattccagtgcttcatccatgttattgcttgtagctgcaatttattgactttcaaagctaaacatattctattacattaatataccataatttctaatatctgtgttactctagatagacatttgggttgtttccactatttattattgacagtgctgctgtgaacacttactgtttgttgctggtttaaaggtatttagttttgattgggtttactaatatctaaaggaatgttcacatctgtgttaatgagtgtatttgcatgtaattttcctatttttcagtgcatttttggatttttgcaccaaggttatttttgcttcataaaatgatgcatcttttcttttcctttgctataatctgaaatagtttgtgtaaaactggaattatttgcatgttttaatatttggcagagcgtgcctgtaaaatcatcttaggtgttctctttgtgagaagatcttaaactactaagttaaattttaaaaatgttacaggattattcagtttttcaatttcttttttttttttgagatggagtcttggctggagtgcagtggtgctatctgggcgcactgcaacctctgcctccctggctcaagaggttctcctgcctcagcctctagagtagctgggattacaagcgcacactaccacacctgggtaattttttttgcatttttagaagagacagagtttcaccatgttggctgggctggtctcgaactcctgacctcaagtgatcctcccactttggcatcccaaagtgctggaattacaggcattagccaccatgcccggccccagtttttccatttcttaactcagttttagtaggttacacttttctagaaagttgtccattctgtttatgtttgaagtttggtggcataatatcctctcactttttaaggatatattcatgatgccctctttattctctgtagtgcctgtagctgtttcctctttcttgtttgcttgtgcctcctctcttgtttccttgatgaattttatcaacttcctcttttctttttttttttttctggagacgaagtttcactcttattacccaagctggaatgcaatggcgcgatcttggctcactgcaacttctgcctcccaggttcaagcgattctcctgcctcagccttctgagtagctgggattacaggcatgcgccaccatgcccggctaattttgtatttttagcagagacaacgtttctccatgttggtcaggctggtctcaaactcctgacctcaggtgatccacccgccttggcctcccaaagtgctgggattataggcatgagccatcgtgcctggccttatcaactccttaaaaaaacacagatttggactggggagattattgtatatttgttttctattatgttaatttctgatgttttaaaaattgtctttcttctattttcttgggctttatttcgctggctttgttttctcatctctccaggtagatgcttagctcattgtgatgattttaaagcacttgcaaattctttaacattctttccttcaaaaaatggagtcaaattttcctccacttgaatgttggccagacatagtgacttcttatgaacagcctgtggcagaagtgatggtatgtgactttcaagaataggtcaccaaaaagaatcatttctgcctgactttctcttggatcacttatttgggagaacctagtcgtcacgtgagaatacatgagcgtccctctggagaggcccatgtagagaagacaaccatgtgagtaaacttcctgggaagtggatgcttctattctgtcaaaccttcaaacgattgcagctttggccaacatgtgactgcagcttcatgagagacctcaagccagaactatccagccaagctatttttgaattcctgacccataaaaactatgagagataataaatatttgttgtttcaagccactaactttaggggtaatttgttttacagcactagaaagctaatatactcattagtcatcggccatttttctgctctaatacaagcatttaaatgctatagatttctctctacattagctgaatctcacaagtttggatatgcaggatcatttggatttaaatattttctgatttctattattattatttttaacttacgagttacttagaattgtgtttcttaatttccaaatatatactctatgtcaattattgatttctagcttaattgcactgtggacagaaaatctgatttgtatgatatcgtcctttaaaatttgctacaccttgctttgtgtccctgcatatggtcaatttttataaaagctcataggcccttgaaaacaatatatattctatagccttatatgtccattagcttaggtgtgttaatagtgtcattcaaatctatatccttacttttgtttttatttatttatttattttctgtagacctcctctgtggattttttgctatgctaaatttttcagttattgagagaagtacattcaaatctgccactgtgatgattgactgattttactatttgcatttctattgttgaattatatgttttgagttatatatgtatatatacacatctacacatgtatatgtgtgtatatataagcacacacatatacatacacatatatatgtaatgttactagatagattcatgcttagaattatatcttcctagtgaattaaatttttatcattatgaaatggcacattttattgctattaatgctatttgccttaaagtttaaaaacatctgacagtctttaaatgatgtgtatcatttaagagatgtttatcacttaaatggtacatatacatcatttaaaggatatatcatcatcgttaaatgagcatttagtttttttacatgtgttataattactcatatttttgtttgtaaatttactatcttactttgtgttttctacatatcccaccttttctgtttcctttcttctactttcttgacttctggattgattattattaaaactttattattagcaataataataaacacaatatattttatattctatttttatttcgtatattctatttttattttgttagtgggtatcctagaaattttaacttgcagaacttatcaaagccaaagattaatcaacatccttaagtttctctcaaaaaatatagataacttagaatgctttagctcctttaacacccctctccacttataggttgttgtggacttaaactttaattacatttttcaatttttaaccaatcaatatattattattgctgttttataaaattgtaatatttactgcatttttaccactgtagaggaggaaaaacttttactatactctcttaggttctgctggaatcggtgaattaagctgataaaagacagattaacaggaggaaagcatacacattttatttaatgtcattatttacatggcaaaaggggtttcacagaaaacaaagagaaaatttccaaagaagcagttagacttgggggcttatataccaatttaacaaaagtaataaattgtggagaagtggctcaacaaaggaaagagatttgagttcctaagagtgcaaaattgtgggaaaatgggaactctgggcaatctagtggaagataagggttattttactaaggtatatttgtgcagattcatcttggcattgactccttaactctggtgataagaatattctcttcttcctggtaccaggagggcacgtttctcatggaaaatttatgccttgcttttaagcaaaaaggacaagggcggggagctcttcttgcatctgttgtttctcaattgcctttggctcaaaataatcaatatgccaatgcagtatattctgagatggcatgttctgatctccttcactgctttctttgctcataattttttcttgcatctcagactgtccatctggaaacattttccttttgcctgaagtacatcttgtagaattttctttaagtttgttcaaaagatgtttctaatctttttctcagtttttgtttatctcattctctcatgagaaaatgtctttatctcattcgtattcttgaaagatactttcactgcatatgaaattttggtgcagcaattattttcctgtcaccacattgaatattttgtttcatgatcttctggcttccattactgaagttgaggaatatgctatcagcctaattcttgttcctttcaaggtaatttgattgctttctttcctatttttttctaaaaacatctttttttgtctttggtattctgcagtttcacaagaatgtgtcttacctacagatttcctatttatttatactgcttgaaatttgttggtcttcctgaatctgtgggttattgtttaagcaactttggaaaattctcagccattatttcctcttttcctctattccctgtctcttttcagaaatctgattacatgtacattagatagtctatcttcctcacctcttaacctttttttttttttaatttgatacagagtttccctcttgttgcccaagctggagtgcaatagcacgatcttggcttactgcaacctccacctcctgggttcaagcgattctcctgtctcagcctcccaagttgctaggattacaggggtataccaccatgcccagctaattttttgtatttttagtagagatggggtttcaccatgttggtcaggctggtctcgaactcctaacctcaagtgatctacctgcctcagcctcccaaaatgctggcattacaggcgtgagccttcatgcccagcctacttgttaacttttaattttatattttctatcttttttctctctttttttttccctgaacagtttctgtgctctgtcattcagttctctacttctctcttcatctgtatttaatccattactaaccttatctacggagtttaaattttaatttttttatttttcatttctattaattattttcgttctttttctaatctggtcatttaaaataatctctttttacttatatttccaatttttaaaaatatttttaaacatgtcaaacaatatattttatattccgtgtttgctaattttaatatccaagatccctgtgggttgtattctgctgttatttgtgctggctcttactcatggtaccttattaacttgcttattttgtgatttttttgatgatgagttcatatttcactgaagccagttgaaggtgagttcctgagaggatttgtgtttcctcttactagatgcttgaggacactaccagatatttggaccatgtagctaatgtgcatttaggccataaagattgtggggacatccttctgattatgatttctcaagagaaatatttatctctttcactcaatgcctaggtttgagacagacaattttccttagaatgggctaagaccgtgtgtatgtgggtggtttctgcaatttaatttggcacattatatgcattggttctttgattctggtattcagcatcctgggaggctagaaaaaggtagcttaaggtcactaggttctatcagtgtcttcaaagtgaaaactagcttcaagacttgccttatgtttttgggttttgtattagtttgctagggctgttgtaacaaaacacctcaaacttagtgacttaaacaccagaagtgtattgtctcaaagttcaaaatccagatgatggcagggttggttccttctgagggcaatgagaaaaggatccattccaggcttctctccttggcttatataagcatcactctgatccatgccttcatcctcccatgacattttccctatgtatgtgtctgtgtccacattttcctcttttttttttttttttttttttttttgagatagagttttgatcttgtaacccaggctggagtgtaatgacatgatctcagctcattgcaccctccacctcccaggttcaagtgattctccagcctcagcctcccaagcagctgggattacaggcacacaccaccatgcttggctaatttttgtatttttagtagagacggggtttcaccatgttggccaggctagtcttgaactcctgacctcaggtgatttgcccaccttggcctcccaaaatactgggattacaggcatgagccactgcacccagctagcacattttcctcttttataaggacaccagtcatattggattgggggcttatcctattccagaatgatctcatctaaactaattacatatgcaatgaccgtatttccaaacaaggacactttctgagatttgggggaatcaagatttcaacgtatgaatttggggggtatacaattcaatctataacaggtcttacgttgttgccagttcattgaggtattcaaaagaacttttggaagtgcaatttatccactatgtcttttcttcagtaagagggttggttacggtatagagtatgctatgctgctgaacaccataggtttttgcatggtgttaacaaaaattgtatgatgttgaaaagttaactgtcactaaggcagttttacaaaggctgcttccatctttggagcaaccattcattttgcagctctgtcgcattatccttgaggttctgaggctgcacatttaccaccttgaccttgcgggaaatgactcaaaagccaccttcttgggctatatatttgccaccttgacagcgggggaaatgactcaaaagctaaacctgacgttcagaactttttcgagttgtagagccattttagggatccatgtttcagtcaactctgttgaatgctcccggcaactatagcacatatcaatcataacaataataaacaaacctcagtcatcaagagtaaattatatcctacgtgttatgtgttagatgatagagaaatgtggaatacattttaggaagctttctatcaaagagagtttaaacctttcccatgtataaaggattagctcttagctctgaagactttgcttaatcagaagatattactcatttaaggttatttaaagataaaaacttttagcatattgtaatctatcaaccactgcttctgaatgacttggtgtggaatcagagttggggggaagagacttttaaaatttcagagtccctggcattattccagacctacgaattagaatctctgaggaaaggagcccagaaacgtacattttaaacagcatcccttcagagttagagaatcgttgttgcctagggtcttccttttaaacataaggtattttgcttcagcaacttaatttttatttttctcaaattgtattactggtaaagattcatgatttttataatatgaatttaatgtttgaagtgatattcaacagcacaataaaaaagtggtgaatggtgggccgagcgcagtggctcacgcccgtaatcctagcacgttgggaggccaaggtgggtgggtcatttgaggtcaggagtttgagactagcctggccaacatggtgaaaacccatctctactaaaaatacaaaaattagccgggcatggtggcgcacaactgtaatcccagctactcaggaggctgaggcaggagaatcgcttgaacatgggaggtggagttgcagtgagccgagatggagccactgcactccggcttgggaaacagagtgaaactctgtctcaaaaaaaaaaaaagtagtgaatgcaaataaaagtagtgaatggtcacaatgtgcttagcaattgtaagataaaattaaactctttataatattttagtgagaggaccacaactagactcttcatgggatttcctttttgaaaataatcctgaatctaatagcaagcacaactgagatacattttctttactgagttttgcatttccagtgtgaccctttcgctttttatactggacgatctaattttacgtaagagctcactctggtaagctgtaccgtgtgtaggtgtacatggatgatctccactagtaagataaaatacctctcttctcttctacttttatccccttcttctgtccgagtgagaggcaatgtaccacctttcccttagacatgaccataaaatcccagaggaaagcaatatgcctaaaattatttagtctgtttcccttgcttgaatatgcactggaattccctggcctggggtgggtcctaagaatttgcatttctgacatgttctcaggtaatgctgatgctgatactactggcctggggaccctacttggaaagccactgtattaactcatttaatcctcacagcagtcctgtgaggtaggcactattattgtcatcatgcccattttatagacgagggttctggggcagctggtaagacagctggtgatcaggacaagattttaaagccaagcaggccgacttcaagcccgtgttctaaactactgtaccatgtgtcttctcagtcagcaggtacttattaaacgcatactgtgtgccctgtgtttgactagctgatatttttaaaaaaaatctaatctcattccttattcaggaacagatgatttgaggatactcacttcctactgaacttgacatggataatttcttgatatctacttgagagggacatgagctgctacatcaattgaaactcaggtgacaattgagatgcagaagttaagtcttttctctgcttttaaacatgaagttgtgccttaacccaaaagggtgttcctgtggtaaactgtgtactctataaatgttctccaaagctagaattttcttggtttatgcaaatgtacagctgagaataattttgtgggatatgttgcaggggtggggttgaaaaattcatggtacttatctattaccagttctttgtgttttaagtacttagcctttatttttttttcctttcagcattttcttttgttaactggattcccatactggctgttgctgagggggttggggaagtcctgatctgacctgaattttttaaaacaattttttagcattttcttttggagaccacaaatcatattgcaagtcaacaacgtctgggtgttagtgggacatttctattttaagaggcttagaaaaggaggtaaaaaagaaggaagttggaagttaggaaggagcaatgaaagcaaagcacccattttcacatcttaccagacaaagcccctccctgccaagttcctttctggtgggagatcagggcatggctcatgcaatcaccagctaagaaaggaactgagacttctcttcatttgttgttttttccttccccacctttccctagaaactattagactgccacactgtcccgttgtgtgacacgggacactttaagtgacggggtagacaaaagctggaacaaaagagcctctattaaggtaagggtctactgtgtccagaacattgtcttagatgctgggggcaaaacaaaccgaaaacacagtcattgcttataaaccaaactcaatttgtaaggctatcccactcagttaacagaggagagtttgaggatgatttcctcctgactttccaggataagtggaataaaagaaatagaaaatagatcaggaacatcattttgcctcattccatctcactttaagtgaactcgggcccaagcccaagtggttctgttccaggaaacacggtgggtcaagcaggatgtaaccttatcacacaccttagccattgtcctttccttcttaaatccctagtgaggaggataatagttgaagatatccttctttttttcttctccaggctttaggatatcagattaggtattttcaagttgagaacaaaaagccttaccacaaagttgtattctccttgtgccaataataatgagtcattcttgctaagaacataggtggtttgtatctttctagtgcttcttgtcagaagaagcttaacatgcacagagggagatatttttcctggcacaatagaccctagtcacaaaccacaaagttttgcaataaggctattcgttaagtgaatgcaatattatagctgagacacttttggggtgtgtgtgtgtgtgtgtttgtgtgtaggggtgtgtgtgtgtgagagagagagagagagagaccgagagagagtgtctgtgtgtgatgggggctatacctcagcttcctgtttggccttgctgatgtcaccgcattagtatcggtactgcacttcagatttttgtacagatgtaagtcatcatatttagtatttgactttaaaatgaattggtttttgcacatctgtgctcataaatgaataacaatagaagggggaagaaattttgaattttgattagatgaaaggggtgcaaaacttccactctttctttcatagataccttgcaagccaaaagctttctagaattgctaggtgaagttctaaatatcactaattttgagataggctgattgacatttatgattgggtttggtcaggatgaagggtagtgaaattaccagcatagatgagtgagttgccattggtctaaattttgccatctctggttttcttctgatttctagttccatatttggtggctttaaatgaacacagtactgttctcttcataccatgtatattttttaccaggtcaggaatctaagaaacttatgatctaatttagatgtctctggaaatgtgaatttcataacttaagagaagggaacagatttgaaattgaaatattattatagggagctgacagttgggttaagtggattgttacacattatcatcttaaaattacatttcgtgtcttcttaactttcctccaaagaacacatcctagaattataacactattttcaattccctctgcatctttcagcccttagaactaaatcctaagccaatagctcacttttggactcctaaatttgattttctgaaggccttaggttaaatgtcatttccaccagaacacctttcttaatctttcaggtaggtgaaagccccacaattttcttctatctgtccattcatctgtccttccttctctcgtacctgtccttacttccatcacagttctaatcacatcatgtcatcattgactatttatttatctgactcctaaaactaggagttcctagaagccaagtctatgcccatctactattacatctcagccattagtactgagtgtaggggtgtagtaagcacatactcatttttttttaactgaataaaggagcatgggaagtaggtcatcatttgaaaaagcatctggaaatgataagaatagttaataaagcattccggattgtttaggagaaaggtctattttacttgttaacagcaaaggcaatttctttggaagattttgctttcttttttgactatctgtgcagttacttgtttatttttcattttccatcagctttacaactttttttctcatgctcctcatcgcctactatcatttgtgtttaagccttcctttacataaaacagtatttttggcttattatttggatgattaatgaaaatcaatcttagcagttagatttctgactgagactgaccagacaaagtgaaatgtgttgcatgatgccattatttaagtcactgttttgttggctgtgacccattaagcatcctttctttttgtttaaaaattattttttttcagcttgttttagatttgggggtacgtgtgcagatttgttacattggtatactgtgtgatgctgaggtttggggtatgaatggtctcgttacccaagtactgagcatagtatacaatagttaggtttttcaactctgtacccttcccccacctctatagtcccgtgtattgttgccatctatatgtccattggtactcaatgtgtggctcccacttataagtgagaacatgaggtatttggttttctgctcctgtgttaatttgcttataatggccttcagcttcctccatgttgctacaaaggacatgattttgttctttttttaatagctgtgtagtatcccattgtgtatatataccacattttctttgcccagcccactgttgatgggcaccaaggctgattccagactgctttccacagtggctgaactaacttacattcctatctaccatgtataagcattcccttttctctgcacctcaccagcatctgttattttttgactttttagtaatagccattctgactggtgtgagatggtatcacattgtgattttgatttgcatttctctgatgattagtgatactgagcattctttttttttttttttttgacctctttagttttatattgtttcagctaaaacctgtgatgaggtcattcttagtgaactacttataactagttagttcttataaatgctgccaatgttttttttttcttttattattattatactttaagttttagggtacatatgcattcttaaaatatgtttgttggccgtttgtatgtcttcttctgagaattgtctattcatgtcttttgcccatttttaatgcgattatttgttttttgcttgttcaattaagttccttaaaggttctgaatattagacctttgttagatgtctagtttgtgaataaaatattattttttaatgcatctattttcattttacgtatttttttttacagtcaccttggtgactgtaacacttaccatcacttttgaagaagtgacttaacaaaagaacccaaacaacatttcttcacctctgcagactcttcctctcacaatgaagtggcttccgttactggaataatgtcagggaagataacagcttcctctaaattcaccctattcaaatgtgtaattcacacttgttcacagactagaataatgtacctataaagtgtttattggctgttatatagctcctagaggaagaaaataaaaatgaaatggtttgtacgttatagtttgtcagaagtatgattgccaattataatgataaaatactaatgatagctcacattgctaatatttattgagcacttaccgtgtgccaagcactgtgtgaaggctgacaacaatccttttagttaaacagcattattgtccgtaggaaaccaagatttagatagctaaaggagattgcctagaggtaggcagttatcaagtggtggactcagaattcaatcctgaatgtttaactccaaagctcaagctcgtaattgttgtgtattaaagagcctgacaactaaaggattatatattcagtttctcctgctacatttgaagagggattttagaaagtaacaatactagcaaccaattattgaatgccaggtaatacactgagtgtttaatgtatgctctttcgatccctatgacaatactaaggaggaacaaattttatctccatttttcagatgacactgaggttcatggaaattaagaagtatatttaaagtcacaaagctatttaaggtcacaatagctaattaagctattaaaccaatgaatacctagatctctgctcttactgcttattgctggtcatactagagtatgtccagtgcttgaatagtaagaggtctggcaaccaggtcatatgactgagaaaactgggttatgtttaacctgacagtggttgaagggaggaaaaaaatcttcaaatatcttttgtcacgtagaggaaggatcagacatattttgttttgctccagaaggtaaaagtgtctcttgtaaatgtaggcaatctagattctgaaattgcaattgcagttgcttgcttctgggaattttatttaattgaaaatagaaattgaatctgtaaaccaaaaatacataaacaaacaaacaaaaaaaactaatttgaactcagttaaagtccccaggtggcatctattacatgcatcttctgaagacaccgttgcatttttattgtattagaagaaacaacatttccagaatatcagaggtgaagcctcaagtcagttctgtgtctgccagaataaaaacaaaaataaacttatctttcttcttgttgtcctaagaataaggtatcagtagttccagaggaagataagaccaactgagagtgtgggaaagagaataaccttagtgttcaaagcttcatagggcagagaacattggacaggtcaactagtaatgcctaccgcatcgtgtggtgatgaggagggagagaatgaactgctacacgtgaggttctcagaactcttttaaggaggacgtaatgttaaactaataaaacctggtgagaaacaacacacaggggtgcctccggaggctggagggtgggaaaaaggagaggatcagaaaacataaataccagatactgggcttaatacctgggtgatgaaataatctgtacaacaaacacctatgacacaagtttacctgtgtaacaacctgcacttttacccctgaacttaaaataaaagttattaaaaaaaaaaagaaaagaaaaactgtgggatagcttggctatacaattatcaatattctgatattttccaattaatgctgctgtttctcatatgaccacaaaagggagatttgtttcttttctgtgtttgagatgggcatatggaattctttaaaaacaaaaaggggaaataccaagaaataaaatcaggcaactgaagatatgccttctgccatggaagctcaaaattttaggatctttcaagttcttcatttgcacctgggacttcagatgcttggtattgctaaaaaatgtgttcattttctatttcaaataaatatggagataattattttaacaaaacaaaacaaaaacctggtaagagggctgagcatggtggcataccactgtagtcccagctgctctcgaagctgaggcaggaggatcgcttgagcccaggaattcaaggctgtactgcacaatgattgcgcctgtgaatagccacagcactccagcctgggcaacatagtgagatctcaccttaaaaaaaaaaaagtatgaaaaacctgttgagaaatggagcatcgactaggaagctgacctgaggaggatcaagagacccagtgttagctagccacttccatcacgggacagtggctgctgttaaccgggcagggggagcattcggagataaacaagggaaggtctgcaggtgccagggaaggtctgcgggcgatttttctaatatgtactttggcatggtctaatgttgactttttgcaaggaaaaggccaggtcaatcttattgttctttcctttctttgaactgtggaataatagtgagtgcccttgaacctgtggagaaaaggatagaaaatttgtttttctttcacataaaaggacattggggcatgccttagtccctagctgacagtactagtcactgtgcaggggaagatggctttctggagcacactaattccacttcagaacacagagcaagattaattatgaagaactgataactccctacctccctacttccctccctccttctctctcttcttccctcccttcttctttccttctttcctccctccctcctttcttctttcctcccttcctccctccccttctccttctctccttttccccttccttccttctttccttccctcactccttccctccctcccttcctccttccttccttccttttccttctccttttctctttccttccttcattctcctttccttccttccttccctccttccttccctccttccttccttctctccttctttcccttcctccctcccttcctcccttcctccctcctcttccccccttcctgtcttctttcctcttgtcccttccttctgccaacaaatacttatcagcaccttttgtatgctgagcccttgctaagtgctgacagtccagtgctatagaaaacagacatgatccctgccttcttagaagttacaaactagtaataataaagaaaaaaatatttaattacaaattgagatacgtgtgtaaaggatgcaccaagaaattataagagggacttgatttagattggttcaaggaaaggaatctgtgaacgtggcaaattagccctgaagaacatatggtctggagcaagagctggcaagtctggctgccacctgtttgtgtgtggaacacagccacaccatttgcctaggtattttgggctgcttctgcaatagaatggcagagttgactagtggcaacagagactgaatggctcacaaagcctacaatgtttactattttgccttttacagaaaaagtttgctgacccctggtctagaaaatacttgaaaataagagctacaatatttcatttgatccatgccttttcaggtagggtgggccgtggactttgtatgactgaaacatgtgtgggcacaaattacttgggtgtgataatgtgtgtctcatcatgaagtagactctaagcagacaagaaactttctccaaaacttgagattgcatatttcaaatgaatttcctgtttgtggaaagaggtattatggtgtggtgtttgtaagcttagtatttggaatttgattttgaaagactattttggattcagatcttggctccaccacttaggatctgtgttactcactctcattactcttcaattttctcatcagtgggacagaggtattgtcagtgcccattcatatagttattgtgaaaattacctgagataatgaaaagacagtacttagtacaatgactgacatacagtaaatacttaatatatatacactgttaggatttttaagatacaaaatattttcataaaataacacatcaatttttgtgatgctactccataaataatattcagtttttgttttttatcctaatagaacaatttttttcacaatgtctgaggataaataaaagcaatgacttctaagtcacaattatacaatttttggaagctaattttataatattttgaatttttttgcatgtttacaaaattaatttttgttttactctggaagtttgaggtagatctgcccccgtctccctggccccccgcccccgccgcagtgctatatttagcatgcttcctcccacctgcctacagctttgcataccctaaaatgcccattaaactccttttcattccttctgtctacagtctgggcctatattagtcctatggctttgattccaaccccactcacaccatagttctctggttcattttcagctagttcatgagtgggtctattcttccagccttttcttactttccctttgtggtctacggtccttgcatggacatgaccacttcccaatgcctccccacagtccttcgttccctgaagttctggctttggttccactttcccatggctctgacttgcaggagtgcttggttgtaggctaactgccttgcacacaccctcatcagctgtccgctttcctgatgcagacctcagctccttgctgagcaatggcatcctcaccatgctgcccatgaaacccccacccagcccttcccttaaaatatctactgggtagccaccagtcactcacagtaatctggtgagcatggcagagcgaaccagcaaggcacagcagataggactgcttatataccataatgatgacttcatagcaccatgaaaataagcactggcctagttacctggtcaagaaaaaaaaaatcagaactcttacaacagaaatcaggtagtgggatatattctgcttctgctttcagatcctttttggtttgtttccattggctacatggttactggggaaatacagatcaaacttgtgttctctgaacccagtgacacggaaagcagaggtatcaaataatgatgccagagctggaaagtaccttagagatcctatgtcccactgccatcattgtggtagataaggacacagggaggttgagcactttacccaggatcacatggaagaaatgtgatattgatcaacgtgggtaggctgaggatgtatttgctggacagatgtattccactgcccagcaaatgattgagccaaataatgaatgaaaggaccaaataattccttgagtcaaatattcttctctttgttttacattattttaaaacctcatatatatatatttatttatttatttaaaaccgcacatatatatacatacacacaattttatataaatgcataaattggatcatatcataaatgttagggtttttctttttttgcttctcttttcattcttttaattcctccatagaggaattagaactcctgtaggaattaaaattcctgtatgtatctttccatatttttctcaatatacctacatatattataggggtttttggtcactgttttttgttttttgtttttttaaggtgaccatgtgatacacttttctctatttttctttttttcactcaacagggtctcatggaaatccctccaagtcaattgatactgttttaactcctttattagcagctatataatattctgtggtttgcaccctacatgattcaaccattctcttcctgatggcctttactctgttcccaggtttaccactatcacccatgattaaatacgtgtccttgtacatatatcctcatgttcttatttctatgaggcagtgcccgtgaagagagattgctgggtaaatgtatttttaacttaatagatgttgccagattaattttctgatagactataaaatttcatatttctacagtgtatgagagtgccctttttccagcagccctgccaatcataggtatttcggctcttgctttgtttttttttgacaagctgatggataagaagtgaatttgctttttattttgagtggcctttcccggattggccatgagtctgagatcttatctcatgtttatcagccatttagatgcactttcatgtgaattgtccgttgatgttctttgccattttcattttcattcatttattcattctttttcttcttcttccttttgttttgtaatattcttgtaagaactctgaacatttagatattaaccctttttatatcttttcattgtcattcattccttccttctttttcttgttctcttgttggtaattttcttataagaactctgaacatttagatattaactcttttttatatctccattaaaaatgtttttctcaaattcattgctcatgtgttattataaactaattatgttattattaacctttaattatgatatattttgccatgcaaaggtgtctatttttatgcagtcaaatatattaatctttatttttatggcttttggattttctgcctgtgtttagaagattccccttaacccaagattatatttctaatttcctcaatttttcttgaaggttttatattgctattttttttttaacatttgagtttccagtctgtgtggaaatcatgtttatatatgatgtatatgagtggtctaacattttccctttaaatggaaaatcagttgcgccagcaccatttattaaataatctaaccttcccactgaattaagctacaatttttgccatatattaaaattatatatatacacacatatacatatgaaaagagaaaagaatacctagataacctcaagacacatatgtatatgtatatctatttgtttattctcatgttaatgcaattttaatttgattgcagatttttgttgcatattctttaataagaacattttccacttacaattcagtcgtataatacttttcttgatcattttaggcatatattctcattgtgaatttacattcattgtagctaattattccctaatgcctgctgggtttctaattacaatcaatttataaattattttagaaaatattattaaatgtttacatgtcatattcaatgggggatccaaaacattcattttgaaggcccactcacactcacgggaatagattaaatgttgtagtgtgcttttcccatctgtactaagctcaaggctgccattaggacacagcaaaggagaagaaggaaggtcactggaagctagagaactcaccaagtgcaggctctgtccttaggcctttgttcatggtgtcttgccttacacaatagcatcttgatcccagttaggaagcccctaagccttgcagactccagaacccatcaccttgcactctatctgttggaaggctttataaccacatagttttatgtctgcacctaatataaattaagaactctttctaggataggcttgaagatttcataggttgggtgtttgaaaaaggaaatgctgtgtgatgaggacactgtgctctgtggctttcctctgtgctttgggtcacgctcttcctttgccttgagaacctgccacctgccacagttcagcccacccatgtctacttagctccctgttccatgaaaacatccatattccaaaccagactcccatggcccattgctttcactagtagcatttatcacactcgctgttgtgttacagatcattatgccttcttttgccaaacacttaccaggcacctgccttgtgattgttcagagtgccggggatccaatggggaacaggtggtggatttattattctttcccactcaaactttatgcccatgaaccaaatcttgttcccttatattcagagaatccctcacagtgactcatacatagaatatgttcaaccagtgttaggggagtgagtgaatatataataatgattaggtgataggaggaataatttggttgaattatgattttctcatttctgcatcaattagttatcaccttttttccagcttaaaatttttccccatgttttgaatgtgtcacctttgttgctttcttcctaaatgtccatggtcaaattttcaaagtttgccagaatgaatttttcattaaataaataaagattttttagaacccttactgtatgttaggtactacaataagcattagggagaaaataccgatcaaaaatagacccatatgaataagattgccattttacaaaatgaaaactgggtcatttttctccagaaggcatgtaggcacaatattttaaaaatctaagcccacaaaatctgacttataaaacaaataatgatgtcaatcaggagcctaaaatagatttgatatttaatacttatatttaaattgagaagtgggtgaacatgattgaacattctagacttgtggattcagcatttataactagaaaaatatgggaataagtcagaagtaatcagtatccccaatctttgatactgaagaataacactttttaaagagcagtattactacgtaacccatttgctttcatttatattgtaacacaataaatgtttatttttagtttagacgtgtacttttgtcttgctcaatgtacttaccaatcggctagaaacatgggtctagatgaatacttatacattaatttaagcttaattagaaactggcaatctacactgatcagatctacattcatttattcaacaaatatttattgagtatatagtgtgtgccaagttctattctaggttctcaggatacagcaatgagcaaaacaaagatgcctgttcttgtgacacttatattctagttcggggccaatggtggaaacagaaaatagaccatgaacacagtaaagaaattatgtagcatgacagaatgtagcaagtgctgtggaaaaatagtagagtggactaaggggatccaggagtgctggggttgaagggggagaggtcaggcaacatataaaataaattgtattagagaagcacagaattagagagaactatgcccagcctagaactgaagagaaatgtggagatagagaatgctatcagagagattaaaaaaaaaataagtatgggattaacaaacaaaacctataaggaatactagcaataattgtatcattcagcttgaaagaaaagctctgggaagacacgatagtgatttttcaatgttattttattcaatgttatgcccagctgctaaggatgctacctgtagaaatgttcttgattgtaacgtaaacccacactatttaataaacattagctttttacagttgttaataattataattggtctggaatattttatatgctgttacaactatttaataactagtaactagttacaactatttaataaataaatattgccttattcgtagggaaatggattggacatttaaagtccattttagttctatgattccatcatgccttccacaatcacaaaatgcaattaggatctatgaatgcccaagagggatttacttacttatcattaacacaccaacataggaaatgtgcacacacacatacacactcattcctgcaaaagctttgacatttctgacacaagaattgaggttttgtttttatttcctcttttttctattttactataagggaattagatcattggaccaattctttcaaatagttccatggattgagttaattacaatacgtgatccaagtctgtacccactattgagattgtctacaatagaaacagggggcatctaaatccatcaagcattttagctgttggttctttttggtggaaagtagaggcagggtgaacaatctgttactataaatatagtggattgttgcaaggctgtatcctgtttggaaatgatctcatctgtctgttgctggttagcagttttctaccaaactgagcaggaatattaccatatggcattgttgttagagagccctcaaagttaaagccacaaggattcctcattgcccatgaggtagggtttatgagtgagatataattgtcaagggtcttgaatttgaactaaccttaatccacatagggacttgttacaagtttattttattccttaattttgtgcattattccgatcctgggattgttctattggataagctgtgctatgtatgtaattgatgaattatagaaaaagtcaagtttctcccttctttattgatataaaacagatccctttgtaatgaggctgtttgaacatgggcaggtgtgcagtggcatgctctctttcattgcctcctcctctgccccaactcaaataaacaacatactcttaaaccacaagcatctagagtgtgctgtccaatatggcagccatagccccatgtggttaataatcacttaaaatgtcctgaatccaaactcaaatgtgctgtaggtataaaaggcacatcagatttcaaagacttagtactaaaaaaagaatgcaaaatatctcattaataatttttatattgatcacatatttcagatatttggggttaaataaaacattatcattaatcttacttgtgtctttttttgatatggctactataaaatttaaaattgcatacatggctttcattatatctcattatatgaaatgtatttcattatatttctcttgaatagcaccagtctagagtcttaatgggaaagcaaagagacttcccatttccctttctcttaccctgggagagggctttaagacaaagtattgattactttctacagcccagagaaagatgtgtgtgtttgtgtgtatgcacatgtgtatatgtgtatttttgtgtgtgcgcacaggtgtgtgtatgtatgtgtgtgtgttgagggtgggagaagattcagtgggaaggataaggagcatggaaagggaagaaaagtgagcattttcaaccagttggtctgagatgccatctactctcactggaagtaaggaacaaagaatagctgagcacaagttagttcttaaaaggcaaatttgctttttgttttaaaaataggatgaatcagtggaacatcagactcatttgaattcaaatgtaaatgcaaattaagcttccttaacatcagtacagaagcaaatatgaagttttaagaattattatcatcactttatccattgttagcaaggatagtcaagaactgacctgtattccattgtatagtcttgatttatacaaagggtatgatttattttgttctgaagcattttatgaaagaaaaatttctggttgagatagaatcacttaatgaccttacagtttatattcaaataaacacccgaaatagtaaggtagcttttctggataactggatgattttgtatatcacaatgcttttggtaaatggtaaattaaggggtttaggaagaacctactttttcaaataaaaagaaagatataagttaatgatgtaatatttcatagttttgctataatcttttcattgaccatgaaatggcaaatttgaatttttttatttgaatattttcactattttattaggttaattaattagatattccatgtggtaagtccaatggaaataaccatgaaatggactgttatttaggggagtagaaggggaaatgaggaggtcaaagagaccctagacaagcgctgtccaacagaaatataatgaaagacacatgccatttaatatcttccagtagccacattgatgcctttctgcagcccagagaaagatgagtgagagagagagacaggcagacggagagaaagagagaatgtttagcgggaagaaaaggagaaggtagccttgaagacggaactttatgtccctaagttgaactactatcatggaaagcaccaaccaaatgtcaatacaactgacggtactttcagttgatcatagaattacattgtttcatagctgagaaagcagacatgatggtcagccttccacttgaaatgagagattaggcccagagaagcaaagtaactcacctcgagtcacacaggagatgaagcagaagtggaaatagtggccagttttgattctcactagacactgtgctatggcctgaggatacagtgataaatatgacagtccttgtccataaggacattctagtgcagtggggcaccagtccatctgggtgtggcacagatgacatcacctatgacacaggcacacttgtgttgtcccctgaccatgcccagttttggtggcaagcaggggatagtaatattactttcaaggacattcgtgacaaacctcaaaagtgttccaggctgtaaggattttccctccattcctgaaaagcagaacatttgaaggaggcagtggagatctcttctgagtaaaccacaccaaacaatatctttcaggagaagaaaaaagaatgtcctcttcaattgacatcacactggagactgcttggtggactgggtcaggagctgggcttgagctctgcccgtcctaagggagagagaggctcgcttccatgtgagtctctgctcaccgaagttctttacaaacaccttggattggaccccgcgtggtgggactgtggcgcgtgctgggctttggaagctgccagcgctcacgggagctctctgagattctaagaggcaaactgcccaggaccattttgactctggaaaggcaaatatcaaccatggtcataagaggattagttaaaaaaaaaaaaaaagtcgttagatcagcctgtatattcctaaggataattaacagtgtaacatttcataaactttgagccacaagtacaaaatcccccataactcaccttttatttcttatgcattcccttttcatcctcatgttttgcattacttaatcaggatatatatgtaatgtataatctggttctttttaaaatttttttttttaattttttttttttttattatactctaagttttagggtacatgtgcacattgtgcaggttagttacatatgtatacatgtgccatgctggtgcgctgcacccactaacgtgtcatctagcattaggtatatctccaatgctatccctcccccctcccccgaccccaccacagtccccaagtgtgatattccccttcctgtgtccatgtgatctcattgttcaattcccacctatgagtgagaatatgcggtgtttggttttttgttcttgcgatagtttactgagaatgatggtttccaatttcatccatgtccctacaaaggacatgaactcatcattttttatggctgcatagtattccatggtgtatatgtgccacattttcttaatccagtctatcattgttggacatttgggttggttccaagtctttgctattgtgaatagtgccgcaataaacatacgtgtgcatgtgtctttatagcagcatgatttatagtcatttgggtatatacccagtaatgggatggctgggtcaaattgtatttctagttctagatccctgaggaatcgccacactgacttccacaatggttgaactagtttacagtcccaccaacagtgtaaaagtgttcctatttctccacatcctctccagcacctgttgtttcctgactttttaatgattgccattctaactggtgtgagatgatatctcatagtggttttgatttgcatttctctgatggccagtgatgatgagcatttcttcatgtgttttttggctgcataaatgtcttcttttgagaagtgtctgttcatgtccttcgcccactttttgatggggttgtttgtttttttcttgtaaatttgtttgagttcattgtagattctggatattagccctttgtcagatgactaggttgtgaaaattttctcccatgttgtaggttgcctgttcactctgatggtagtttcttttgctgtgcagaagctctttagtttaattagatcccatttgtcaattttggcttttgttgccattgcttttggtgttttggacatgaagtccttgcccatgcctatgtcctgaatggtaatgcctaggttttcttctagggtttttatggttttaggtctaacgtttaaatctttaatccatcttgaattgatttttgtataaggtgtaaggaagggatccagtttcagctttctacatatggctagccagttttcccagcaccatttattaaatagggaatcctttccccattgcttgtttttctcaggtttgtcaaagatcagatagttgtagacatgcggcattatttctgagggctctgttctgttccattgatctatatctctgttttggtaccagtaccatgctgttttggttactgtagccttgtagtatagtttgaagtcaggtagtgtgatgcctccagctttgttcttttggcttaggattgacttggcgatgcgggctcttttttggttccatatgaactttaaagtagttttttccaattctgtgaagaaagtcattggtagcttgatggggatggcattgaatctgtaaattaccttgggcaatatggccattttcacgatattgattcttcctacccatgagcatggaatgttcttccatttgtttgtgtcctcttttatttccttgagcagtggtttgtagttctccttgaagaggtccttcacatcccttgtaagttggattcctaggtattttattctctttgaagcaattgtgaatgggagttcactcatgatttggctctctgtttgtctgttgttggtgtataagaatgcttgtgatttttgtacattgattttgtatcctgagactttgctgaagttgcttatcagcttaaggagattttgggctgagacgatggggttttctagataaacaatcatgtcgtctgcaaacagggacaatttgacttcctcttttcctaattgaataccctttatttccttctcctgcctgattgccctggccagaacttccaacactatgttgaataggagtggtgagagagggcatccctgtcttgtgccagttttcaaagggaatgcttccagtttttgcccattcagtatgatattggctgtgggtttgtcatagatagctcttattattttgaaatacgtcccattaatacctaatttattgagagtttttagcatgaagggttgttgaattttgtcaaaggctttttctgcatctattgagataatcatgtggtttttgtctttggctctgtttatatgctggattacatttattgatttgtgtatattgaaccagcctttcatcccagggatgaagcccacttgatcatggtggataagctttttgatgtgctgctggattcggtttgccagtattttattgaggatttttgcatcaatgttcatcaaggatattggtctaaaattctcttttttggttgtgtctctgcccggctttggtatcaggatgatgctggcctcataaaatgagttagggaggattccctctttttctattgattggaatagtttcagaaggaatggtaccagttcctccttgtacctctggtagaattcggctgtgaatccatctggtcctggactctttttggttggtaaactattgattattgccacaatttcagagcctgttattggtctattcagagattcaacttcttcctggtttagtcttgggagagtgtatgtgtcgaggaatgtatccatttcttctagattttctagtttatttgcgtagaggtgtttgtagtattctctgatggtagtttgtatttctgtgggatcggtggtgatatcccctttatcattttttattgtgtctatttgattcttctctctttttttctttattagtcttgctagcggtctatcaattttgttgatcctttcaaaaaaccagctcctggattcattgattttttgaagggttttttgtgtctctatttccttcagttctgctctgattttagttatttcttgccttctgctagcttttgaatgtgtttgctcttgcttttctagttcttttaattgtgatgttagggtgtcaattttggatctttcctactttctcttgtaggcatttagtgctataaatttccctctacacactgctttgaatgcgtcccagagattctggtatgtggtgtctttgttctcgttggtttcaaagaacatctttatttttgccttcatttcgttatgtacccagtagtcattcaggagcaggttgttcagtttccatgtagttgagcggctttgagtgagattcttaatcctgagttctagtttgattgcactgtggtctgagagatagtttgttataatttctgttcttttacatttgctgaggagagctttacttccaactatgtggtcaattttggaataggtgtggtgtggtgctgaaaaaaatgtatattctgttgatttggggtggagagttctgtagatgtctattaggtccacttggtgcagagctgagttcaattcctgggtatccttgttgactttctgtctcgttgatctgtctaatgttgacagtggggtgttaaagtctcccattattaatgtgtgggagtctaagtctctttgtaggtcactcaggacttgctttatgaatctgggtgctcctgtattgggtgcataaatatttaggatagttagctcctcttgttgaattgatccctttaccattatgtaatggccttctttgtctcttttgatctttgttggtttaaagtctgttttatcagagactaggattgcaacccctgcctttttttgttttccatttgcttggtagatcttcctccatccttttattttgagcctatgtgtgtctctgcacgtgagatgggtttcctgaatacagcacactgatgggtcttgactctttatccaacttgccagtctgtgtcttttaattgcagaatttagtccatttatatttaaagttaatattgttatgtgtgaatttgaccctgtcattatgatgttagctggtgattttgctcattagttgatgcagtttcttcctagtctcgatggtctttacattttggcatgattttgcagcggctggtaccggttgttcctttccatgtttagcgcttccttcaggagctcttttagggcaggcctggtggtgacaaaatctctcagcatttgcttgtctgtaaagtattttatttctccttcacttatgaagcttagtttggctggatatgaaattctgggttgaaaattcttttctttaagaatgttgaatattggcccccactctcttctggcttgtagggtttctgccgagagatccgctgttaagtctgatgggctttcctttgagggtaacctgacctttctctctggctgcccttaacattttttccttcatttcaactttggtgaatctgacaattatgtgtcttggagttgctcttctcgaggagtgtctttgtggcattctctgtatttcctgaatctgaacgttggcctgccttgctagattggggaagttctcctggataatatcctgcagaatgttttccaacttggttccattctccacatcactttcaggtacactaatcagacgtagatttggtcttttcacatagtcccatatttcttggaggctttgctcatttctttttattcttttttctctaaacttcccttctcgcctcatttcattcatttcatcttccattgctgataccctttcttccagttgatcgcatcagctcctgaggcttctgcattcttcacgtagttctcgagccttggttttcagctccatcagctcctttaagcacttctctgtattggttattctagttatacattcttctaaatttttttcaaagttttcaacttctttgcctttggtttgaatgtcctcccgtagctcagagtaatttgatcgtctgaagccttcttctctcagctcgtcaaaatcattctccatccagctttgttctgttgctggtgaggaactgcgttcctttggaggaggagaggcgctctgcgttttagagtttccagtttttctgttctgttttttccccatctttgtggttttatctacttttggtctttgatgatggtgatgtacagatgggttttcggtgtagatgtcctttctggttgttagttttccttctaacagacaggaccctcagctgcaggtctgttggaataccctgccgtgtgaggtgtcagtgtgcccctgctggggggtgcctcccagttaggctgctcgggggtcaggggtcagggacccacttgaggaggcagtctgcccgttctcagatctccagctgcgtgctgggagaaccgctgctctcttcaaagctgtcagacagggacacttaagtctgcagaggttactgctgtctttttgtttgtctgtgccctgcccccagaggtggagcctacagaggcaggcaggcctccttgagctgtggtgggctccacccagttcgagcttcctggctgctttgtttacctaagcaagcctgggcaatggcgggtgcccctcccccagcctcgctgccgccttgcagtttgatctcagactgctgtgctagcaatcagcgagattccgtgggcgtaggaccctctgagccaggtgtgggatatagtctcgtggtgcgccgtttcttaagctggtctgaaaagcgcaatattcgggtgggagtgacccgattttccaggtgcgtccgtcacccctttctttgactcggaaagggaactccctgaccccttgcgcttcccaggtgaggcaatgcctcgccctgcttcggctcgcgcacggtgcgcacacacactggcctgcgcccactgtctggcactccctagtgagatgaacccggtacctcagatggaaatgcagaaatcacccgtcttctgcgtcgcttacgctgggatctgtagaccggagctgttcctattcggccatcttggctccacattccctttttaaaatttttgtagagacgggggtctcactatgttgcccaagctagtcttgaactcctggcctcaagcaatcctccttggcctcccaaagtattaaaattacaggcatgaaccatcatacttggcctataatctgctttttgcagttaaagttatccccaaactactttttcataatgtcatcataattgttattttaatttgtggaaaagaaaaaaatattattttagtgactgcataatattccattcagtaatcccatcttattttgtttaagcttgttgttagccaagttattaaacaagatgctccttgaactttactgaaaataattgtaaatgcttagcgttttcacaatgaaatcacctatttaccctaagtgtaaagctctgttaaatggatcccttagtgagacaactcatgctgatgatgcacaggatcccaggcctttggccaccccaatgggaaaatgctttcctagtgtcttttagcttaaagcaattattcaaaattggtacacattgtgggctcagataacccagaaattaaagagaactctgttggcggtactggttcttcttgtaataggtcaggaatgtagacattatctttattggtacatgactactgaagttctactttttttaaaacaattatctggtctctaagaggactaaattgtatactgcccctccaaatctaaggagagggccatgaaattagccagtgttctcacctttctgatcagggcagggtgatgggtttgcaggagtatgtggctgccatccctccttcttaggaagaaaatggatcatgggtcagtttaatttcttaggtctttggaaaaaggttacgaataatgaagctgggatgtattgtcctagacaagggtaaactgcagtagttaaaagttttaagtaaggttagctcctttttggagctgaatctgcatgggactagaaatctatattgtgcctattatttttattcttattttccgacctgataaaatgagttatttattcatatgaccttgggcaatgacataaacttcttcgatttcagttttttccattttctaccagaaatgattacatctggcttacctgtctcatgagattgcagtgagaatcaaatgaaatgttgtaaattgtaaaagcctctgacaagttcaaggtagatgctattattaatcattggtaatgatgatgagtagaatattcccagatagcatcatcagacagtgctacactctgtaggtgtgttaggctaggacatgatgagtgatgccaattaatgccagtgatttgttctctcatgtaaagctagccaagttattttactgtctgcctttacttgtagaaagtgtgctctcacagatgttggtaagactaaggtgttctgatttcacaagatgcaggtaatccatagaatcagtcaggaagaatgtccctagtatttttatgtgctacagtgataaattataccaagacccgtttgtcaacagcatttccagaaataagagaaagtgtcatcaaaaatgaaggacaagtcgtgactaaagaagcatcttccctatttgtttgaacagtcaagcttgctttaaatcgtatccaagttgtgtagtaaacttgcctgcagagagtaagccacacagatgcccacaacgtcactgagaggcacgtgacccagtttctgtggtctgagctgaaagataacccgggtgtgtgatggccacacctgcctgtaaaacattatatggtgggcactttttcaaattcacatttttaaagagggaattagatggttttcatttgttttgcttaggttttgtggtgtaatttttttctccagaggtcatctcagcagcatctccataaataattatcaagggattgggagatagttttgcactcactgtcttagaatacaaatcttcccatacaaagccatatagatttgtccagggaagataggaaataattgattgtgtcattgttctcttggcctgactttgctccggtggctatggcacacggggtgatagattaactctttcaggtgtatggaaagcatgttcaatgaatcacaacttcagcacacagagtattttgatggtatttggaaagaagcaaatattctctctttttttttgcgggggggaaagtgtctgatgacaccatccatactttttagaaaagactggagtgtgggtcattttcatatctgtaaggctttgaaaaaaaacttatggtaaagaaacagatcattcatgctagggaaagaaagctatcacagacaagctataatccacatatccactgagtgccagaaaagagaaaatgagatcaatcagggttacatctggggatttacatccagacaatgatgactgcttccgaagggaggaggaaggggttccaccatgggtagagttctagttgtttggaatggcgtcctcatgaacccacctgaagtgttgattccttatccacatattttttgataaagcttcattgtggtactatttttaaccatcactttgactaaatgcgagggttcatttgtgttaagtgggtgagcagttgacagagtagaccttttgtaacctgctaaggagggaacaaggtcatcaagacgctaagcattcaagaaccatggtcttctactatcacctttgcttttgtgtcattttttttttctcaaacgtgatgtgtaaatcaactgcaacagaattacctgaagagcttgtttaaatacagattcctggatccaattccaggtctgttgaatcagaatatctatggcaaaaccaagaatggattttttttttttttttttgagacagagtttcacttttgtcgcccaggctgcaatggcacgatcgtgcaaaggcacaatctcggctcactgcaacctccgcctcccgggttcaagtgattctcctgcctcagcttctagagtagctaggattacaggcgcccgccaccacgcccggctaatttttcatttttagtagagacggggcttcaccatgttggccaggctggtctcaaactcctgaccccaggtaatccgcctgcctcggcctcccaaagtactgggattacaggcgtgagccaccatgcccggccttaccacaagtgattctgatttgagaaccactctcctaatgctgggtagaggagtggttctcaaagtgtgttcctggacctgtagcatcagcatcacctcgggagcttcttagaaatgcaaattcttgggccctgccccagacctattgaatcagaaactctgggagtgggggccagctatctgttttagcaagcctgctaggtgatgttgatgctcaccaaaatctgagaagcactggggtagagtacatcagttcccttcagtatctctttacaacagtagggaaggcaatcgttaagacaatgtgaatcatttgcaacctgggtttgtttgtaaccatgaaatttcaaatttagaagaactttataggagatttaaaccagcaccccttctagtgctggttttctttcttctcctcccacgttccctcctttctttccttctttgaacacttaataagtactatgtactagggagtagggatgcaggggtgaatatgaatggcagcaccctatccttttggagtttacagtcttggggaaagacatatctcacatgattacactaataactgtaacattataactgctgtaagtacagtggtgggaggcacatgatgccatgagactatataatagagatttgagcaaatctgtacacctgttacaaggtaactcagcccagatggagtacttcctttctaggggaaattttgacatcctgttggagcctatttgactttaagataagcccatatgttagaaatttgctccttatattgagtcaaaatctgccacactctaaatgacacaaccctggttctagtatctgaatctccatgaaacgaatccagccctctgttccattgaagatcttcgtatagataaagatctctttcttctaggtttttcctttccaaggctgtgagattcctcattcacttggtcttcttcagaagtactccacttttttctttattttaaaaaatgtttgtaaaatattctggtatccagcatgagctagagccatggaatgatgagctcagaggagcatacctcagaatacatctgtgaccattcttgttcctgttatatttcgcatttatgaggctcaaccttacatgctttgtggacaattgtatcacacccctgactgacttgcactgagcttgcaactaaatgaaaccccagggtttggggttttttttcttcaaacttcgtacctttattcattcaatttattcaccaattttttattcatgcctactatgtatcaggcacatattgtttacttatatggatgtgtttttggacttaagtgcaagattcatttatccgtattgtaccccattttggatcctggttctgtcatccactaaactgtgaggaacttgaagttaaaagccatatttttttcagctttgtatcctcagagcctaactcagtgtctcatatgtagttggtaaagaaaatttaataactataatacacatacacacacacacacacacacactcacactcttttctaagtaattgaacatgttttaaggcaatgccctggagatttccctccaggatgtcaataacctcagccctttacccagcacccatgatttgggtggttttaactatttgattgtgtctatttgcatcatcagccagtctaagtttctttactgtgccaatcaaaatcatgcaagatgttatagttgcctaggtacaggatgtctccgacagccttctaatctaccaatctagtatgtctatctgaaggaaatgaggttagtctgtcttcacttgttctagtagtcaccacttccttttcgctgttgacaaatagtcttttaatatttattgacaagtcaagaattcaagagatggactgcctttagctggacaaggtaggcagtatttttctctgcagccaaaaatttatctcagaacaatgtctttactagaaacaccattcttccatttgtttgagaagtgttttatattctcagggtgagttcttatatttttatactttcaactagaccaacaccactgtaactcatccttgggtccctggatctccatggggtatacatgtattcttgacatattcctcctctccttctgatagggctgtgtccactaatacagatatgatttggtcagtagattaatattttggtattatagtttataaaatataattgagggagctctgataatttactgatttcttctaagtaatggggctggttctcgtaagaattatcatttatgatatggtgataagcatttgcttaggttggtcatgtataaatgtgttttaaaataaaaattaaaacttttattaccatttcattagaatgagcaccattcattgttaattccagggaagttttgttttgctttatttttagtaatgccatatcacaccctatgtggccctcagtctgttcaattgtaaaatgaaagatttggactaagtgatctctaatctatgatcaaactctagaattatattattctaaactttgagaagaaaagtctcttttaaaataaccttaaaattaaatggaacaggccaggctcggtggctcacacctataatcccagcgctttaggaggccaaggcgggtggatcacatgaggtcaggagttcgagaccagcctggccaatatggcaaaaccccgtctatactaaaaaatacaaaaattagctgggcgtggtggtgggcacctgtaatcccagctactcaggagactgaggcaggataatcgcttgaacccgggaggtggaggttgcagtgaaccaagatcgtgccattgcactccagcctgggcaacaagagtgaaactacgtctcaaaaaaaaaaaattaaatggaacaacacacacacacacgcgcgcgtgcacacacacacacacacacaggaatgcatgtaaaactggtgaaatctgaataaaaatgttggactgcagcaatgtcaatttcatggttgtggtatatcgtactatagggttgcaagatgctcccttttgggaaacccgagtgaagggtgtatatagggtatctctatattatttcttataacagcatgtgagaaataagaactaataatttgagataatctcaaatttgagatcttatttgagataatctaaaattatctcaaaataaaaagtttttaaaaattacatgataaactgttataacaggactttagaggtaagtggccattgcttgaccacatgctagcttaaagaaactatttagccttcccaaaactccattttcttgtcttctgtaaagtggggatattaattcctgcctgatgggattgttggaaggattatagagactgtgtgtgtgtaagcatctctcatggtccatactccatggtagggactcagtaagtgttgattaccttcccctgttccccttctttgttctagaaagaaactggggcacacagcctcactgcatctcccataggaaagatgacatctgacctgaagcaaaagacagtttagaagtgtaactcagtgagatgagccccgtagcagcatagtgagtaatgctgttacataactttcacaaatcacccggcagatcagctaacagggcttggcacagtttactgatgaaataaaataacaaggcagcttccaaacccagcctgagtcagggagtcccaacaccacagccagaggcagaatctagaatgactccacaggccttggagctttggtgtttcagttgattcagatgtgttataaatctgtataagtggaaaaaaataaaagcagctcctctctggctggccccatgaataactgtccccaagaggcctagagaagttttcctttccttgcagaatccttaatcatgtctaccaaatatgagttttccatgcagctgcatgaatgaggaagtagagagagactaaagagaatagtgcattcctacacagttcttggtcgtgaggatgtgattgttgaatgaatggccaaaatgtgtctcccctctatctccccaaatgcttatcgtttctcagggctctttcctcactcctgatctggtgaatgtttttgtatcgttgagttggccagaaacatagaaggcaaacttaccaggttttcagatgatactgtggtataagagactcaggggacagaatcacagtttttaaatgatttcagcaggttcggggctctgggccgagcacagtaagttgtaatgtaatagagataatgttaaaaatctgtccttcgaagtcaaaagcagaaatacaggctaggagaggcttatattggcaagagttttatatgaaaaaggtataaggatttataactctagaaagacaggagtcaacagtgtgacgtggttgtattaaaaaagaggttagagatcagaaaaagaaagtatcctttgacttggtataatttgcaccagtcggacaatacctagtctattgtattcagttgtagaggtcaagtttaaggaagatatagataaatttgaatggatcactgagggaaagaaggaaaagggaaggtcaaattaaaaagattcaaaagatacgctgtttaaagaacagttgaagagaaataaggatattcagctgattactgtttttttctcgggttaccatatggaagaagagtaaacttgtctattttgttctgaaagggagaaatgagattaatgggagagagagtccatggaaacagactttggctcaatagaaggaaaatttggagcagttcagtgatggaaagaactattttcattaaattgtgagcttcctgtcactggaaataatcaagccggggccaaaccagtgtctgtctgggattctgaaggatcccaacattgaatgagagcttggggtaggtgacctttaagatcacttccaactctcatagtctattatttaagttagcatgaatgccagggccacttacaacatgccagagccactttttcaacttttggctctgctactgaccagctgtgtgaccttcagctaggaaattaaccatttcttgttccagtttcctcatccattaaatgagagagctgaatgtagtgatgtctaagttactccccagcactctgtctccctaggccttctcataattatagcacgctggaagagtagagtttgggctgatagctgccatttgtttctaagttggcttgccaggagactgcttaaaagccaaaaaccattttgattctgagggccacagaacgaaactctcaatttgcttattggcaggagagtaggtgattgtgaacctggaatttgttcccatgagatctgtggcaggaagttcataaaataactgctaatctggtttctcttgaacacctgtacattctgactgagctcagcaatgccttctcaaacaacttagaataaatgaagcttttatattaccattgcagcacagtgttatcttttacaaagcaaacctttgtcgtttatttgcttaatgatctgtcagttgctattgacctgtgcttataatcttaagaacaaatgtatataaagcaacttacaatgtagcagatttgttctaaaagttttacatatattaatttaacagtttattagctgaaaatacaatgatgaatcagtagattagatcttttttcctttatggaaaggaagtatttaaaatctagtttaagtctgcctgaatggtagagtccagaattcagatccaggccctcattctctgaggcttcgttgttggatgactataatttctcttgtggctcatttgattattaatacttttcttctcttctgtattaagatgcttcacttccaccactattacattggagctctccttctggttccttctttgacttctgtctgacatccacatctccaaatcccatttcttcagttactttttccaaagatctttgaaacacagccatcagtgggagtgtcattgtttgctttgatatagatacagaaggtaatggacaagatttcaagtgtctcctgcagttactgaggtcagtagaggaggaaatatgtaaatttatgcttcttataaggatgtgaagaatttaaaacttcattccctggcttgcagatctggccatactcactgcatccagacacagtaccatattttcttccatctctttgttttcttaggttgaaaatgaaaacagctgttaaaaataagagcacatgagtcaatcttgaatcccaatgtaataattacagtttccatctcagttggtaaagtccctcccagtgtactaagccccatatcacaatccccttgtggagagaacgctgccaatggtattgtcaattttatagcaagactttaatttttgtttttcaaacctctaagattaaacattaaatcacttgccaagccaagaaaaataatgaggaaaaaatacttcgatttaaaaacttgattcttcatatctcaaaataataagagctatttatgacaaacccacagccaatatcatactgaatgggcaaaaactggaagcattccctttgaaaacgggcacaagacagggatgccctctctcaccactcccattcaacatagtgttggaagttctgcccagggcagtcaggcaaaagaaagaaataaaaggtattcaattaggaaaagaggaagtcaaattgtccctgtttgcagatgacatgattgtatatttagaaaaccccattgtctcagccccaaatctccttaagctgataagcaacttcagcaaagtctcaggatacaaaatcaatgtgcaaaaatcacaagcattcctatacaccaataacagacaaacagagagccaaatcgtgagtgaactcccattcacaattgctacaaagagaataaaatgcctaggaatccaacttacaagggatgtgaaggacctctttaaggagaactacaaaccactgctcagtgaaataaaagaggacacaaacaaatggaagaacattccatgctcacagatagaaagaaagaatatcatgaaaatggcctactgcccaaggtaatttatagattcaatgccatctccatcaagctaccaataactttcttcacagaattggaaaaaaactactttaaagttcatatggaaccaaaaacgagcccacattgccaagacaatcctaagcaaaaagaacaaagctggaggcgtcacgctacctgacttcaaactatactacaagggtacagtaatcaaaacagcatggtactggtaccaaaacagagatacagctcaatggaacagaacagaggcctcagaactaacaccacacatctacaaccatctgatctttgacaaacctgacaaaaacaagaaatggggaaaagattccctatttaataaatggtgctgggaaaactggctagccatatgtagaaagctgaaactggatcccctccttacaccttatagaaaaattaattcaagatggattaaagacttaaatgtttgacctaaaaccataaaaaccctggaagaaaacctaggcaatactattcaggacaaagacttcatgactgaaacaccaaaagcaatggcaacaaaagccaaaatagacaaatgggacctaattaaactaaagagcttctgcacaggaaaagaaactaccatcagagtgaacaggcaacctacagaatgggagaaaatttttgcaatctacccatctggcaaagggctaatatccagaatctacaaagaacttaaataaatttacaagaaaaaaaacaaccccatcaaaaagtgggcaaaggacatgaacagacacttctcaagagaagacatttatgcagccaacagacacatgaaaaaatgctcatcatcactggtcatcagagaaacacaaatcacaaccacagtgagataccacctcataccagttagaatggcgatcactaaaaagtcaggaaataacagatgctggagaggatgtggagaaatagggatgcttttacactgttggtgggagtgtaaactagttcaaccattatggaagactgtggtgattcctcaaggatctagaactaggaataccatttgacccagccatcccattactgggtatatacccaaaggattataaatcatgttactgtaaagacacatgcacacatatgtttattgtggcactattcacaatagcaaagacttggaacccacccaaatgtccaccaatgatagactggattaagaaaatgtggcacatatacaccatggaatactatgcagccataaaaaaggatgagttcatgtcctttgcagggacatggatgaagctggaaactgtcattctgagcaaactatcacaaggacagaaaaccaaacactgcatgttctcactcataggtgggaattgaacaatgagaacacttgcacacagggtggggaacatcacacactggggcctgttgtggggtggggggcagggggagggataacattaggagaaatacctaatgtaaataatgagttaatgggtgcagcaaacctgcatggcacatgtatacctatgtaacaaacctgcacattgtgcacatgtaccctagaacttaaagtataatcgaaaaaaaaaaaaagaaaaaattttcaaaaaaccttgattcttgaaacatgctcttttttcaaaatttaatttagattttgaccaaatctctatgttactattggaaatgtcagttactgttccatattcgtttcttttctttttatttatttatctatttatttttttgagacagggtctcactctattgccctggatagggtgcaattgtgcagttatagctcactgcagcctcaaactcctgggttcaagtgatcctcctgcctcagcctcctgaggggctgggactatgggcatgtgccaccgtgctcagctaattttttttgtagacatgtggtctcactatgttgcccaggctcgtcttgaactcctatcatcaagtgatcctccatccttggcctcccaaagtgttggaattacaggtgcgagccaccaccatgcctggccactgttccacattttttaaaatgcagcttcgaatggacttcgtggtatcctcactgtgaatagttttgcttgaactcttgtagaggctaagccttgaattcttttctcttttctcagttcctgaggtttatgatctagtaagccaatctcaaaagagtcatctaccacctattaattgattgttacctttgagagcagattgatccttttttagttctgcttagttccccatatcaactatttagtctcttactgaataatcccactgtctaaagctgtgatggttcctcctcaccccccaaatcagctgcctccaaatcaccaatgtaatgttgccctataaatgtgctattggcaggagagctttgtgccttataggaggagagtcagggaacttggccttttcactcacttcactttgcccttttatttcccctttctaaggcttgattatttattatttgattagattatttctgaagttcatttcctcatgaagatttctataattttgtaatcattgtgtcccccaagagccaattttatgtgctggaaatgaagacactgcatgcctagcatgacttatggaactctgagaaggccgttcagcccagctccctctatacaccttaagttccaccattagatattcattccttgtggtaggatagtacctctcagatatgacaccatttaaaatccagtatgtttagaagggcaaacccgtaaaactagtatgtaagacaatatagcatcatggttagaggcaagctctgaggtcagactacatttcacacctgggctgtgccactcactagctatatgatctaggcaattaattcatctttctgtgcctcagtctcctcatctgtaaaatgaggataattatactctcctcgagggtttttgtgaggtctcaatgaaatctgtaaagtgcttagatgaacattatcctgctttgtaagtgttagcaattattatcttcatttgcataaattggcatgttgtgttgatgcatattgtattgaaagctgataccgagtcacagagaaattgttttgttgggaaactggaaggagatactttgaacacaagaggcactgttaagggacggcctttctgagtaaggtgtcacagctggtagcgtaaaggcgctgggtgcctgtgggtggataggggagcatgtataagagagggtaaaggagacgggcctccttctagtcctaaccactatgctcagtaactgatagaattcatcagctaggacgatgaacaagtagtgtgatgtacacctgcaaattaactttgaattcagtacttgcttaactttctctgtgtcttataatcccatgccttgtcattttcagataatgctaggtctctgagccattacacttgaagagctatggggaaatctagagtgttttatcttgctgaatgccctttcttcttttctttagattacatgaagcagatgacatttgaagcccaagcctttttagaagctgtgcaattcttccgacaggagaagggtcactatggttcctgggaaatgatcactggggatgaaatccaggtaatatggggttcaaaattttggattctctctgtgtttgggtatttgggtgatacgaagtcagggtcattttattaaacaatcaaacagaaaagttgcaagtatggaagatgtggttccaaagaccatctctctcatgtctgcaagcattggtcaggaaactactgggcacctactacaaagaccaccagactgggcatgaaatagggcagccaaaaacatgacaactacagtggaaagagctgcctccactgttttctatgaaaagaattactctttcaaatgacctcgtgcttccagactagaatcaagtgtgagtaccgaggaatagtgcgaagtgcatgacagggctttagctagggtccgcaaacttggacttcagtcatgccaacttatttaacctcttttagtcttagattactcctctggaaaaaataagaataataatgtttaccttgcatcatcgtgacaagtgaagtgcagttggggaagtatttggtacgcagctgtctttattgaattatatgtaaatgaagtaatgaaaaaaacaaattcaaaaagcattagacagttttctatatatttaatttatcttttctagttttctgtgccctgtggtacattataattcctcatgatcctgactagatgccaatcatggcctaagcacttcagtgggcttggtcccagggacagtattataaatctaaggaaactgctttgtgatgtgaccccagcctccatgatgacaccagtcacatggctgcttcacccaagaagaggaggctgggtacgggcatatttacataaagtaacacggtatttaagaatgctatttttttttttttgagaggagtctcgctctgtggcccaggctggagtacagtggcgcaatctcagctcactgcaacctccgcctccttagttcaagcgattcttctgcctcagcctcccgagtagctgggactacagatgcatgccaccactcctgctaacttttgtatttttagtagagatggggtttcaccatgttggccaggctagtctcaaactcctgacctcgtgattccccctgcctcgggctcccaaagtgctgggattataggcatgagccaccacgcctggccccactattttttttttccacatctcctagggtacctcttttgggagctagtgaaattcattattagagaacaatatttggaggatgctgaatggtgccttgcctctgtgtggtcattaaacagctaatgctgaaaactcatgagggagctcttctttattgtttcaccatatgaaaacatgtgtttaccatcagaatcttctctttctctctctctctttttttttctgtctggtagattctaaactcatctatttcccaacctgagacttgcttctttcagaattttaaacaagtcttggtttctgatattttggggaagcacagccattcataagtgtgagagaactaaatagttatgtacttatgccattaagaaaaacaaaagtgtcagaaggggaggctgaagcacttgacactggctggcctgccatgtaagccaacatagttaatagatagatgagtagtcaaatgcttttgtgtgatacttgacaatgttcgaaacctaatggtgtttgtcttgccaatcttatgagatgggtaaggcagttattgttatttcaattttgtaaatgagaaaactgagggaagcatataacagctaagtgacttgcctagtctcattcattcaactactatttactgagcactgactctatgccgggcaatgtgctgggggctagtgacccagagatggacaagacagaatggtcctggccctgtggagctgatagtttcagagttacatgctaagtggacaaatgcaaaggcaatgatggcttctgatcctggccgagtgaaagaccaacaccaaccatgggaatatactaagttacacatttattttttaatagctccttgagttcagctatgccacttgcttcacttttttctttcacttggaaactaatgtgaacttacattcctccatgatgccattgaaaatagatatttaggccaggcgcagtggctcacgcttgtaatcttagcactttgggaggccaaggcgggcagatcacaagaccaggagttcgagaccagcctggccaacacagtgaaaccctgtctctactaaaaatagaaaaaaattagctgggcatggtggcggtcctgtaatcccagctgcttgggaggctgaggcaaggagaattgcttaaacctgggaggcggaggttgcagtgagccaagatcatgccaccctactccagcccaggtgacagtatgaaactccatctcaaaaaaaaaaaaaaaaaaaagaatatatgtatttaataaatcctttctgggagttgagtttgagtttgttttggcttcaggctgattatgtgctaagtggtgtaagttggaagagagagaaatgactcgtcccttgccatcatggtgaggcgagacacacatagaaaacatgcagaagacaaggcacatatgtgtgtggggtatatgtatatgggtctctatatagatggagattgtaaagcatttgtgcaagtggtcatagtaagctcctagttttgcaggataaaaaacattttaagtgggaaagcaaaacaaaacaaaaaaagcagaaaagagatcagaaatcactggaggtatcaagtgtcccactaagaagtttcacaggggctgggtgtggtggctcatacctgtaatcttagcactttggaaggccaagttgggaggactgcttgaatccgggagttcgagattagcctgggcaacatagcaagaccctatctcttcaaaaagttttgtacaaattagctgggaacagtggtatgtgcaggtagtcccagctatttgggaaaccaagacagtaggatcatttgagcccatgaggtcaaggatgcagtgagctgtgattgtgccactacactgggcaacagagagaccctgtctcaaaaaaaaaaaaaatggttttgcttctctcagaatttaagtgttttggtaaaataacagactaataaaatgtgaatgctggaggggcatttcaggattatttgtccagcaccctacaggtaagagaaagaacattcagagcagttggctgaagtcagaaaactagtctgttacagaaatgcattttaaaccggcttggagaagctggtaaaaggaaatggcctctaaagcttactgtgtgaggccaggtaaggattatagttcccctcagactctaagacatggtgcataacagtaaagcagtgtctaccctaagactcatagaaaaaagaggccaggggcccggagaagctaccaagtggttaaagaaaatggcatagcataactgagtttgagaaaatgacatcttttgtttaaagtgctgggtttatttgcattttttcttcctgtctgctaagaccttaatcttaaccctgtcctgaacccctctaccctaggggcctgcattcagacttccagccttgctccattaccttcatagtaatgactcacacagcaagaatggaaggccctcatagcgatggttattttaggcaagtgctcaggcaaagcaactatctcagaataacttgcctggcagactgttaaggtgaaaatatttgtatgccagtaaaaacatcaacatattttctacttgtcaatataaatatatcaaatgagatcatgagggaaagggctttgcaactgtaaagtatctctagctatgtgatatatttattatttgcttttaaaataccaagatgggctagagaacagctcataattcccacagaacagtttcaagacggaaaaaaaaaaaaaaaacaaaaaacaaaactacccgcatttttaggccttgtccacgtgctccagagttgtcttttgctgaaagatcttaagtgtgactccttttgactggattttttcacccacggccactcagtaatgcaaggggcctggaccagcagcctggtgagactgcggggcctgcttcaggaaggagggtggtctctctggaccccacaccttcctgacagctcagcatctgaaaggaagcactgtggtgtggccttcaaggggcgatcccgggtttgttggttttgatcaacctagtgacatgcttagtttcttgtaggagtgatagaatttttaaatctccaagtcctagcagttaagtatacaaaacactgcccttgccaacaccccccattaaaaaaaaaaaaaactgaagtatttttaggtcacttatgttaaaattcagtggatactgttctgaggggaagaggctagggaattccttcattattacaatttatttattagattagctactttctctagaaaagcccaagaccttaagactctgcttgtggaaggcagaccatggtagggaatgccagagtgggctctggggaggtgacaggcagcactcgatcagggcagggtggggctgaaagtcggaggatgaggatggtggttgggatgcgatgcacttgagcttcagcacccacaggctctgctgccctgtggctattccctgagccccactcccccactgtattagtccgttttcatgctgctgataaagacataaccgagactgggtaatttataaagaaaaagggttttaatggactctcagttccatgttactggtgaggcctcacaatcatggaggaaggtgaaaggcgcatcttacatggcagcagacaagagagaatgagagccaaatgaaaggggaaaccccttataaaatcatcagatctggtgagacttattcactaccactagaacagtatgggggaaacagcccctaggattcaattatctcccaccaggtcccccacacaacacatgggaattataggagctacaattcaagatgagatttaggtggggacacagccaaaccatatcacccccccgccactcgtaacccactcccaccctctctttttcctcgcagacatatttcctttaattccctaagttgtaacatagagccaaatttcttggaacattgtgtgggaaagactaaacaaaactataagcccacccaaatggaacattatttttctttggcctttatatatagcattttcatattttcaaacccatttcacacttatgctaaaattctgaccagtctctgcaaaaggatgaattgggacaattcttatgacccttgagtttcataatgtcaacccactgattttaaattctggcattggtctctcttcctcttggctcactcttcccataccacactttcggcagatgtgttccaaacaagaacttatcccattgagcagggtgggctggtggattattaattacccactgaatctattaggttggtgcaaaagtaattgcggttcttgccattactttcaataattgttggacctgctaatttccatggagttttgtgcatgttaggttactcttaaacaccacagaaaatggtgattcatctcttgactgcccccagagaaggctgaagaaaggtcaaaaacatccccaccagtgaattaccagggctagtggaaactctgtccccatcataacttttgtcacgccaggcagatccacttggcagatgacaggagccccacttgctgcccagagctaagcaccttctctgccagcaacccacaggcacagtgggactggatagctcgtccacctccaccctgagagtgtttctatttgcttcagtgaaagcgttacaccttgctgcgacagagccctgattaaaggcaagatcaaatgagctcacgggcatttccactagtgaccagtgacctcagagcaaatcttccttaattcccaaagcataatttgaatttttatgagaagtgaaaggaggaggtcagttattttggacaaatattatttcaaactcatagaacagatgtttcaagtgattccctacttttctgcctgcttcccttcctaaaactgtgcttccccttttgtaaatcttagtgtgcagcctatgattgcaagctgagctgtgggccttgaaagactcgtggtgaaagtgaatctgaacagcaaagctgctgcaattcaggagcaggggtaaagaaggaagggccagtagcatgagtggatgtgtagaatactgctcagattcacaagaaatagtttaattgagccaagcaaaattttaggagtgatgtgggaacacattttttaaaaacacttgaaaaatttagacactccctcccatattctttttttattttttcctttttctttgtttcagtcccattaattatctcataccctcccataaatgttccaaatatttgtttgttccaaaatattggttattgccttctttttcctttttcaaactgtatccagtcttattaaagatgctttttgtaagcaatcatcgtatattagacaggccatgagcagacaattgctaacagtatacaacaacttccaaactctcttcttcaatgaaccaaaatcagacagctgtataaaacccagtgaaatcttcatttgcttagactctcgattgcagtgagggttgacatttcacatgtagcatgttgtttaacaacttttcatgagccaatcttgactttcaggaaatgaaatgaaaatggcagaatcatcagtctggagatccacaatctaaaaaaggaactgctgttgttttgagagctgccctctcaataggggtcactggaaggtccagatggccacctgactgctaattaattttaggtgtcaggtcccaacaggtctctgggtttaaggaagttgagaccatactaaaggcagagagggagaagaagaaataatgaattttagttttcccacaccataaggtgtttgtgccaaggtagctatgtgtgtcaatgccaggaatccccctcctgggagccaagaggaagtttctcaaaactggaagaaaaggtgtttccccacattaatccagcttcggagacattctattagtgacatatgccccttccccccgaaaaaatgaaatgttctgtgtaataataacatagctttaagaaaagtaagacaacattctacatttttataaaactccatttaaaaaaaaatagtatttccaattgtatggttaccagaagtacacagttatcaaaaacgcacacacttcccctggcatctccagcatcgtcagctttctgtgcctggtctgttctggcatctccattttctgcaggattatttccctctttgccagtgccagcctttcccttttttccttctgcgtaccttctcttccttcttagcaggggccttttggggcttgggttctggctgtggagaagcaggtcaagcagacaaccttgctgatcttctctgtggtttatccttcaatgtggctgtatctcttggagcatcccctcagactttctccagtgctggatgaaggcactgcatggtgggatgcagtggtacctgggctctggtcggtctagacgtcattctcacttcttcacactgctcctcccttcgtttactaaacattaaagaggatgacaatggggcttgggggacagtggggacgaagagcatggagatactttgataccttgatcatgaagggcttaggaggaatgatagtcccaggggacacagactaagatgcaagccaccaaaaccaagccttgcaattccttcacaattttgctgaagatgtccttatccattattgaactctttcattttactgtatgccctaagttcttctagtttgaatatgtgaagttcgaatttggggaatttgttatttacattgggaaaacaacaaggtgagaatatcagcagatgttactgttccttgcggatgtttaagaatgttcagcctctaagattgtcttagttgagatttctgtggcctctgtagtaggttaaactattaacctactacagagttcatctggtccgggacagggacagccaatcaggacatttttagttggcctgatgctcagatgtagccatcaccgactgaccgactctgggctgtcttctgctgcgcagatcctgagtaacctggtgatggaggagctcctgcccactcttcagacagacctgctgcctaagatgaaggggaagaagaatgacagaaagaggacgtggcttggtgtaagcaatggttttgctctacaactgagctactcaaaatgggaacattctcttcccttttcttttagggcatttgttgttgttgttgatattcccttccctgggtgtagaaatgcctacttcgaacctgctgagtctcacttacaagaagactgttccaaacagactccaactttgaaagaaaaattacaatgtgtgtgcagttctgtttgttatgatggcctgtgatgaaggctcctccctccacttgactccatcagtgcttacacgtgacagagccctgatttatgtgttattccttgttgcagctcctcgaggaggcctacaccctggttcagcatcaagtttcagaaggattaagtgccttgaaggaggaatgcagagctctgacaaagggcctggaaggaacgatccgttctgacatggatcagattgtgaactcaaagaactatttaattggaaagatcaaaggtcagtagagataatccatgctcttactaattaaataagctgtacatgcagggatccaccacatagcaggaatgcatggtttcagaggataattacacttaagaaattgggaggaggtgatcacagctgcaacaggaacatgctggaggtaccattaggggcctgggccttcccgtggaagcttcatggacacaaggcagaggaaagtttgtttcttgcctttggcagtgcctgtgtatttgatactgcctgcacccccaacccccattgtagcacccttgacactgaattagactggcttctgctccacctcctctctgccgtaagctctcaaagagcagagccatgtcaccctggtttactcaagtacacccagggcctggtgtcacgcctggcatatacagactcagcaaatattcaaatcaattaatatatggattttcctctaacatgaaagcccaaaattttggcttggagtcatacccagtcaccctacaaacccaataaatgtaggtttgtagccccaactccaatattaggcagtccatgcataattggggaggtcactcaccttctgtttagctcagtgtcctcctctgaaattaggaggacccacaggagtgggattggcaaactgaagcccttgagccatattgggccaccacctgtttttgtaaataatgttttcttggcacacagccaggcacattcatttatgtattgtctgtggctgcttttgtgctacaacagaagtgaatagttggaactgagaccttacggaccacaaaggcacaaatatttactatttggtcctttacagaaaacagtttgcctattcccatacaagagaccttagatggcctctaaggaatcctacagaatgaaattctatggttctccattctatctggggcctctacaacccaacaaacacacccgtacctagtgacctagtgtcacttcagaggagaagcttgcaggctcatctgtgattgtttattgacagtcttcctagaaagttctcagattattccctcactcactcattcattcattagaaactgtggactaagtgctttccaagcgagacaatggagctttagcagtgaccgaggaacaccctattcctgtgctcaggaggcttagagtctcggggctgtcggctttgtggattagcctctgcagttcaggccccctttccactgcagcccagcttgcttcagggttcttagcacaggtcctgctgagaggaggtttgaggaggcacagctccagcactggtgtgtgtgtctgtgtatctctgggtgtctatttacgccatcctttccaaagccagctctacattaacctcagagtatttgatgttttctactatctgtgtctcttattcctccattagtacaactaatctagagttgactatatattgaaatactttgtactacttaaaactaccagtgctcaacttctgtgccaaaatttctgctatctggagctaagttgggcctaactgtagccgttctcatggctgaaactaaattgtcatcctttgcttaaatctctgtggctccggtgtatccacatatgatggaaaaagattttgccctgaattagtatttatttcctaaaagaagccgtaaaaggaagtaatgatcaagtctttttaaaatggaatatcagtgttacagctcttttagaatttgtctagcaggctttccagtttttgctggaaagcccaaaaaatgaaaaataaataaaatgaaatatcagaaacacattttaactaggcatccagtgctccacctttaaaacaaggaagtgcgctttcggctgcattaataaagggctttgtatttctaaaaaaaaacctggggagtattaaatggtgatctgtctatttcctcccatatgactcttgggagtaaagcccctgagctttagttctgctgcacaattatttattcattcaataagtatttattctacttctgctgagtacaatggctggaatgactcaaagaagacaacgtgattttacaaggagaggaggatacaaagcatgtcacagatgctgagacagaaggaaaaacatcttcctaccagcggtagaacaaagagcacagtggttcccaatgtgagcatagatcccatttcaacctcaagaagctatgtgggcccctcataatgagagcacaggtctagtgtcgggggactggaaaaaacgataatgccaacaggtacaataagagctaacagttactgagttcttccaaggggccacttccagagttgtaagcacttgtaatatagtaaactcatttaatcctcaccataattgcttttatgatctccattttacagatgataatactgaggcagaaattcggtaacttgctgagattccagagctagttgtggtagagtcgggctccaaacccaggccctctggccctcgcctttcaggcatcatcgctctgttcagctccttccttcacttcagtaaggcttatgaattaatgtatcaaacacatatgcatcacagcggcatctctgcatgcttgaaaaatagcagtgcatacacgaatgggacatggaacttatccagcccataaggaaacacctgcagaccccagctcaggaagctgtgtgggagttccaggacattagggtgaaatttgaactgggccttgaagagaggagtaggatgtttatgagcagaggtagaggaaggaaggcaaggtaaaggaacattgaataaaggtgcagagagggggcggaagcacattgtggtaagtaggcacagagggagagtgggcagagaggaatataccctcccacggccctcctgtgcctatcttggccccacccagatctgccatctgctgctagatctttattgcatattacccatgttcagcattgttctgaaatttccattagatgcttttcaaatacttcctctctttaaagttaattaactaataattaatttatctcctgacaaacagttttacactttagtgtcaagcaagtcatttttagaagactcttagattgtgtcatatttggatcatacaattgaaagggttttttcttaataattctatgacttgtgtaatattttacatcccaaatatttctgagtgatttgtaatattaataatattagtcattttggattatcagaataagaggccatgatctggtcctgcacaactctgtgaaatatttccgccagttgaaataagaacgaggccattcatctcactgtaagcaaattcccaagaagaacttaagaaagacacttgaatgttagccctgctcctgaaaattagggtctgatgtttgtccagtcatcaaacatctccaggcctcatttttttcatctgtaaagtggagagattggataccagctccacttgtgcttctgttctcagttctgtgattctatgacaaggctctgtgacctgcctcaatccacaaggctagccttctagtccacggagcaagctcaggcttcttctagctccggcctccttcactccattgcgtcttcctagctgatcatgagagttacctctgctctgaaaacaatgcaggtttccatgtcctacccagactgcaccaggagcttcactgtgctctccctcttctaaatcaaagaggagtactttcctctggggagtggaattatagtggcattttttcattcttcttcgtgatcaaaatgtattctacatttttgtcactaagcatgtcatcttggtcagaaaaacctattgtgattttgttttgtcttgttttaatcagggatggggacaggaggtagggtggcaaactgaatggaatttggttccattggcccaagaaaagaatgtactggagttcttaaaaagtattttggtggggagaggaggatggaattatactgagtgattaactcctagagaaatgaattaaaacaataaattgtgtttttagaagacaaactgtgcatatttaatgatagtgattgacagtagataggtggatcaccagccttttcttcttcatatgaagagttgcatgttcagagggaccaagcagaaaaatgcattttatcccagggcagaggaaagcttggggagtggataggtttggtccagttctgaaagggtccagtggttttcctttcttgtgaccatgggcaccaggctcattgtgctagtctgtcatggcctcttgagcttgccttggctgttaaatggctccgtggggcaccattcagctctggtctggctccagtgcccacaaacccagttttgccatatgtcacggttttttggctatttcctacctcagcgatggtggcccagccggcggagaaaagctgcttggagagtgtgcagccattcctggcatccatcctggaggagctcatgggaccagtgagctcgggattcagtgaagtacgtgtactctttgagaaagaggtgaatgaagtcagccagaacttccagaccaccaaagacagtgtccagctaaaggaggtaggatacaaagctgaggagctgggtgtgaatggtctgcctggctgtgttttccatggggctttatctgccatttctccctcccttcctcccttctttccttccttccattcttctgcccttccctccattcatccagcctttcttccgttcattcagacccaccattcatctgtctattcatccatccacccatctgatagttttactgatggttttcaagttagaaaaataataacctgtgtgtacaagtgaagcaacatactcaaatatattaaaggcaaacttagtcaccatcactgatacccactaatcctagtccaccccagactcctaggctacccccattccaaactccttgaattaactaatagaaatagcttggtatatatttttcctatagtttttatttattcatacaagtatatatcctcatttgtagaacattgttggtttgttttcaaaaatatagacttatgatatgaaatttgattaaaaaaaaaacttcagccaaattaaatctaaaggagtttaattgagcaacaaaccatttgtgaatcgggcagcccctagaatcacaacagattcacagacactccaggggtgcctcacggtcagaacaaatttatagacaaaaaagatcaagtgacatacaggaattggaagtgaggtacagaaacagtgaaattggttacagctcggcatttgccttatttgaacgcagtttgaacattcagcagtctatgagtggttgaagtatggccgctgggattggccaaaactcaactattgttataggtgcatactactaagttaggttttcaattttgtctgactattaagctaggttacagttcatccacaaggacttatatatataagaaaggagtccttcttaggccatagttagtttgcattaacaattcccccctttttgcaaaggatatgaacagccacttctcaaaagaagacatttatgtagccaacagacacatgaaataatgctcatcaacactggtcatcagataaatgcaaatcaaaaccacagtgagatatcacctcatgccagttagaatggcaatcattaaaaagtcaagaaacaacagatgctggagaggatgtgaagaaataggaatgcttttacactgtcggcgggagtgtaaacttgttcaaccattgtggaagacagtgtggcgattcctcagggatctagaactagaaataccatttgacccagccatcccattactgggtatatacccaaaggattataaatcatgctactataaagacacatgcacacatatgttaattgcggcactattcacaatagcaaagacttggaaccaacccaaatgtccatcaatgatagactggattaagaaaatgtggcatgtacaccatggaatactatgcagccataaaaaaggatgagttcatgtcctttgcagggacatggatgaagctggaaaccatcattttcagccaactatcacaaggacagaaaaccaaacactgcatgttctcactcataggtgggaattgaacaatgagaacacgtggacatggcagggaacatcacacatggggtcctgttgcagggtgaggggcaggtggagggatagcattaggagaaatacctaatgtaaatgacaacttgatggatgcagcagaccaacatggcacatgtatacctatgtaacaaacctgcacgttgtgcacatttaccctagaacttaaagtataataaaaataaaataataataataataataattccccccttttggtcattttctcaattttgagaaaatgaccaaaaccttagtcattgatgttactagcactattgtaaatgtacttatatggttttgaaacccactgggaaacagtagaacagtgggttttgcaaggagggaataaggactgagtagagagtaccttcttatgctggaacatcctatttacaggagaaaaacaaaacctggtatgttctaggatctatgtgttttcttaaagccctagcttgattatgtcacatttagcataagtggctctattttagcttggtttggtttgttggggcctagtgcatgagcttagtcccaaataatggcctcccatttaaaattttgtttaaaaataattccccctcttgggccaggttttcacttaggtgagagtgtgaccaaaacttagggccttagtgccactttcagttaccatcattttgggtttctggtctcagcatgtcattcatataggttatggagtcctcatggtcacatgtttctttcagcttttgtcatttcagttgaagggggaccatttgacatcctagagatggctacatgcaaacatttaaaacctttgagagaatacagcacaccaggaagactattattatgactattgggaggataatatcaagagtttggagtatgctccttacccagggtccccataaaccaaatcacctaaaattaaatagattaaagaatgagctagatgaagagtctactcgcttgactaagtggtcttttcattaatcccctacagctggatttttataatctacatatgatgtatttctccataggccacaagtgtcagcagctgcataggtacttttctgtttagccaattttattatttagcataactttcacaagagaatttaaagtatgttgtgtaacgacagcctttaaagtagaatttactgtagggcctattatgagggagacatttctaattattgccttttagtctaaaccatggaaaaaggacctaacaaatgatgtccttctagaagagtgaaggcctcctggcagtgttctctttaatccatgatgcggattaagaagagttttgactgattatgaggcaacgtgtgtaccactaaagtttctcacctacactgggccttcattttttatctattaaagtataaggctattcatgtataaggctggctgcaaaatccttcacaaataaaattataccctataagtgcacataatagacctccttttcatttatactgctcatagaggcatacacaaggaaaaaatattcaaagatcagagtcttgtgatagcagaagtcttgatccatgatcttgggaaaaactgttcacatcaaggatgtcatcttcttctggggagaaactgtcctggttagattagcttaaggggtccaatgggtgtacagttccaggagtgtgaaggaacccttctcagttgtgagattatggacccaaagttcaagtctccaaagttttgctgtagtgtggagggcaatgacagtctttctctgatgttttcagaagatctaatcttcaggttctagattatgaagggattgtcctcagtgaaccataaaaagctttctttacctggggaaaatacattgtagcataataatctactgttataacatcagccctcttgcatgggaaagcttttatacaactagaaaacatgcattgaaaatgacaattgaatgaaatccctttataaatgtttaaatggcccatcagatagccaaatgtacctgacgctttaattttttccccaggaatatggaagtgaatattggttctaaactgtttccacaatttataagtcaccatatcaatatattcaatttggattattttatcttttccatgatgagtcatggaatgcagaacctttaataacaaaagcttaaggattcaggaaggacaaggtggctgtcctagttcttcatgagtccatgcttaacactggacttacgtcctcttgaataccagttgtttctccaatttaggtgcacagcactgataactaatggtttatcataggtaatttgacttagaccatggagttcattcaaattgtatatttaaacaatttcagtattggctgatttagcatgataatctagagcttggttttgaaaggtttgtcaaataccacaggtttaaaacattggatattacaaaatagaatcttaggttaccataagtcattcatttagccaaaatgatgatacaaaaatttttaaaaggatgaaacatgactctgatggagaggggaacagctttccaaataagacccaatgaatgtagcatgaggccaactgactgtctccttgccttcccttttgtagtttacttaaaaggtaaacaaaaacctttcattatcttttaatattatataaaaatcatttttaaaagagaaaaccaaattttatgtttccattagtgtatttttaatgttaaagctagtttttaatatttcataaatatattcagttttaattactttgaccataaggtaagatttttataaaccttttataactcattagaattttttttctcagaacagaacaatgttccaagaaaactttgttatgcttttattcccatgtccaatttagggaaaaagcaataatgccattttatttagccaatatattcacacatagaatctcttacagttaattttttataaaccttccacaacctgttcaaacctttagctttgtataatttaaaacaatcctttaaccctctaacctaggcaaaaatttacatttccatatgttcttataatctcttacaaaaaatacatttaattctccttacataccttgcatgtaaacctatttttttcagtaggctcaattacatattacagtgttaactcatagcaacttttacttttggtaaaaaccttggtgagtaagggattttaattatgtactaggtgtggagcctaggacccagatagaaatgcagataaggtatgacttattccagcatcgaactccatgtgtcccaggccttagctagctgtaaagccagcaagctgtacagtgaaaagtcatagtggcagcttatgaagcaccttcaaattatacaacatttctggcataaattccttttaataaattatttcacaacttacacagaccatgtacgacatgtttagactttctgacttgcttaaacatccctctttttaaacaaccagtcattttactttaggacaataatttaccatacaacatcctctcttatataaaatctcttttctttataaccttctttatatagctagggggcatggttaattccatatatccccaggccttatttagaatttaatgtctccaaaataaattgaacaattttcaaaagtcaaagcagttagcaaacctattatctgacctgcataatttagacaaaatgtctttattttaacaataatttttaaagctgttttcatttcccaaaaattactgaagttaatgaactaaaaggtattatagtttttattttgctttcaaaatatttgatgtaagtgcttatttttgtttaagccaattagagttcttttatataaacattacacacaacacatatataattacatagacagacagacagaagaacattacacagtagttgtaagatttttcatttgctagatttttaatttcttaattggttattggctttatggtggagtccttggaagaacagggccaggaaaggggtctctggtgcctccagactgttagagcttgatattcacttttaattaagtggacttttaatcatagcactctttaataaagtatttttaaaatttcttattaaccaattttagccaggccaaatgactgatgtttctggcttttgaactttaccaaagtaggtaatctcccagatgctcagagaaaggaaaatttaagatagtccatggaggagaagagactagacagggtcatgcagatattcaaccagaaagaacttgcttcctaagcagggaattgcacctggaccaccagtgtgaaagggcaaaaccttagctactgagctacagcatggagcaatctctactgcccttcccagaaggcatctagagtagttaactttgagtttgcaaaggctttaactactcaagataatttttagagctaactatgacataaactctaaaattccattccctggaaggcagagaccaagagaaagtactgctatgtggttacaaagtcaagctcccaaggacataaaacaagatggagataagcagtgatttttaccattcattcgactgtttttatatatagagagaagccagaaatctgactggtaagaaattcttaccttttggccggcatgccaggctctgggctccctttccctgagtggctctagtgacccagcttgctgcaccatcctgctgggggccaagccacgtcataaaggaaaattattatttttttcattctggctagagcaaaatatgtatgataaaacatatacattagccactctgcttagcacccaatatcaaactggcaaagcttaaatttgccctcagatggccctcctcatctttaatcaaacctccgactaggagtttcaacttgtggtctctgggcaagatggttgccctgagtaacagaaaagataggaaaggaaaataagatgaaggaaagtattgcctgtgggagggtgcataaggtgaagagctcagggaggccagagcaagacccattcatttcagcgacactgaaaagttctgatggccactagttagtagcgaaaggatcttttccagcagtctcatcagctctcaggtttctcccttttccgggagggaggaaaaagctccccatgtcccacaatcctgtacatgcctaatcctgtcacccacagccatcagcaaagagtgcaagtcagattattccaaagggaatagcagttgacatcctgtagtgccaaaaccgttcctagccaaaagggactttactgagagccctcattttaaaaatgtacttcaatgcagccgggcgcagtggctcaggcctgtaatcctggcactttgggaggccgaggcgggcggatcgtgaggtcgggaaatcgagaccatcctggctaacatggtgaaaccctgtctctactaaaaataccaaaaattagccgggcgtggtggcggggtgcctgtagtcccagctgaggcaagagaatggcatgaacccaggaggtggaactttcagtgagccaagatcgcgcctgcactctagttgggagacagagtgagactccgtctcaaaaaaaaaaacaaaaaaaaaaaggaagaaagtacctcaatgcattgttgttctttcggaacattccactgtaaattatcttcagtaagattttgctgtttctgtaagacttcactgcctcccaggcctaatgtataagccagaaggaactcagttttccagaaattaaggagcccattttaacctaaaatattggctttactcccaggttctcttaacttagccaatgatttttcctacctaagcacacaagaaaaatgaaaaaaggggtagaacacagaaatccctgtgaattttcaaaagccaaattttataacccctgcaatattactgcttactaccagttcctttctgacccagtcagatatacgaggcctctgactgggtccaagccagttaattcctggatcaaatctgttcctggacccagtccagtttctgtcatgactacaaacccagtttggatcagaaacttgctcgaagaaactcagagagctcaaaacacaaatctatggagcttcaaattccgagagggagcttaccgcgatccccagccgctctgagagatcaatggacacaggtgggacctgcaggtaccttgtgtgttcactcagcgctcctgggagtcactagaagctccacttcggatcctgcttctgacaccatctgataaaagaaaaacttcagccaaattaaatttaaaggagtttacctgagcaatgaatgattcgcaaatcgggcagtccctagaatcacagcagattcacaaattctccgggggtgcctcacagtcagaataaatttacagacaaaaaaggtaaggtgacgtacaggaatcagaagtgaggaacagaaatagtgagactggttacaactcagcatttgccttatttgaacatttagcagtctatgagtagttgaagtatggctgctgggactggtcaacactcagttattgttacaggtgcatactactaagttaggttttcaattttatctgactcttacagttcatccacaaggactaaaatatggaagtatggagtccttctcaggctgtatttagtttgctttaacagatcaatatttctgaaagtatggtccccagaccagcagtgtcatcatcacctggttgttaaaaatgcaaattctcgggccccaccaatgatctactaaatcagaaaatctaggggtagtgcccaggagtctgttttaacaagacctccagaggttctggtgtaccctacagtttaagaatcactgaaaaagatataaattggcagcttggttttatacttgacatatcatgatgaacatccttacaagtcagtagataaaaccagatgtctctatttcttttcctttattctttatgcatatatacacatatataattgtgcattaacaggatcattttagaaatgttttggggtttcttattgcagcctgttttgttttacttgtcttcactcttccccttccccaatgccacctcctcccctcaagcaactcgtgttaacaacttagcatatgccattctgtattttccccattcttatctagcacataaaacacacccttagaggctagactttagattgtctgctttaagaaaaatgggattatattttatacattactctgcttatcagtttctcttccaaaaataccccatgaaactgtttccaaggtaactgttttagctctaaatctttctttgtaatggctgcatgatgtttcatgtatggatacaccatgatttattcattcatctcaatattgctggcattatgaataaagcataataaattaatatttttatgtatacacatatatatgtatatatatatacacacacacatatatatgtgtatatatatatacacacacacatatatatgtgtatatatatatatacacacacatataccctgatgtatttatttctatagtatattctcctaagacaagatagccaggttgaaagtacatttctcatgttaaaaaatgtttccattgcatttcaaaaaaaaggatttaaattttacatttccactaattgtgtatgataagggctttctcccccatactgctatcagctataggtgttatcatttgattaaacttttgccaatctgataggagcaaagtgggaacccatttttcctcttctgtctgcttaattgatattttttaaaaatagacacattccatttggtgaggagctgcaagttccacagcatgcttttgatccttacttcacttcagtggacctctccataactcacttcataaagggagcagtattttccctttaaagcataatgagagtgggccctcttaaaattcctgtttagagaaatctagaaatctagattatctcttctgcgtgagctgaaagtcggacagtgcatcttatattattcatatgtaacctgcctcactccccagttctctctagagcctccattttcagaacctttctttctgccttcttctgctccacccattcccctgtttattttaaacctccagtatttcctttaaaaaatgattttaaactaagcttggaaaacagaatgcattctgttgcaacaacatttgttgataacactttagggctttagcaggtgaggtatgatgctggaagcccaatggcctcattgactgagtgcaaactagagtaggagggaccccagttcttcaaactggatacctctcccagtacagggctctgcctatccacttcccatccactagcacctaaagcaacctatagcagagagaagccctgtgggccctggcagatcctcatagaattgtgaggaactctggcttcccttccaaagtccaggagtccagggagcatcctgacctccctggcgttttttgagaggagtgtcactcactaaagaagattttggaagcctgggggcccagcagcaaccacgtatcagagcctacctgtctggttcttgagctctggaagtgggagattagagtccatcaacagcttacaaagactggagtccccgtgggtgcaccgctgggtcttcctctcatccagttggtgtttctgctggtttctgtcctagcattacagctaccctaggaacccactgcaggaggaaaataagacagttgaaggtgtcacagatgtagggatccaagtagtgattcactttaacaacttgcatttgattgcttagaatgtatgtaatatgcaatatatatgcaataccgctcctcattctgagggtgtttaatgtttcccttcaccaaaatgcagcatctagaccggcttatgaatcttccgctgcattccgtgaagatggaaccttgttatactaaagtcaacctgcttcacgagcgcctgcaggatctcaagagccgcttcagattcccccacattgatctggtggttcagaggacacagaactacatgcaggaggtgggtgtggcaggggcatccgtggtggatgagggtaaagagagagcagagaaatgggtgctggccagtgagaccagctgctagtgtagctcagggaaatacgtcgcgtctctttagccatcatgttgcgggaggacacgttctgtccctccactggcttcatcttccatccatgtggatgaacatcatagacaagacatagctcagaaaaataaagtagcattaattgataactacttgatttgtcaaatcagtgctgtaaccttggctacacattggaatcacctgggggaaatactgatgtccaggctggcgtgcagtggcatgatcttggctcactgcatgcaacctttgcctcccgggttcaagtgattgtcttgcctcaacttcctgagtagctgggactacaggcatgtgccaccatgtctggctaatttttgtatttttagtagagatggggtttttactgtgttggccaggctggtctcaaactcttgacctcaagtgaactgcccacctcggcctcccaaagtgctgggattacaggcataagccaccacacccagcctatatggctactttttgatagaacttccctaccctgattcctactgtttctaatatgcagccaggattgagagccactggcttaaattaattccctaacgtaattaagagtaaaccaatcaatcaatcacagcttcatatttgaatttcttgagtctacttgacaggtttcttttttttttttttcataaggaaccttttccccagtaacaggaatgaatagcacaaactccttccgtattatagtgtttcctaaatgaataaggggtacggtcaccaaagctctaaaggacaccatgccatttcacacagatattctgaggagagattactgtgggccggacactgtaccagatcccacttcagggagcttgagtgagacaaattcttagataaattcactacaatgttgaaggtatgataaaggtatatattgtggccaggcacagtggctcacgcctgtaatcccagcattttgggagaccgaggcgggtggatcacttgaagtcaggagtttaagaccagcctggccaacatggtgaaaccccatctctactaaaaatacaaaaaaattagctgggcatggtggtgcacacctgtagtcccagctacttggaggctgaagcacgagactcgcttgaaccctggaggcagaggttgcagtgaaccaagagtgtgccactgcactactccagcctggatgacaaagtgaaaccgtgtctcaaaaaaaaaaaaaaaaaaaaaggtatatattggatgctttgggaccacgggcttggggaagaaaggagaactttttttttcataaaggttatgggcaggattaagtgatacattttagctaactaacccttgagttgtgagggatgaaagaggaacgaggaacaaaattgggcaacagtttagcagaagtctctttcgtaatactggaccctggtgacgggaacacaggcaaaggtgcagagaataagatacctgaactacttctgctttctgacccatgaacatgtcagccactgtccccacccatccctgaccctgcctctcttcccagccctgcagagagagggagagataagctgtggagcggtttacatctacttaaagtggaggtgccaccaaaaactagttgaagaaggctccagcctcatcccttaatcagtggctgcaggtatcaaagaataggagtgcccacgggagatgacagaatgcttgctcagtcccatggccttgggttttccaacttcttcctgctcccactgtgaccacgtgaccatttgtttcacagccctggtgatggggtgatgttgccttgggtacccccaccgaatagcagccgaggggactcatctctgatggcccctactctgcagtcccacttagccaggcctgtgggtggtgatcccagcccctgactgttgtctgtttctgtgtcgcttctggtttctagctaatggagaatgcagtgttcacttttgagcagttgctttccccacatctccaaggagaggcctccaaaactgcagttgccattgagaaggttaaactccgagtcttaaaggtaaaaccgttctcttgtttgtgggaagcataaaaagagaacgtgacccctgtttcttttgtaaagtggaaaataccaagttctctccttggctctaatctttccccactcctttctctcccaagtccagtgactgtcagtccgctgcagtttctccagtgtgacttccatgcctcttctgccatctagcggccactgctggtcctcagcatcattacccacagctacaggccccgcgtcccagccttcatagagatccaactcgacaaacacgtattagctgtccactataagcactgcatgggatgtaaaagtaggcaaggcacagcctctttcttcaaagaggttacaatatagtaaaatccattaaactggcgaataatttattgattttgaaaaatcagaacctcatggcaaaggaaatactccaaagaaaagaaatctaccatatgaaattgttttaaatgtacttcagagtgtttattaaaatagttttaataataggagctttcacatatatgttatattttaaagcctcttacctgatccccacaagaacttgtgcattaactagaatattcccccattgtacagatgaggaactgattctgtaaaagctaatgtgacttaattaagctcaacaggctgatcaatggtgagcttaaggataaacgatcatacacctagtccactaattttttttactgccttctagttcccctaaacattgccttggaacagaagatcaaagtcccacagagcctaggggtggtctctgaatttcagacttgatcttgatgcctcacaggcaagaggaaactctagcaactaaatcattgatattaaaaacaatattggggccgggcacagtggctcacgcctgtaatcccagcactttgggaggccgaggcgggcagatcacgaggtcaggagatcgagaccatcctggctaacacggtgaaaccccgtctctactaaaaatacaaaaaactagccgggtgtggtggtgggcacctgtagtcctagctactcgggaggctgagacaggagaatggcgtgaacctgggaggtggagcttgcagtgagcggagattgtgccactatactccagctctgggtggcagagtgagactctatctcaaaaaacaaaaaacaaaaaaacaaaaaaaaaaacaccaatattgctcatgataacacacataatgatgaaattgcaatgcaactaaaaaaaaaaagatagtgtcagtgtcaaatgctttagcgtacagaaagaaaggaagaaaaaatgtagaaaggtgttgaaatattaggacctcaggtttcaaagagattttgagtgcctttagttcaacttcatattcagtgttcagcaggttccctcaaggggtggtcccactagtgctccgacacctgcactggcaggatactttctacctctcaggatagcccattttagttcttgacagcaagaacatgctttctcatgttaggccaaagttctcaccactggttattccagttctacccccttcattcataaccttcttccacgtggcagcctttggttgtttgaatagagttataacttgccctaacttattatctccagtataaacaccttcatctctttaactattcttcacttggcctgaccattcttctcgctgcctatgactatactcttatttatctgtgatccccttgaagtgagatccacaattaaatcctggtctccatgttgggatgtccaatgcagaacagacagaatcgtcatctttcttgttctggatactgaacttctttggttaacatgtcacagtgttaatggagccactagccaggccttctcttcccttgttcaaatcattacaacccactgaccctggtttgaagatgtggagtaatagatgatcatggtttccatggacctacctgggacaggagtaataaaatacaaactcaccccccagttctatccccaacttctttataatgcagaactcaccattctgttttgatcttgcctcagtttccatacctgtaaaaggtaagagtgagatgggtcattatcagttataacctgtgcctgcagtgtgagggaattacatggaaagatctctgaggccttggaaatacaagagttctcagacattaggaggaaaagagaggtgaagtgggtggctgagttttttgagtaaacataagtcaacagattgtaatgttactatttaacatatgtttctttattgacagcaatatgattatgacagcagcaccatccgaaagaagatatttcaagaggcactagttcaaatcacacttcccactgtgcagaaggcactggcgtccacatgcaaaccagtaaggggatgagttaccctaaagagcttgctcttcttacctctgaagttcaaacaagttcttttgtgatgtgtactggcaaacagcagactagaccagggagggattggcagacatttttgtaaatggtcagatagtaaatattttaagcttcatggactgcactatttctgttgcaactattcagctctgctgttgtagcacacaaacagccattgactatatataaacagactttatttgcaaaaacaagatgctagccagatatgctgacccctggactagacaaaatctcaaagggcagtgatctgaatttgagccaaactaggggttgacatagaatacctaaggataccaggtgtttctcattatagtatgactcataggtccaacgtgtcctctgaaacttgaccactgtatccaaaaaagatattagctaacataattacaggatatttgttctgttaaatccagcaatgttgtttaatgaaatcaatgaaaccacttaaaacctctacaaacattgagcatccagtgagaaccatgattgcgagggtgtgacttcatctgtagagcagagcaatgggccagcagagactgaaaacagctctgggaggaggtattatttatatcctcatggtacaaatgaggaaacctgagtggttaagccactgagccgaggccacagacctggtgaccaccagagtgtgaacccagttcttgcttacctaaaacatgataggcactcagaaaatggtatcaagtactactaccactattattattactacttctacatttcaaaaataatctattaacctgaagcaaggcctgctccgttttggagcaaatgataaagaggtttttggaatttaaaaaagggctttttggcagctcggagagtctccaagcactggaacgttaaaatcctttgcataagttattttactgcaacatgtcattggtcatttttatagtctgtaagtgctgttttccttcacatcctcatagcgtattagatatatttgacatttatttgtggggcatatttctttcataggaaaggatttgattaagccaagggattgacctttggccttacatggcagaacagttcagcagccaaatgatgatggtgtccactgctaggtgggtttgcacacagatgttctgcttaggattttttttttcaatcacaaaggcagtttgggggcctcagatccaccttctctcaggagaaaggtaaggagagttctccttctcatcggctcccctctttccaagcatcaacatagtgtgctgtgcccaatctgtaagaggctcttgtaattttttaatcaggaggcattgatttcaaaagagcctgtgacccagaggttttggtaatggaggatattatatcagcatcaagagctttttaaaaatctggatttgcagaatagatgaatgaggggattatctgcttcctagaaggagtctttattttgctaaagtgcatttcccttggttctataagtagcagcttcctagatctgtggtactcagcctcagcccaagctgtgtattagaattgtctggggaactgtgaaaaaaatgattctgactccccaacacctaccttcagagataccaaattaattggcccagggaagtaaacctatggccctgttcaatcaattcaatataaaacacctgttttgtaaagttggtcacttcatgacagtatatatgtccatagaaagtactccttcccacagaattatttagctggttgaaaatttaaaggtctactgtttattgagtcagcaaatatgtattagatttgtatcacatgtgatccaggcattgtgccagcccagcatccctgaagtcctggagttcacagtagagagcaggagacaggcaaacaggatgccatgtgaggaacacagcagttgcctcatggggaagagttccaaggaaagtgccaaactctgcttatacagccaggaaggacttccagagtcatgctttcacccagtcctgagggatgaatgccaatcaggggaataggaatgggggaccacgtgggaaggatgaaagggtgttgcaggcatgaatctgtgcctctcatttagcagaggaagagacagaggcacagagcagtgatatggctcaccaaggtcccatgtctagtccagggcagtctccagtctcctgggcaatgcttttctcaaatctgtgcaacagtcctgcctctagaccctctaggggtctttgaagctcatgtctcttcaatcctttgcctttcttcttggttgggtataaaggaacccattattacccgctgtgatctgggctacagtgccccaaagtcccagcactgagagttgtctgaggtggtgcttctgatcacctgctgtaaatactgtccttccaggcaagagaccgcaaatcccatggctaagtccctgattctctaagagccacatgtgggaagccttcccccagcaccaccaggtgcaaggattactgagttaatcatgggatatgatttggtacattttgatccctgccctgtcctcatgccgataaaaggcaagccatttggaaacccttggaaaggagagagagttaagggatgcaccatgcctgagctatcctagaaggaatcaatgaatgtcagggccagctgaagagaaagagaatgtttctgaagagcccttgactacagagtctcccaacccccaaagtggccccattctgataaagttaagcatacatctaccctatgacccaacaacttcacttttaggtatatgcccaacataaacaagcccttaaatccacaaaaacatatgtacaagaatgttcacagcagttatatttatgattattatatggcgtagatatagttgcgccatatatctacaactatctgatctttgacaaacctgagaaaaacaagcaatggggaaaggattccctatttaataaatggtgctgggaaaactggctagccatatgtagaaagctgaaactggatcccttccttacaccttatacaaaaatcaattcaagatggattaaagacttaaatgttagacctaaaaccataaaaaccctagaagaaaacctaggcattaccattcaggacataggcatgggcaaggacttcatgtctaaaacgccaaaagcaatggcaacaaaagccaaaattgacaaatgggatctaattaaactaaagagcttctgcacagcaaaagaaactaccatcagagtgaacaggcaacccacaaaatgggagaaaattttcacaacctactcatctgacaaagggctaatatccagaatctacaatgaactcaaacaaatttacaagaaaaaaacaaacaaccccatcaaaaagtgggcaaaggacatgagcagacacttctcaaaagaagacatttatgcagccaaaaaacacatgaaaaaatgctcaccatcactggccatcagagaaatgcaaatcaaaaccacaatgagataccatctcacaccagttagaatggcaatcatggccgggcgcggtggctcacgcctgtaatcccagcactttgggaggccgaggcgggcggatcacgaggtcaggagatcgagaccatcctggctaacacggtgaaaccccgtctctactaaaaatacaaaaaattagctgggcgtggtagcgggcgcctgtagtcccagctactcgggaggctgaggcaggagaatggcttgaacccgggaggcggagcttgcagtgagcctagatcgcgccactgcactccagcctgggcgacagagcgagactccgtctcaaaaaaaaaaaaaaaaaaaaaaaaaaaagaatggcaatcattaaaaagtcaggaaacaacaggtgctggagaggatgtggagaaataggaacacttttactttgttggtgggactgtaaactagttcaaccattgtggaagtcagtgtggcgattcctcagggatctagaactagaaataccatttgacccagccatcccattactgggtatatacccaaaggactataaatcatgctgctataaagacacatgcacacatatgtttattgtggcactattcacaatagcaaagtcttggaaccaacccaaatgtccaacaatgatagactggattaagaaaatgtggcacatatacaccatggaatactatgtagccataaaaaatgatgagttcatgtcctttgtagggacatggatgaaattggaaatcatcattctcagtaaactatcgcaagaacaaaaaaccaaacaccgcatattctcactcataggtgggaattgaacaatgagaacacatggacacaggaaggggaacatcacactctggggactgttgtggggtggggggagaggggagggatagcactgggagatatacctaatgctagatgacgagtaagtgggtgcagcgcaccagcatggcacatgtatacatatgtaactaacctgcacattgtgcacatgtaccctaaaacttaaagtataataataataaaaaataaaataaaacaaaaattatatttatggttgaaaattgaaaaaaaatctcaatttttatcaacctgagtgcagataaacaatttttgtttatccatataatgaatactacttaacaataaaaaggaatgagctactgatagatgcagcaacatggatgaatctcaaaaacaaatgcaaaataattatgatttcatttctataaagttcaagaacaagcaaaaactatcatgataggtataaaatcagtgctcatatcttgggaggtgcagactggaaagtggggtgggggaactttgggggtgatggaaatgttctccttgatctgggttatggttacataagtatatttacatatttaaaatcattgagctgaacttatctgtacattttactatatataacttaccttggtaaagtgctattgtgattaaacaaaaaagaaagaaggaaacatcttggtgatgaggggaaaaaaggaggctccaaacctgctaatgaggccttgagatgataaaaaaaaatcactgctgtcttctcccatgaagtgtataaaatgcgtggccagtacaaggaaagggaaaggaaccaccaatggctgagtgagttccacaccttatcatggacagtaatagatgtgtcgaggtcaggcatggtgcctagacagtgaattgaattgaagggaacccaataaaatattattgaattgagtaatttgcccctgggccaacatggtccttctcttatgccctccaagaagagaatcatgagtgggaatcgtcctttctgtatctcctctaagaacaggcatctcatgccttttcatctttatcttctaatctcttgctctccaggagcttcagaaatacgagcagttcatctttgcagatcataccaatatgattcacgttgaaaatgtctatgaggagattttacatcagatcctgcttgatgaaactctgaaaggtaagaaaggttacctggtgctgcagggacactccatagaggggagcatccctgaaataggactctgtaaggccagtcagggaggaaaagagaagaggaaatggacattggtgagggagggagacagacagtgaggagagggaaggaaagaaggaaggatactaaccttgattgagtgttatgattaagcacacacaaagctggcactttagatgttattttccctttttaatacacaaatatgaatgctgtgagatgggaattttaagtttcattttacagatgagaaagttgaggcttagtgagattaaatctcgggtctctcatgaagagctgtcttcctcttgctattccagacagaacaaagggaaaagggcttttcttaggcacaggcttgtaactgcccctgccccccacccaccaaagctgagaagaggcaattccagcagcaaggcttattaatggctctctcaacacattcccagactccactcagccagacagaaaaaggtgcagggtgatgatgcagtgccacgcaagtctcggtgggactccggcatccagtatcctcaggaatcatgccttgcctgggattggattgtggataggaaaactttgtttaaaatatgctggagagggctgggcacagtgggtcacacctgtaatcccagcactttgggagaccaagatgggcagatcacttgaggtcaggagttcaagaccagcctggccaacatggtgaaactccatctctactaaaaatattaaaaaattagctgggcatggtggtgtacacctgtaatcccagctactccagaaggtgaggtaggagaatcgcttgaatccaggaggcagaggttccagtgagccaagattgtgccattgcactccagcctgggtgacagagtgagactcggtctcaaaaaaaaaaaaaaaaaaaagctggagaaggccaccatcaaactgtggacctgaaacatatctggtctccttttggaaggtcttgagtatcacaaaagaccttcctcaatgaaaactggccaaggacaagcccaaggtcctagtagctaattctagggaatccagtgagaccagcaatatgaagatgtcagcacagtgtctacacaaaggaagggctcggtcaaggccactgccagcccaccatgggcacttttgggtgatttagaaaaagactcctttcctccagacactttattgctgtctgttagaaaattgtcacaatatattgattttgttagagaaggaaactctgcagctagatgctgaaaagttatgccgaatacacaaatctgttctgtctttgatatgaatggcacccctgagatgtgatatttttgggcactacagcccctgcacagccataagtaggaggcctgtggtcaaaaatgtcacctgctgttgttgttgttgttattggatttgcccctctggaggcctttgaaactgagctagatgcacatggatcttcattttggccctctcctctgcatgtgcagtaccgagtacctattacacattcaggactgtactgcaaggtaaagcagataagtgtaaggcctggccctgccctagaggatttcagtccaggtggacaaactggagccacccatcttagcagctaataaaatgtgctggggcctccctgagggatacaggtgacactactgcagaccctgagtgtcttgaaaacaaaggctatagtttattcatctctggattcccagggcctgtcccatgttaaatgtcctgcaaatgtttgctgtttgaataaatgaatgaatgaatgctacagaggctcagagtttggaaagagtttatagactttggtcatcagggaaggctccctggatgtaagctgggtcttgaaatggagaaatttggatagccagagaggctgaaaggggactttggcttctcaataaaatcagaaaatcatgttttgttttctgatatctctcagtgataaaggaagctgctatcttgaagaaacacaacttatttgaagataacatggccttgcccagtgaaagtgtgtccagcttaacagatctaaagccccccacagggtcaaaccaggccagccctgccaggagagcttctgccattctgccaggagttctgggtagtgagaccctcagtaacgaagtattccaggagtcagaggaagagaagcagcctgaggtccctagctcgttggccaaaggagaaagcctttctctccctgggccaagcccacccccagatgggactgagcaggtgattatttcaagagtggatgaccccgtggtgaatcctgtggcaacagaggacacagcaggactcccgggcacatgctcatcagagctggagtttggagggacccttgaggatgaagaacccgcccaggaagagccagaacccatcactgcctcgggttctttgaaggcgctcagaaagttgctgacagcgtccgtggaagtaccagtggactctgctccagtgatggaagaagatacgaatggggagagccacgttccccaagaaaatgaagaagaagaggaaaaagagcccagtcaggcagctgccatccaccccgacaactgtgaagaaagtgaagtcagcgagagggaggcccaacctccctgtcccgaggcccatggggaggagttggggggatttccagaggtaggcagcccagcctctccgccagccagtggagggctcaccgaggagcccctggggcccatggagggggagctcccaggagaggcctgcacactcactgcccatgaaggaagagggggcaagtgtaccgaggaaggggatgcctcacagcaagagggctgcaccttaggttctgaccccatctgcctcagtgagagccaggtttctgaggaacaagaagagatgggagggcaaagcagcgcggcccaggccacggccagtgtgaatgcagaggagatcaaggtagcccgtattcatgagtgtcagtgggtggtggaggatgctccaaacccggatgtcctgctgtcacacaaagatgacgtgaaggagggagaaggtggtcaggagagtttcccagagctgccctcagaggagtgaaagggacaatttggctgaagtctttctctgaaaaaagccaaagggttataggggtacacttaggggttgcatgcaagctgttaccaaaaaatttttaagtattttcttaatttgaataataaaaccagaggaaatgcatacagggcatgagcaactgaggcaaacctttgtggacatgaattgttctacgatgaatttttgctttagtattttaataagaattacaaagacaatggcatacttggggtgagagggagctgaggatgtctgaggagggaatagtattgcagggaagactgagaaaacagtaggatgacagttttgagtatactctgcacttttcaattgtgcaatcttcttgtgcactttaaggctttttaattttgtttgagaatgcaaatgtatactgtaagtctacctttactatctactatgcctacttcaccatctcttaaggactcggcatttgtccacagtcagactgcaagagagggtaggtcatgaacagtcacccgtgctggctgtagcccccacagaggcaatcatgcccaatagattcaagagaagctaagcggaaatggagggtggaaggtgtgatctgtgggactgtctgggcctgttactcatcctgctatcaatttcttattaattaatcttgatgattcttattaattaatcacatttgcaggaaattcagatgaggcaagaaaattttattggcctgggtaagactgaaagcattccaaattaggcttagactgtgcaaagggcttagctaagttatcgagcttaaaacccgtcaattaaacaaacattatttgaacagttactgcatgccacgcactgtgttgggcttagtaataaaaaaaagaaaagataagtgcttgttctagcataaattaaaaggtccaagggaatttaatctggaagagaacatatgccaatttttaaactatgacagcttttttttttctctttccattcaaatagtcctggttcattcccagaagggcacaaaatgaatgaataaataaataaatgaataaagacaaaagccaaggtgtatgctctcaagttccaaagatgttatcaaaagctgaaatcatttgtttggtcattcagcaagctaattgagtctctgttatataccaagcactggggataccatggcgaaaaacaactttgttccttcctcctagaacttacattttaatggaaatagacaaaacacatcttcttaacggatggtgacctataaccattaatgttgaaaatggaagagacttgcttccaaaagattaaaaggagttgttcttttctccttcagaaaaataccagatcatttcctaaaatctccagtcccaagtattacatcgtggtttccctccccgactttttattttattttattctatttttttgagatggagtctcactctgtcgccaaggctggagtgcagtggtgtgatctcggctcactgcaacctccgcctcctgggttcaggagattctcctctgtcagcgtcccaagtagctggaattacagccatgcggcaccattcccggctaatttttgtatttttggtagagatgggttttcaccatgttggccaggctggtctcaaactcctgatttcaagcgatccacccacctcgacttcccaaagtgctgggattacagcgtgagctacctggcccctccccaaattttaacatcagatctcaacatatttgttgagaacttgtttagatcatcactatcgagtaaatttatgtcagttctttagagcatttgcttcacacacagttcaaccatttaaccagaaattaaaatatcacccttttcagccctcccatgaagaatttctaggtcataaacatgaataatactcagtatatgtataatatcatatttaattgttgcaacttttcttggcgtgtttaaatcctcatgtctttgagggatcccaccacaggtgaaggaagtaaagaccacttctcccccagtctctgctttctgcagtgctcactcatatcctggcatttagcatggtgtgttgaaattaggtttacttcttgtctctccaagtggctcctctcttaaaagacagaaactagggtttagtcatcatttgtgcttcctgctagaaacccacagccttgaataatggcttcctgcctccttgagtcactttaatatccctggtgcataggacctggcatgcgtcaggctgctcgggaaatgtgggaactggacacccagaacactgctgtgctggggctatttggggcctgctgtcaggcagaaagacgttttgaattgggctttctgcccttgttgagttttctcttaagtaaagtccaaagtccaaggggcagatggccagatgcactgcccagtaaggcaggaagccaaagaggcagtgcccagccccacaaaggctgcccgactccctgggacagtagtgtggagtcccagcccaggctgacctcacaccggagcttcctagcttcctttctttgctcaatgcagggcttcttgcaccccctggaaagctaagagatttttttcaaccctaaaagagagtacctttcactgcattggatggatgaacatcagtgccctaactttatccatcatgtaggtcagggaggactgggcactatttggcaggatgtactccagaatataatcaaagaattttctgtacatatttcactaaagacaagtttttgggctggatgtggtagcttacacctataatcccagcactttgggaggctgaggtgagagggtcacttgagcccaggagttctagacaagcctgggaaacatagcaagatctcatccttacaaaaaataataatggtgtgtgcctgcagtcctagctacttgggtggttgaggcaggaggattgtttgagcgagggaagttgaggctgcagtgaactatgattttaccactgcactccagcttgggcaacaaaatgagaccctgtctcaaaaaaaaaaaaaaagttttctagaataagcaggatgattgtttaatttgaagatggaacaggaaactagagtgcatttaaaatactctgtcttcattttaacatgttgaatggaataactgcatatcaccatgagtttgttttgcttttcatacagacttgtatgtgtcatttgagtggtttccagattggagcgaggttattctgatctaaatgaacagcatttttttccttagcctctgtttgccactctgggtatctctcctatgggcaaagccattagaaatgcataaaacctcgagacatggtttttggcaaaaactccatgactttaaactagctcttttactactgacctttcacagagaaaaaatatttcccttgaaaaaaactgggcttgtcattttttcccttgtagctttaagcagagacataagtgccttgcattacacatagtaaactttctttaaaaaaaaaaaaaaaagattttggagactaccagggtaagattccaacttgtccaaaagctttctggccttacatattttattataaaaattctcaagtctggtaatcttctatgtcagagctagtgatttcaaaaggtttcacaattccccaagacaaaagtgattttcgttcattataataaggttaagtgatatgtgattcatagcaattttgatgtgaagaagggaaggacatcattgacttaataatagtatcagtcggtgcaacagttggcaacatgtgccttcacactttaccataaagagacgggtttgagggtttgccttctaaagtctgcaacttcaagaaaaaaaatcgacactgtggattgactttcccggtcactatataaagcaaataaacttaaaacactttgtaaccatgtatttactctgccaggtgcctatattccaataaaatgttcatccttgaagagctgaccagatgtcatttatttggaaggaggctggtttcatcttttaagcagatgtcacatttgaattgtgaggtacagccctctgaaacgaaaaggcgagtcattcttgctgtatcatggaccttttacttttctgttgtcacgaaggaatctgcagggaaaccacttaatgtcaggtgtaattatgctttgataatgcatatgcttacgtctccaggaattggatcacattcataatacagcagtgggcaattattcttgatgtaattgaactgctgttcaaacttaaatttattttcaatggg

SEQ ID NO: 96 - DNA, 234580 bp, Homo sapiens
agctgcgggcggctccagctgcccccagatgtgggctgggcggctcgcggggaactttcgcgccggctgcgagtgcggggccccggctgcagtccggctgccatggatccgccggcgggagccgctcgccgcctgctctgccccgcgctgctgctgctgctgctgctgctgccgccgccgctcctgccgccgccgccgccgcccgcgaacgccaggctcgccgccgccgccgaccccccaggtaggtgcggcccggcccctactccccgggacccccgccggcctggccctgtcccgcgtgccccgccgccccctccccaggcgtcgtccagcctgacttgggcaaactccgcgcgccccgcccggggccaagttggccaacttcggggccgggttggtcgcgcagggggcgccccgcaccgcccccgagcgccttgggccgggggagcctcggagcactggcggctcctgagtcgcggagggtggggacggagggccgggaaaagccccgcggccaagagcgcagagtcagccccagcgggtccgaggggggagccagggcgaggcggcgccggggctcgcgtccggggacgctccggaggagccggctgccgagcgcgtagccttgggccctaaggattggttggggcgccccgcagggaatccccggagatcggagggaccctgttccacccctcccagtcctcgggcgctcggggagacggggccggcagcgggctgagcgggagctggacaggcaggacaggccgctcgtgctcggggaagccgagactccgccgctccggaggctggcggtgagggcactcgggcggcaggggcccgccgaggggtcgtggcacacgggtaagggggccaacccggaatggcttccgagcagctccacgtcctgccaaggacggtaggtgcaagggtcgggggactctctgacggggtcgtcccttcgggcacggggaggttcccaccgagccccaaccctgaacggggcagggggcagagctcttggcaggcaaggtctccggaggagggaacggctggggagtggcggagccccggagtggtggccctgttaacgccccttcccggttgcaggaaagccggggaggtgcaggctggcttctggggtcgcctggcggaatgccccttcccttcgcagtggggcggggtctgggggggcgtggcttgccggcgggtctctgaggcactggggctccgtggtctccgccgatctaacgccccttcccgttgcaggcgggcccctggggcacggagcggagcgcatcctggcggtgcccgtgcgcactgacgcccagggccgcttggtgtcccacgtggtgtcggcagctacgtccagagcaggggtacgagcccgcagggccgccccggtccggaccccgagcttccccggaggcaacgaggaggagcctggcagtcacctcttctacaatgtcacggtctttggccgagacctgcacctgcggctgcggcccaacgcccgcctcgtggcgcccggggccactatggagtggcagggcgagaagggcaccacccgcgtggagcccctgctcgggagctgtctctacgtcggagacgtggccggcctagccgaagcctcctctgtggcgctcagcaactgcgatgggctggtgagtacgcacttctctagctcctttctctccgctgctctcgcctgggttttggaaaagggttacctgggagtcccttgggagggcaaggcctgcgctgaggactttccgcgcccttcccgtgctttagtgagcctcgtgctccaactgaagggcttggctggaaagcaggttgttttgactggtctgagcagggggccatttatgcatggggagcgcccgggtctccaaaaggctcagcaggcaggagcgtgcgcctctctcttttgcctgcctgaacaggtctctggcttgcatccgggggtgggtccgtgtatgtgtgtgtacctttgtgagtgtgtgcacatgtgttgtggaacgttggtgtgtacctgcatctgggtgcccgtgcacctgtgtgaacatgtgcgtgtgccagtgtctcttgtgcacgtatgtgtctgggtttctgcacatcagtgtgttgagcatctgttgagtttgtgtccgtccttgtgcatactggcgtgatatgtgtgtggtggacttatgggctggcagtcagtcttcctgtttccttgcgtgcgggtaataccagcccagggagctggcagtgatgctgaaatgcccagttagccctctgccccttggctgaccgggaatcattggtttttctgctgtggtttcctgttgaactccagctggttctttgaaaagttggttttctctattttgagctgaggggtgcatttggaaatgaaggctctagtgcccatgagctgctcgatcttttgggggcagcgcctgaaggacaagagagaggctaggggatcccttttgagactgcctgcgcctctctagtcctgtgactggagctctgggaagctctgcttcctggagagggcaggagggaccgtggctcagcacaagggggcctcagaggaagcctggatcgatgctgagggaggaggctgacattggcggtgctctgtccggctgcccggggcctggcacacagcagaggccactgcagttttctattttggattgggtgtgtggtggtcaggctggctgtgctggccagacatctgaagccgcccaccatgggttccgctctaattgctactcagggaactcctgccccgagtgagtggccactctcccagcccccgtggcccctgagcacgcccgtactcgggcagctgaggctcatcctacagtctgcagagccggcaattacaccagggctctgcaaccactgtcattctttttatggagacacagaaaatatcacttgttgctttggaaaatcactgcctttggctggatttagttagaacttggccatattgcaaacaactgtaaatatccctggaggagctgggttaaaatggtgagcccttgacatcgcccactgtctctgaggacatcctgggcctcagaggtgtgtcccattttacgctggaggttaatttcctaaatgaaaggagatgtttgctgcggacttagggtgaggtaaggtggtgggagttgacatggggttgcagtctgttggtgggccaacacctgtgtactatgcattcctgatggagagcattttggggaggacttgtcactgtttcattcattcagcagttcatttggtgattcatttttcagccagcaccttctcatatgtttatcccctgtactggtcagcaatgaggcaggtctggtacccacccagggctcctgtcgtcagggtggctgacggacactctggccaggacttggagagtgtgctcctggggggctgtttgaatgggggctggaagaatgagtggccagctggaaaagacgcaggttggcaacccgggcagagggaggagcgtgtgcagaggtaccaggtgtggattggcctgggcaggacaggcctgctgaagtgtcccatgtaccagacagagctgggaagaatattggggttggaagaggagctgggacctgcctgagcggcattgaatgctgtcactgaataatggccttggacagtgggacagcaccattggttctgttttcttttttttttttttttttgagacggagtctcactctattacccaggctggagtgcagtggcgcgatctcagctcactgcaagcgctctgccttccgggttcacgccattctcctgcctcagcctcccaagtagcagggactacaggcgcctgccaccacgtgcagctaatttttttttattttttttttaatttttagtagagacggtgtttcaccgtgttagccagggtggtctcaatctcctgaccttgtgatctgcctgcctcggcctcctaaagtgctgggattacaggcatgagccactgcgcccagcctcttttcttttcgcttgtcctctttctcttctcttctctttccttccttccttccttcctttttttctttctttctttccttttgatcaggctggtctcaaactcccgacctcaagcgatctgcccatcttggcctcctaaagtgctgggattacaggcctcagccaccgcgcccggcctcttctttccttttctgactttgttgctgcgtatgtgtctgtcctactgttaaatccccctctgctgccaccacgataggcttctttgctaaggacctgggtctttacacagggcacctcttgtcctcacagagccctggtcggggaggcatctcatccctggttacaggtggagcactcaggctctgggaggttgagtgactagacggaagttattcataataatatccacagcgaggggttattcatagtatccacagcaaaatgtccctttgcacaaggcatgagcaaaacaggctgcacagagtggtgttgtgcctcacgttgctgcggaagagttttccagtatctcctgggcagcgtggtaggcgtgctaatttcacgtggtttttacatgcccattaaaaacccagtgagaagccttttggcgtaaaaggtaatgatggtaagtgacagttgactgtgttcctattaacattgtgtgccaggctctcagctgagccccctgtgccacctcgccttgtttaatcctcacagcaccctacggaacatatcccgacatcatcccccttctacagatgaataaactgaggctccaaaagtcgagatagcttgcttcaagcttcgaagccagtatttgaacacaaatctgattccaaggccatgctcactatgttttgttgccttttcctgcatgcctacaaaaagaattttaaaaatgcatttctttacaacatttcccacctttcttatttgactcctggagacgttctcattgtgggtttgaccatcgtcagtgtgagtggagccgggagcaggcctgggagctgagtggccttgactggctcgtgacctgcgctgggctgcagctcctatgggtggcctaagtcctcactggtgggggactgcagctgggacttccgtgggatggaagcaaccctgcccgcctctgcctccccactcagggcagcacggggatcctctcctgccaggctgggcagcagtggatgaagcctccatgggctgggcggtggagatggtccgccctccaaggcctggtccaatcctggggcccaaaggaggaagtgtatgcccttccctggatgcttgatgcgaaccccacaaccctgtgagatagggctgccccactgcgtggctgaggctcagagagacccaaggttgcatggcaagaagaaatccagggctgctgcctttcaggctggggctcccctgcggggctgctgtctgggccaggcacccactctgtcttgctggacattaagagtcataaaggccacagagagaagtcagaagccggcctaagggattgagatgagtttcatttttcccagcaaggctgctgccttcgaggccacacactgggctccagcaggctcaggtgctagagcagatcaggcaggtgtgagcgggtcctgggactgtgcagtggggtgaggggcacctgagatttgcagctgccgctggtagggtcttccttcctcccaccccaccttggcactgcctggatcgcaatgagaggttgtcaggaagactaaagaggggctgcaggaacctctgggttccctagggtgtcggggctccccaggtaggagcagaggctcctgtgggccccagctgcaagcagcctacacagctgctaaggccagtctcagcctccgccatacttgtcaccttaagacttgctcagtttaagtgacagaaacccctgctcatattggatgaaacaaacaagggacagcatggccccaattatctgggggtcctgaggagtgttggcttcaggcctggctgaatccaggggctcagagcatgctatccatttctcagccctgcctctcagtgttcatttcagaattgctctccacccctcaacccccggcccaccagcggctccaggcccaactcgttttccaaggaggcaacctttgagatggaaagccctcctctctgggtgacacctgtgagagttgggggagggattggaggcccatcttcaaacccatggctgtgatgcgggcctagcccaggtctcctgcccacctttgggactgagggggagggacagactcccaaactctggaatgaagaggggcctatcatacaagaagggaggagaattgtgcagggtggtgaacacggttgtggccacccttctcctggactccagaccccatgttgggcttagaagtcctcctgggctccaggcttgcctgctcggctgcctctggaacccccttccctggatgaccccatactcaagtcacgtggctctccccactctcctccagaccccacccttccaggatcgccctcccctagccagctccaattctagagctctctcagggcccggcttccctccacgcctggtgccaacccctgctttctgctcttgtaccccccactgccccatggtctctccccgacaacccttctccactctgcagccagagggatttttagaaaccatgcagcaactcatgtcacgccttcacttaagacctctcagtggttcttactgctcttaaaaacatccaaacccactggcctggcattcaaggcccccgtgacctggtcagggccctccagctccggcctgagtcgcctgctctgctggtctggaatgagactccgggagaaagggctgcaggaggcagaactccagcgttcccctcaggtgcccctgggagggtggggcaatgactccctcccctgctgccttacgtgagctgagggcccctacagagatgcctgagggatccagcagtgcagcgcagtccctctggaggcggcggccagcctcaggagggggtccggggagcagcatccacaccatctacctctgcctggggctttgaacccagtccctgcggttttcctgtgagccagccaccgtggccccatttcacaggtaggaaaccgaggctctaggagttacatatgcaggttctctgtgtgggctggcgtctctcctggaatcctttagggaggggcagagtggagccggctcccagcccctcatgaaggccggcatagtcagcactggtctcagccggagcccagcaaggccagctctccctgagagagctgcactccattgtgtggctgggtatgtttctggcactggtaaatgtgcgcggccatgtgctcattcaggtgtggcaggcttctcctgcccaatggctcgccgtggcttccctgtcccccatgtctccagtgcttagcgagtcatgcctgagtgaatgcaggccctcctgcagagtcagctgggaggtgaaggccaggtcctcacccaggcctgctgtgaggctcataggggccacacctgggtgagtgagtgaattcaggccctcgtgcagagtcagctgggaggtgaaggccaggtcctcacccaggcctgctgtgaggctcacaggggccacacctgggtgagtaagggaatcagccagggacatccgctcagcagcgaggctggctttgcctcgtggctgcctgagctatggtctgggcctgcccactgtggtatctgaagacccaaagaggcaagtgtgcatggcagccctcctgggaccctgggtctgtgctggcaggcagacatgtccttctttaccccacctgcctctctggcttgggcagccctgggggtccctgtgttgctgccggcacagcaggctggtggctgcatgtggacgtgtgcgtgtcctgggcctgtgcatggcgggagtgtgtgcatgtacatgttgcctctgcatgtcttgcatgtaggagtacgtgcatgcagtgtgcgtgtgggggtgcatatgtttgtgcacgtctgaatgagtgtgtacacgtgtgtgcacatgagtgtgtctgcatgggagggtgtgcatttgagtgagcatgggccagcatgtgtttatgtatttctcgggaggggtttcctgcactctgtagaagaggggccttaagtggggttgaggtactcaggggagaggaggaccccagccccctcaatcttggcgccacgttagacacccccatcccctactggtggttaccccggaatgggaggatccaggtaggagctgcacactctgctgcgtatgtttcatattaaatatcagctgtccacagggtctgcggtgctgccattaatatggagaagttattaccgagcccggagctggctcctcgggcttgtccatgaatttcaattacactgcacgacgactccagggctgcagagtggggtgcacagcttccgctcagaggcacagggaaccctagtgtccaggaccaaggcctgggtgctgctgaagccaggcaggctctacgccatccccaccctgccttgtgcatttcacgggttaacccagggaaggcaggggcctattgtgggctggaggctgttgcgggtcacatggtccgctgtgctcctcgtgaccggcagggtggacaagcaccacgatcctgagaaccttagttcctccaatagcaaaagatgggttctgtccgcacgcacttcagtggcagtgaaagggtgggtgtgcagcaagcgcctaccccaggcccgggggtgagaaagcggtggccgtgtctgcatatcattagctctaaggtgccatcggttacgggacacaccattactttatacgccaccaagaaagaggagacactcccatttaaactgcaactctgtgccttgtggttccctggaggcgcgggccccactgccacagtgcttggtttctctgatgctgtctgcagcctaatgggtgggccatttctgctgcctggccgtcgcttgtcacggctcccgggaactgagttcggttggcttcgtccgcctccgggggtcttcctcttgtgaattacgaagtagcggtccttcctccagggataggtatttgcctcaccgatgcaaagctacatgcgcctttctgcgtgcaccctaactttttgacctcacagcgtgactcttcaaagacattttgagtgtccagggtgttgacagtgagggactgcgttggaagtgtcgtggcccaggaggcgggggccagggccggggcctgagacccgccgattgcatcctcagttcaggggttgggaaatggaaagatgcgtgttggggggaccagccttcaccagctctgtgcagaatgtccgggattcatctttaaacctgggtatttttcctttgaaagccctaatctgaaatttcaatgtattaaaagtatttccaagtgttaaagcctgtcatctttacacccgggtatttttcctttgaaaacccctaaacgacaaggtttggagagctttgggttggtgaacaggtgaggtgctgggagggtgagtgcccagagagggcgtggaggctctgcagcccttcccgttaccttgccctgcccatccctcccacgcggctgtttgaaagcagggattgggagcacatggaaagtagggtgtcttcacgtttcatgcaaggcttgtctaaggcttgctagtggccattctgattgggacagagcttctggacatatgatgaaaaggggcttgagagctgtgagcatattggtatgtatttacatctgtctattttatgggttatagtacaccatcgccagtcagttgcaaatgaaacctcaggttaagcagtaccgcagatacattctacttttccatctttctgttcttgtaccaatattaagctgtgtttattattagaactgtaaggctctaatagtcaaagtattaagtactttgaagctttgctgtccaatacagtagctataagccacacaaggctattgaagacttaaaatgtgtctggtctgaattgagaggtaccctgagtataaaatatacattggatttcagagacttcgtaccccccaaaaagaatgtggaatgtttaatagatcattttaaagtattgattacaggttgaaatggtaatattttgggcatactgggttaaataaaatatatttctgaaattaatttcacctgtgtcttttttttttaaaaacatggctacatataaagctcgagttctatttctgttggactgtgtggctttggaacatctggctggatacgtccccctttgctggtattctcttacaaaattttcttggctggtcacatatgtttattctttcaaatgaattttagaattgttttgtcgggtagaaaaatccctcgtgaatttgattgatagtaaattaaacttagaaactaattaaaggaggaattgacataatttacagtattcatcaggaacatagtatattttttcagcttatttcattctgctttgatgttgtaccatgaagtattatatatacatatttttatacaggtcatccatttttaaaaatcaggattatttcaaggattttttttctttttgccattgctcattgaatactttccatctattggtacacaggaaggctactgatttttatagaactatcttttatcaagcagcttgattgaactcattaattctaatatatctttgtggagtcccttgggttttctaggtatacagttgcactctgtaaacactgataattttggatcctcatctccaatctgcaccgtctggaaccttcagagcgatgttaagtcacagccgtggctacacgcatcctcatctgtgcctggctttaacggcaacgcccccggtatttctctgcttaatacagcgcttgctgtggattaagatggatttcatgtgaaggcaatatcctctgaattctcgttttctaagatcccatttttatcagtaaaggagctgaaatcaagataaaatgtgtcttaactcttaacgctcccttctctcacctccaaaagccagaggtgttgcgattccggggtgtttgtgttctcagcctcggcctcagctgtccactttgctgggccaggaatgaaacccagtccccatttacgcaccatgggaagccctcgtagggaggggcagccttcctgcagaaggtgggggagccagcacctcccggccacgcgggtgacttctggaagaacaggaccctgttcttggaaagccctttgggccatgtgtgggggcatttccactttcatctgtgggttctttcttccctcccagtggcgtctccctccctctgtccagtttctctggagcaatccctccattctcctcctgtgtcttaacagcggactttgcccgctgctctgaggtggtggcactgtctgcagagtctcctgctcttccagtcccactgttatctgttatcccatgtgcttctagaaggtgtttttccaagcaaagacatttccctccttagaagaaatctgtaggcggggcacagtggctcacgcctgtgtaacttgaggaggctgaggcgggcagatcacttgaggtcaggtgtttgagaccagcctggccaatatggtgaaaccccatctccattaaaaatacaaaaattagctgggcatggtggcacacgcctgtagtcccagctacttgggaggctgaggcaggagaatctcttgaacccaggaggcggagcttgcagtgagctgaaattgcgccactgcactccagccaagcagcagagtgagactctgtctaaaaaaaaaaaaaaaaaaaaaaacagaaaaaaaccaaatctgtggcttgtcttgcagaagagcatttccattgtgtgatctctctgcctgcccactgatgggcatgggatttgaggagctttgcacagcatctgtacataggccccatcctgagagattctgctttatcagacctgcgtgagccctggggtctgtacttttcaaaagctacacaggagagtcttttgtacagcatgacgggtgctcactagcgagggctgtggggagtgggggctcacagaccagacttggggcctggctcttctcttgctggcctgtgaccctccattttcccagttaagacaccacctgcctcacaaggtgtgtgtcagtgagggagcagagggggatgaggctggctggcctcagtcaaagggaattccatggggggcttgaggtggaaggaagcgatggccagtgggcatggcccggcttgggatgcgggaagctgccacagcggtgtcggctcctggccctctgctctcgggtctctcacctggaaattcagagccccggcagaaggaaggcagccgccgtcgcatggctatccccaaggccacacagtagggaggggtcctcacaggcaagcgggcaggataagggggtgagggctcccagggcagtagctggcctttgctgcagggctgtccacacttggcggccacctggagctccatgggcgttgagcactgatcctgcagacctgatcagggcaaggtgggggcagtggtaggcatcctccttggtgctcctcagtgccctcccaggcaggtgcccaggccctgggaggctcctggtctcctctccttcccttccttcccctcccttcctctctgcactcctccctcccttcctctcccatcccctccctccctcccctctgccctcccctctctgcacgatggctggccactggccactgatcccagcacactggccctgagctgaggtctgggcttctggggcaatgcaggttgggtcacagactgaggtactgtctgagaccctgtgatagtgggaaattataaatgtatgtttgttcttcatctctggttcctgcctcagagctcctaaaacctttgtaatttcctgagtgttaagggtgatagaaacaccttttattatcagatttggtctgagtccccttgttcctgatataagagtttctggattgttgggttgagaattcagcctcacttccccaacctctggggatgggagtcatggaacttccatgaaaacccctaaatgacaaggtttggagagctttgggttggtgaacaggtggaggttctgggagggtgagtgcccagagagggcgtggaggctctgcagcccttcccgttaccttgccctgcccatccctcccatgcagctgttcctgggttgtgtctttaataatcaactggaaatagtaagtaaaatgcctccctgagttctgtgatctgttctattaatgaacacatgtctgtctgattccaaggtcacagttacttttgcaccaacctaatagcaaattacagaacctgaggagggagttgtgggacccgcccaatttatagccgcctggtcagaggcacaggtggaaagctggaacttgccaccgcaagtggggctgctgtgtgggactgaggccttaacctgagggctaagctgaccccaggtagttggcatgagcattgcactcaactgtggggcacccagctagcgtctggaggttggagaactggttggtgtgagggaaaccacatgtttggtgtcagaagcattgtgagtgaaaacagatcccagtggacctcacccagcctgggggctctgatagaacaaggggaggtcccagaccagggctcagccctgccgacagggagaaggcctgagtttccagaacagccctaaatgcagctgcagagacaactgtcataggacggttgtgctgggtcctggtgctgggagcccctccctcccttccccctcctctccctcccttccccctcctctccctcccttccccctcctctccctcccttccccctcctctccctcccttccccctcctctccctcccttccccctcctctccctcccttccccctcctctccctcccttccccctcctctccctcccttccccctcctctccctcccttccccctcctctccctcccttccccctcctctccctccagcttctcctccccttccctcctctctcttcccccttcttttctcattcctctttttcccactcccctcccttctcttctccctcatctcccctttttcccttttctctccattctccctttatgtcctctcccctccctgccccttctgtcctctccccgttcccacctttctttcccagagtctttcatcagccaggactcctggggacccttcctggctgggggcccttcgtcgtcagctgcactctgcacctgtaccttcctggtacattctgggaaccaacaacgagccatcccaatgtgctgggaggaaatcagggcacagcgatggggatgacccaccccaggtcccacagagcccagagccagctcctttcactgcagctggagcaccagatgaaatctgtacctcctcagaggtacagataactccccacctgtacaagcagggtgaattgctgaaaaggggaattcatgtctcctctccttggcctgctactgagttcttggtgcattttctagcaaacaaggtcaaggctgagtccctgccctgccagagcatcctccacctcagatagggcggcttggcctttgggctgtctttcctgttggggtgcccaggctgtcacgggctgtgtcctcactggggagggtggcccgatgagcagggctgctgggaaggttgtgcaggtggtgtgctgggcaaggtggccaatgaggccagcctttgctccgtctgggagtgaatggagtggaggttggagggtgcgcagcgctgggtggagatcacgggcactgggggaggggaaatgtgtgccaggtgtctgcctccacagtcaggttgccagagttgctgcgttcttctctttgcagagcttctgcattctcgggactagggacattaaaaaccaaagccggggcagttgcagggaggctgctggacattgcaggtggccctgattggggcagtctcagctgtggtgactacgctgtggcctttggggccagggatggctggtccaggactgggcatggtatggggtgggtagatgtaggccgtctctgtcttggtgtcagcctgtcctgatagactctgggggctcagagtcctcacagccttcccccaacctgcctgcaggtgcccacctggctccccaaggcctgcaggagtccgctggggctgggctggcctgggacccttggtgggagtcaggcaatcgtgttattgttgaaacttgtttcctttttttttttttttttttgagacggagtctcgctctgtcgcccaggccggactgcggactgcagtggcgcaatctcggctcactgcaagctccgcttcccgggttcacgccattctcctgcctcagcctcccgagtagctgggactacaggcgcccgccaccgcgcccggctaattttttgtatttttagtagagacggggtttcaccttgttagccaggatggtctcgatctcctgacctcatgatccacccgcctcggcctcccaaagtgctgggattacaggcgtgagccaccacgcccggcctgaaacttgtttctttaatggctggtggttacggcccccaactttcctcctctgaagctgattggttctccctggggctagtcattaaccctctgctagcttgggtgggtttatatttgcagagcttccttttttattctgccgggctggtgttttgtttcttcggtcagctctgtcagcctctctagttgctttcttctggttactcagcctgtagaaaagtatcagcctttcaaagaaatactccattatatgttttgcttttttcctgacttgatttttaaatatataactcctttaattcaagtgaaatgtgtttcttatactgtataaggtgttggttttaagtgttcatttttttctaaattgccatgctgttgtctcaacaccattcgtttgctaattcactctttcttcttgactttggaatgtatattccatcatctgtgaagttcatggaggatatggggtttatttctggcctttctgggttttgttttgtttttttttttttttttgagacggagtctcactctgttgcccaggctggagcgcagtggcactatctcggctcactgcaagctctgcctcctgggttcacgccattctcctgcttcagcctcaagagtagctgggactacaggcgcccgccaccacacccggctaattttttgtatttttagtagagacggggtttcaccgtgttagccaggatggtctccatctcctgacctcgtgatccgccctccttggcctcccaaagtgctgggattgcaggcatgagccactgtgcctggccttttctgtttttcttttgcaccagtccaggggtctttaattgctgttggttgacaatatgttctgacatctgatagggcaagtatcaccatcgtgaggttttaaaaaaatgcctaaagtagtgtcccctttgcagaaggccctcagcaaatctttgctgaacaaatgaacgacatcttcatgatgtttaattttctcacggaaataagaagattgattcagatgtttaaaaacatagcccagtaggtttattactaagagacttagaatgttattgccattgtcaatagggtcttttccattatattttacaccagattgttatctgggaacacttttaatttataatacagtaggtgattatttactcagaatacctgggacctgcttctttcagactaatgatattctcagaatttagacatctttattcccagggagaaaacagagttaaaaatgacacattagtgcaaatcatacatgcatgtgcagagctgccacgaaccacttgatacccatggttgacctggcaagcccaagccccagcattgctgtcctcaaggcgcgcccttcctggcaacagcccctgcttcagatcctttgctcccaatgacctgcatcttcccatgtcttagcaaagcagtctctctgttactagaatggcacaaatatgaaccacagataatcacaaaaagtccttctgaaataaatctcttgccgggtgcggtggctcacgcctgcaatcccagcactttgggaggccgaggcgggtggatcacgaggtcaggaaatcgagaccatcctggctaacacggtgaaaccccgtctctactaaaaatacaaaaaattagccgggcgtggtggtgcgcgcctgtagtcccagctactcgggaggctgaggcaggagaatggcgtgaacccgggaggcggagcctgcagtgagctcagatcgcttgcaccactgcactccagcctgggcgacagagcgagactctgtctcaaaaaacaaaacaaaacaaacctaaatctctcgcttggatgtttcccatgtttgcgttcccagatatatgagtttctctatttattttgcatctagactttttatgaacttccttgttattatttggttcctttttttggatgtttttgggggtgaggattctctacgtgtgcagttactttctgcagttcataatattgtctcttctttttcaacatgttttcgttttatgtctttagtaattttgtgtgggagctacaaccatgccttcagagcatctagccccgcttctaagggaattgagaaccaggtgctgcttcttctgtgaatgctggtggtggtagacccaaagtggacaaaccttggcctgaatggatctcccaggcccatttccccacggtggcacggctttcctttccctgctctcttgcatcaagtagagcttcgaacgcaggatgtgcccatgttgtggttttatggggatgagtggcggcggttgaccttccctttcagtcaaggaggctctctcagtccctcgtggtctgttaggtgtcccctgtggttggggagcagtgcaccgggcatgcacagggttgtttgcaggctggcaggaaaactgcggtctttgaaagatgccctgagtttctacgggggatgtggttcagtgagacactttcaggagaaggctggcgagtagattcggtggtacaacctggagactctatgaatgtggactgaggagccctgttttgagtccctgccttacccttcacaatgagataattttctgcacttcagggttcccattgtgcagggcggagtttgcacactggtgggccacgggccatgtccacccacagatgagttttgtttggcttttccagtgtttgaaaatttctcacaaagctcaagatttccagtttctcttgagaaccaggaaatctgccgggcctatgtgctggagggctagagctgagcaaggatggaaccctctagaagggtcccacagttccaggtgccttgggagtctctgctgctccctatcattaccctggcgggcttcacgcgcattcactccctgtgtaggcacctgagagtttctcttattttgagatgagtgctgcatgggctttggaacggtcatttcttcctcccctctctctccctctccctctccctctccttcccatgacttcagtttttggccatcagcccctgcaaggtcccgtgcgctggagtcagacgcgatctcgctccaacacgtgggcttggttttctgctccctccctccctgggcgagcgagcctcctgtttctcatctgtgaaaggtaaaagctgatgacggtaactactctggtgggttatgatgaggattaaatgaagcgagggccagcactgagcagcgaagggcctgttactacaagatcatattttcctgatggcgctgctaggagggaccacagtgtgaaagcgcttggacacacggagccaggtgcagattttgtcccttttgagagctctgtgggcggggcttgggcgggcatgggagtggggggcggggccgggggcggggcacaggccggggtaggatgctctccctgccccaggcatcaccggcctgggatgtgttgccagtggaggccgttactgttctgaaatggaattcctgggtcagaataagaacagatgtttactggaagaggccaggagccgctgacatcaccgagagcccctcaggacatggctgaggccaagggtcctctagctcttcccgccaatacagcattcctggggcagctgcccggctgggggtggacacacacacacacacacacacacacacacgcacacacaaacgccatttctccaccaaatccttcccacctgaaaacaattagtcaagatgcggaaaagatttccagtctggaatgggagaagagtctcgtggcgggcaggccccaagaagggaaatggaggtcagtgtggcgaggggatgtgcaggacggagaggcagcctttgttgggggagcgctctgatcccttcctccgcacccctcagctgggaggacttggccgcctggccgttctcctttgggagtgaatccggagggtgtggcccagaggcggctggcctcgctcctgtcctcccatccacacctgtgcagctggtgcctgtgcccctgtccctcccacaggccatccccaggtccacactcctgtgactgcaagtgacagaaaaccggggcagaagcggctggggccaaagggggaatgcggggctcagggcggcagcccaggcctcccgcacggtttcagctcagccgccctccccgtgggtcctgcctgggcagtgcaccagccgcccggcagagagaggcccaggttccccgagggtttctgggagagcccagtggtgagttctcactggctcaggttgggtcacatgcttcaggcaaatcactatggccaggacagcggagcaggacttcggctggccaggcctcgtcacaggactgctgtggctccagggctggcgtctgtcctctgaccctctgggagtgggtcggggagaggatgggccccagaggaaagccaggctgatgtgtcaggaggagctatgggtccccattgccttctgtctccaggacatctgccctgtcttctccctgcccccgtttctcccactcccttccagctgcccatgataagcacgcggtctcccttccgtgccccacccgaaatgctccccatggctcctccactttgagggtaaagcacaggcccccagaaccagcattcaaggcccctcctgaccatcatcatttcctgcttgctctacccaccatgtccaccttcccgttcatcctgtgggcctgggacaggagctccgaaagatcacacacacccatcaactgtcaactctgcccacgttggaaacagtgcctgtggcaggtgcaggaggggaccatttgtcttggctgaagttgaatctgaaaatgacctaaggacttgaaggaaccagggcctagtgtgtgtcggggtgtgatcgggtggctgaagaagctgagactccttgggcctcatgggctttgcattagcagagcagacagtgggggggtccctgaggacctctgggcttttgcctgaatgctgggaaccccataggcctggccaacttctcatcacccctcttccagcaaaccttcctgtcttctgtcctggtagttagcacagctgttccatgtcgtgaaccctcctgccagcctggtgaggcccatggacccctgatcaaaataatgtgtttagtgtacactacaaaatacaaaggaaataaatctgattgaaataaagctatcggccaggcatggtgcctcacgcctataatcccagcactttgggaggccaaggcaggaggatggcctgagctcaggagtttgagaccaccctgggcaacatggtgaaaccctgcctctactaaaatacaaggaactagccgggcgtggtggcgggcatctgtagttccaactattcaggaggctgaggcacgagaattgtttgaaccctggaggtggaggttgcagtgagctgagatcgcaccactgcactccagttggggctatagagtgagactctgtctcaaaaaaaaaaaaaaagagaaaaataaagctatcaacatacacatgcttttaaaatttttaatcattattataccttacacatttttgataataatgttattgagacataattcacatactatgtattttaccaacttataacgtaaaattcaatgaatggctttagtatgttcacagaatggtgcaaccatcaccacaattttagatcatgttcaagactctgaaaagaaaccccagaccctttagtaacccccaattaccccgtcctcccaggcctaggcaaccactgacctaccttctgcctgtatagatttgcctgttctgggcatttcattagtataaatgaatcacacaatatttgccctttgtgtctggcttctttcactcagcataatgttttcaaggttcatctaggttgcagcatgcatcagagcttcattactttggatggaaagatatgattccattgcatggatgtaccacagttttttaaatccactcatgggttgatggattgggttgtttccaccctttagctcttgtgaataatgctgccaggaacattcatgtaaaacttttttgtgtgcttttaattgatgcattaaataataagacctaggagtgcatcttacagcctctataatttaagttgtgctgagtgtaaacaccatttggtctggtctgcagcagcggtgctgacagttgccgaagcctgtgatttctgccctgacgggcgcaggtgctgttaagtctggggttgctgcctctctccagagttgaagggaatggcagctttcagttcccagttagtaaagatgaagttgaagtgttctcttttcccagtttatggagcccaggttaagaactctccagggagctcccacagggcagtgacaggtcccaacggcccctggcaagtgctgtggcctgtggcaggaccaggtgtccagatcaagctggcggctgttctgcctgccctcagccatgctgacacctgccacgaagcctggtgtctgcttctttctcctccccaaagtattctctctgtccttagcttgggagtcctacagctggagggtggggggcccaggccctcctggactgctgcccctggggccccattgtctttccttctgccaggccatttcccttcgcagctatttagaagggaaggcagccaaaggcctgtcagaagggggaccacggatggattttccatcagatgtgcagacctgctccctgacactggctggctcggtgcctgcctctcgagggcaccaggcctctgtcacttcctgtgcagcccctgccagccatgagacaggtgagggctccttggttttgtggagactgtcagtcttggctctggagtggcctcagtcctaggcagctcaagttctgcctcccgccagtcctgtctgcaggcaggatccagtcctcacgcacccatgctgggcacggccctgcttccacaccgtgctcaggaggagagcgtccactcccaggagaggacttgccaggcacctctccttagggacacctgcagttaggggtctggcgccagcttgtgtgtgagagattaactccccctggtaccgtcaggccccgagtgagggagccgcagcccagagaggcctctttctgtccagtttgcatcgccacatttgggtttctgtcccgcctggcctgggccccacctgcctgcggagctgccgaggccctcgtctagtgccctcccagaggggccttcagtcctggttcttatattacagaggcagccagaggcttccctgactctgtggctggcgcagccttgacaagtcatctggaattggctcacggcctcctcgcgtctcccggtgtctgatgtggcaatgaagctctatttcagggcctgcgggaggacccagcgtggctcagggtttgtcctcaagggagggcgtggatcagagcctgtagtgcggacctgggtgggggagggagaactggaccctgcactccctcctgtgtgaccatgggcgggttatttcacttctctgcactttcagagtctccaccttgagatggccccgtgaggactgattcaaagaaggcacgggccgtgggtgcatcctctgctcctctccccacctgcgctgggtcccatcagattttggcattcccagcaccggcagtcctggggtgactcacgatggctggcaactttttgtcctgtctttaagttaaaaactgtcgtatgtgccttcatataaaacagaatgcagaaataagccaaaaggagaaaatggaaatccctgcagtgccattagctttcaacatttttgtgtgtctcccacgtccatgcacatatgtgtaaacatacttaatgacaaaagggtcgtattgtaccttccctttgtgatctgcctctgcccatgccacatataatggaaatatttctggatcatccagtgttctgccggaacatctttcaatagaggcagcataatctactcaggaaacatggagaggccgggatctccaggcacttgggtctgtgggcctgggggctgagggagaggctgaggaaaagcactccccagcttttgacttgcacagatgggtggtagagaggaagggtagcttggagagagggtttgtcactggggctgtctcttggaaggagtctggcagctggaaatgcaggtcctaggtgcaggggcaaggtctgggtagaattcgggttgggagcgctctgtatggagggctgtggattccacatcctagggtgggtgggcgggcaccaaaggaagagggaggcagaaggggaaggaagtgctccttggccccccaccatgtgcagacaagtggaggaggcagtggagtcttaggagcggggctgcccacctgctaaaggatgagagaggttcaagaggagggggttcagggaattgggatggcagggggcatcaggcccagcagccaagagggggctttgcagggtcgctggggagttggtggaagctagactgaccaggtgaggggccagtgagaggcaagggagtggagggaagctggtgcgcatggcacacatgctgcggtggggcagacatcagctgcggagggtgtgcagtcttagatgtgagtgcagtgtttacgtgtgcgcttgtgtagatgtgtgtgtggccctgcctcgagcacagaggattttaggtggcttgagtttgctcagggaccgaggatgaggatccgggagatggagagtttgaagctatagaagagagagtgtattagtcaggtgttattcctcaagtgttggaaatccaagtaaaagtggcttcagaaaaaagaaaaaaaaacttattggttaatctgcaaaaagaaaaatatctagaactatctagcttcaggtgtggctggatccaggtgcccaaataaattttcagttgttttttttcccacatccccaacccttggctttgctctcctctgtgtcgatttcactctcaggcctgctcttctctgaggcagaaaaatggatgcaggcagctgctgcattacctcctcacagggcaacaacccgggggaaacagcttttcctttccaacaattccagcaatagttcctggatttaacttcatggaataccttgtggcaagtcctcatccctgagctatgttcatgtagtcagatgacaacgtattctacctggcctaggctgggtcatgtgccctccttgcccactggtgacgcagggatgagagctggttcctgagtgacacaggggctgtgctatcagaaggagaagggtgggccaggaacagtggctcatgcctgtaatcccagcactttgggaggctgaggtggacggatcacaaggtcaggagattgagaccatcctggctaaaatggtgaaacctcgtctctactaaaaatacaaaaaaaaaaaaaaaaattagccaggcgtagtggtggacacctgtagtctcagctactcaggaggctgaggcaggaaaatggtgtgaacccaggaggtggagctcgcagtgagtcaagatcgtgccactgcactccagcctgagtgacagagcgagactccgtctcaaaaaaaacccaaaaaaatggaggagggtggactccaggcaggcttagggttcccaaggaagtggctggggccaggattgggagacctggaaggctggaggagggagctgctgcccaggagcacagcaggagagagaaggacacgaggcagacatggagcgggagggaatttcctccgtggcctcccttccctcaccaggcagggcagggacagtgaggctgctgaccagcctctacagctctcctgggagtcggctggctctgcaaggcaaacagaaggctggggaggttgactgatcaccggctgctccaggagccgtcaggctgggcagcaggagtggcctgaatgcagagaagcaagccttgagatcaggcagggcagtcttcctacattaggagtctgggaccaggcattctgtgggccaggccggagatgtggcaggctgggtgtgaacgtgctgaccagtggggacctgggtttgggtgctggggagccaggcgtaatgactgcgggggctggtgaaggctgagtccagtctgcacgcatgcttcctgtggtttctgggtgaaaagagggtcacagctttttgcctcaacagaggggagaggcttctattctactggttgagtgtggatggggagggctgggaggggtaggatgaggtggtagagacatacaataagcaaaaggccaaataaacaccttctcaggtagtggcaggaactgggaaagtaagcaagcaggcagtgaggctgggagcagcaggagggtgtgagtgagtgcatgtgtgtggctgatgtgtgagcacgtcagtgatgcatgtgtgcaaatgtgaggcatgtgtgagtgcatgagtgtcatgcatgtgtgcacatgtgtgggcgtgtgcatgtataatgcatgtgcttgatgcatgcatgtgtgcactgcatgcctgtacatatgatacctgcatatgatacacatgtatgaccgatgcacatgtgtatgtgtgggtaatgtctgccatgcacatgcatggggcatttttctggtgcatgtgtgtacttgtgtgtagtgcacatgtgtggacatgtgtatgtgatgcatgtgtcacaggagatgcacatatgagtgatgtgtgtgtgcatgcgtctgcatggtgcctgtgtgacgcctgcgtgtgagtgcacacgtggtgcatgtgatgcgtatggacatttgtatgtgggtgcatgcatgctgcatgtgggagtgcatgagtgcacatgcatgtgtgtgggggcctgtgtgttgagggaatagctgttgggaaccctcagtcataacagggctgtgtgaaatcttcagctggaggaagacaggagagaaatagcgtgcagctgtgttcctaatggcacacacgccccttgcccagagtgcatggtggaagagggctttctggcccagggaccagctctctttgtggcccaggcctgctgcttttgggctggggtctgaccttcctggaagacccttcggggccccgcctctcagaggccaggccccaacgtctcaacgctcaaacagcgacatcagtgtttcccccaggggagtcatcctggggaggctcagctccatcctgagccgagggggccttggcattgccccacctgccctggtctgagaaggagctgtcctctgcctctctgtggtctcatggggacaaatgccagccactggacagtggcccttgtcgtcttctaactgtcaagattccaaaaagacggaggcgaggggtgtgcgggagcaccctctgcgtgtgcttggcttcttccccaccagccttcttgtgagagggctagaagcagctgtcccactttgcagtgggccctgtccctcctggcagggcagctgtggccgtccctggctgtccccgccccgcccggcatctccttctctccccatcccctgtctagctggccccgcctctcctccctgtcttgctttagtctcatgcctttttaatgagggctcagcctcctgtgtgctgaggctcagcggcagcgcatttaattaatactctcgcatcgcagttcttcagagtaaatgctgccattttattcctcactaattggaaggggctagttaagctctgagataaatgaccctttctgctgggagtgtctcagctcagagtctccatgagagtggctggagccttggatgggaagggcaggagggctggcctgctgtgttcctcctggtccaaggggggcctctttgctaatggccagggtagagacgtggccagggtgaagcctgcctgacctttggggaggacgtgcaggtggaggctctgctgaccagcagggcttcagattcatcactgcccgttcctcatgtcccggctccaccccagccctggatgagccccagggaccccagggaaccttcagtctgggtttccagaacctttccctggcccagtctacacctgcctccctccctcactgtggaccagccccacctctaccctccatcctgtacgtctgctccactctccccagctggcgatgagtctggccagggagtctcagctggtgctggcacgctaacctcccctagacgcgtgctgaaatgtacacgtgtgtgtgtgggtgatgtatgcgatgcacatgtgggggcgtttgtgtggggcatgtgtccctcagcacacatatgctctgtgcccgctggccatccgggggacatagattacaccaacactgcagtgctgctggccacccatggtctgggcagcaggaagaggtgcaggagtccccacacagtgtcgctgggatggcctctgggtccgtgcttatagaagtctcatgagtgcaccctccgcccacctgctcgcatctctctccctccacgaggaactgtgctgtggcctcctgggtcttcaagctcctttcctgttgtgttggtgacaggaatcggggtcagaagggcagcgtccgagcaggcttggatgagatgtgtgatattgtgttaccatatcagcgactctgctagctgagtccatcttcagggacaaggatagctgtagccagacctacgcatggatttatgaggaactaccaagaaaccactgggaggaaagacgccaaagtgctgaggaaaaggatgctcagaggtggccctgctgccagctggcagagtgacaggagggctggaggctgtggggacccaggccacgtggggttggggctctgggctttgtccttgtgttcctgtaattgtctgttgctgagaattagctggaatttctttctttccttcttttgttctttccctatcctttccttcctttcctctcttctttccatcctttctcaccactgtgtattctttttaaaaaattaaatatatttcctttttttgagacagggtcttgctctctcccgggctagaaggcagtggtgcaatcgtagctccctgcaaccttgacctcctggttcatgggatcctcctgcctcagcctccaaagtagctgaaagtacaggtgtgcaccaccatgcctggctaattttttaaatttattttttgtagagatggggtctcactatgttgcccaggctgatcttgaacttctggacttaagcggttcttggcctcccaaagtgctggaattataggtgtacaccactgcgtcccgtccccacttcatgttcgacagcagttctccgtgcctgctctgccctgggccttgctggactggggttgaagaggcagccttctgttctcttggagctcacaggttcctggagggacacagcaggaaggtctcaaatgccatccctgggagtggggagggtgttctgtggggctggggagccctagggggcctaggcaggagcctgggatgcccacatgcaatgaccccctgagctgtggccgactccccagccctgctcctgagggccctgctgctctcagcatctcccagggtgtcacccttctgggttgctagatctctgctgctctggtgtggcctctgtccctgccgacccctctgagggacacagctgtcctctgctgcggtggctctggcctcggaatggggcagcctcttccctccaggcaagagcctttgaattctttgccagcaggacttcctgggctcttgtctcccgtctgctgcccggtgcccacgccccagtctgggacttggatgtctgcctgctgcctccctgtttacactgatctgatctgctctttccctctgggagcttttgaactttctctttgtctttgatgttcttaggtttcattatcgtgggtctagctatggagctttttcttatatatgtattgataaggcctctaggaacccatccatgctggaatctttcatgtaattttgttttttgaaatattccttctctcacctccccgactctcttctgggacttgcccacgtctcgcagcttttctccctgccctctgtctcttgctcctttcttagcacacagcgagagctctgtccagatcccccagttctgcggtggctgtggctgttcagttcctctgttctgctcttcggtgcagccaccaagccctctctccagtggcgtttgtgctcagcagctcctgggggcggccagttcctgtggccatctggggctgtgctttgtctctggaaggatcgttgtttcagttttcctctgcgtgccatgggcggtcctgggtacggcgtctctagaacgtagtacctgcgccactcagatcccagctcgtgtccccggaggtggagactgtggctggtggtgctaggagggctcatgccagcttctagctctggcttctcctcgtgagcgggacaagggagatgggaggaaagtccccagagatggcttccctcccacccaagctctgtttcctgacctgggatcctggctcccaatggtgggaaacaaaccccctttggggacacccccacttcactggcaggagtgcagtcagccctgggatcccgacatgaccttcccaaagcactgtggcctcagtgctttccagaagccaactgtggcctcagtgctttccagaagccaactgtggcctcagtgctttccagaagccagggtatttaatcttgtccatggcgacgtggacgcgtgtcttgggaggagccctctggggtggggcagaggctgtgttaggtgggagggtctgaggcagggacccaggaggaacagaagagagagagtgagtgaggcctgctccatgcaggggcagggggaggaggaggccggggtggggccttggggattgtggggggggtgggtgtaggaatccagtaccacttccaggttccttccaggcttgaataactgggagaagggggcgtagctggctgtgattaggctctgggaggggagtcgcttaatgtcaggaaagagagttacttctaggtaggccctgggcttgaggctcccgggccatgctaagggacattcctatgtcccttgcagctcttggttgggcctggcacaaaaaagtgtgtgcccaagactcctgtctgtaggtggaggtctgctggagtagaggttgggggcactggcgggggacaggagccccacctgggtgcaggaaggctacaagggcttggtggaagagcgtggaagcccccagaatcaggggcttgtaattctggcccgtcaccctgtgggacaagcacatgggcctctgcatgctgtctcacctcatctgtaaaagggagacagtccagtgaggatgtgggcccgtgagagagagacacggcccggggggctgcagaggcaggagcgctgtgggtgggagggctgcttcctgggctctgagtacagcacggtgcatttactactcttgtctcaaaaagcagggaaaactgagtattccggccacgccacgccacgccacggggtggggaggagcctggccttgccgctccctgcactctcctctgcgctcacttagctcagagctggcggccgcccagctcccagtgagacgtggcagccaggaggctgaggcccagccaagccccagatggctggcgagaggtgcttcccccgagctgagcaagacaaggacagggccgacccggtgggaggggcaggatgggaccaggagcccgggaaatgccagtcctggccctggccctggccggtctgtgtgctcccaggctgcgcccaatccgaagcctccgtgtggatgcagagcctgaagctggaggtctgggcataggcaggggtgtggggtgtgtgaggaacccccccgccccaccatcaggttctgcctgggaactcctggtcctggagctgacacccctgctccggccaggccctcctctgtctcggtgtgagtgtgtgtgtgcacgagtgtgaatgcgtgtgcgtcccctctgctgacacccctgctccggccaggccctcctctgtctcgatgtgagtgtgtgtgtgcacgagtgtgaatgcgtgtgcgtcccctctgctgacacccctgctccggccaggccctcctctgtctcggtgtgagtgtgtgtgtgcatgagtgtgaatgcttgtgcgtcccctctgctgacacccctgctctggccaggccctcctctgtctcggtgtgagtgtgtgtgtgcacgagtgtgaatgcgtgtgcgtcctctctgctgacacccctgctccggccaggccctcctctgtctcggtgtgagtgtgtgtgtgcatgagtgtgaatgcttgtgcgtcccctctgctgacacccctgctctggccaggccctcctctgtctcgatgtgtgtgtgtgcatgagtgtgaatgcgtgtgcgtcccctctgctgacacccctgctctggccaggccctcctctgtctcggtgtgagtgtgtgcatgagtgtgaatgcgtgtgcgtcccctctgctgacacccctgctctggccaggccctcctctgtctcggtgtgtgtgtgtgcatgagtgtgaatgcgtgtgcgtcccctctgctgacacccctgctctggccaggccctcctctgtctcggtgtgagtgtgtgcatgagtgtgaatgcgtgtgcgtcccctctgctgacacccctgctctggccaggccctcctctgtctcggtgtgtgtgtgtgcatgagtgtgaatgcgtgtgcgtcccctcttcacaggccactcctgaggagggagccccggtaaggctttaggctgctggctggttctggggttgccatgaagtcctgaaatgctattctattgctgtttcttgatgtatcgggtttcgatgttgtccattgacttcctgccctggaagaggagggtttagctcactgacaacactgctgcccctcccagccccattcttctaccataattctctcaccacttttagtccatatcagagttccccattgtattggtttctgaggctgcctgcaaattactacaagcttgctggtttgaaacattagaattgtatcctctcacggttctggaggctgaaatcagtttcaacagggcaaaacgcaggtggcggcagggccgcgctccctccggagcctctaggggaggatgcgtcctgggctcttccaggtcctcgtggcagccagcagtgcttggcttgtggcctcttcgctctgggcttcagggccgacatcctccatctccctctgctctgcctgtacgtggccttctcctctgcctggctcatcttgctctgccttcctctgataaagagaagtgtgattgcatttagggcctgtcttagtccatgcaggctgctatagccaaataccataaacggagcggcttaaaagcatcggaagcttatttctcacggttctggaagctgtgcatatggttgtggtgagggtctgctccctggttcaagaaggcatcttgttgcatcctcacatgctgaaagggtgagggagctctctggggtccctctgatcggggcacaaatcccattcgtgtggatggaatctggtgacataatcacctcccaaaggccccacttcctaatatatcaccttgggggagtagctttcaacatcggaatttggggggaatataaacattctgtctatccctgggcccacccggaaaatccagcagtcactccatctcaggatccttggactcaccgcatctacaaagttcttttttgccatggaaggtaacatttatgggttccagggattgggacccggacgtgtcttcgggggccatttttcagctgaccactgccatggtcgtctgactgttatatttgcacctctgcagcttctaacattagcctggggcagagggtctagagtatgcccttagcggcacagggttcccatgccccttctccctcctccccactgctgtcatttctaccttcccttcagcaaggcagagtgttgttaaatgaaaaatgattcaatgatacttgttaaagcgcggtaaggcggactttattcaggaccatggagatagacacaggaaccgctagagtgggctcttgcagtcggggagagagactgggctcaactccgaatacagcacgggcgagtggggggtgatagccaaggagcagggtaggggccaggggatggggaattactaagagcaacatcaggggtcggggattctagctaaactcacctaacatgattctagctgaagacaggctggggtgaccagacatcaccagaggggtgatggggaggacgagcctgaccagatatcaagggtgatcagatatggagagatggggcattcatgacttagcagagttcttgataaactggatcttacaaggaagtgggcgaaggagaaggttcaggagctggactaaagtttggtcaagcaggagagtccctgtcagtgtccactgttcaggtcctttgttgtcattgaggctttgctggcaggtggatgtccctgtgattcttggcatgctgctcaccactgtctgaccctggcccattgctgtgcctctgagccaggcggcgcctgcccatgggctagagagagcagagtggaggggcatgaccctgcacaggacagagctggacgaggcccttccagagaagtggccagccagaggccagctccacctgggccaggagcgccaggccctgggggagagggatggggacgtggccttcctgttcagagggcgggggaggctcggcctcagagtgaacatctgctgaacatacgcatcctccccttatataatgctgtctggaaaaatggtttcctgttgttgttgagataggagtcaacgggccctgcactcggtgggttggggggtggggggctggggagtggagagggtggtctttggctccaacctggggtggaaaggggcggaggtccagaggacccagccggcaagtgggttggggcaggcaggggcaggtggggttgggcaccctgctgagctgctgtcctgggccatgcctccctgacccctgcagtttggccatggtctggggtggtggccctttcactgtccccaggaggactaaggccctgatgcctctgcgtccccagggcagggcagtagggcctctacacccacctttgagggaccctgggaaggtctagagcagtgtgtcccagacttcaatgtcatcagaccacctgggaacttgccaaaatgcaggttttagttcagctggtctggatggggcctggattcagcatctctaacaagctcccgggggcccccaggctgctccaggccacattttgcatagccaggctctgcaccaccatccctcaccccagccgggattctagcaccggtgggtggcccagagacgccaatcagattcttctgtggacttgaacctctccttgttcctggaaatcctgagatatttaatgaccaggggagccctctggggctctctaggccatactgtaccctgcaaggcagcctatgggggggcttcggaaaggcttgtagatgcctcctgatcctccagcttggagctggggggctgagcccccaaagacaacaagaccagttctctgtctttcttcactgtgtttctgccttgtggtatgagcaaggcatgcctagatccctgcccgctgggagctgcagcctggtgggggaggagggccgtccacaggcccccacagcagacagcagagcatctcagcgcctgagcgctgtggggacatgggacgtgcagggagccctgggcaggcgtagtccggggtggtctctcctggagggtcctgggtgacaggaaggagcagtcaaggcatcaacctgggcagatccacaggacattcaggggcacccttgtctgtccccagggccgcaggctactcccaaggcctccctgacttgaaccccagaagccagagggcaggggtggggcagggaggacaggagggacatgcagtgggggcctgctgggtccagggtcctgccctgccctgaggcaaacccagggtgttttgccctcagagctcctcccctatgcattttaaatagaagaaactgaggcacggagaggtgacccacccggtcaagtggcagggccagagcctttttttttttttttttttttttttttggagactgagtcttgctgtgttgcccaggctggagtacaatggcatgatctcggctcactgcaactccgcctcccaggttcaagcgattctcctgccttagcctcctgagtagctggggttaccggtgcgtgccaccatgcgtggctattttttttgtatttttagtacagacagggtttcaccatgttagccacgatggtctctatttcctgacctcgtgacccgccccaccttggcctcccaaagtgctgggattacagtcagccccagctttctgcagtgtctggagggaccaggcttcaggcttgggggccgggctaggaagctgtgcacagttagagttgaaggtcaggtctgggtcactgttgccaggggagcaggtgtctgcagacatctgactgggatggctttggggggacatcctgtgacctgggtcccgaagaggtggcctttctccagctctatccaccaatggccccaggcctgtggccactgaaggcagaagcagtgggactgggtctgccccagtgggtgcctggctgaagtctccctgcacaacccttgggaggcatgctggctcctaactggcctctacccggggaacacagagttttcaactgaattggtgtttgcgcctctctgctgagctggcccatctctccatgtagcttcctgtggatggcgcagctgcagaactccagtccacagtcaggaggcacggggctgccagggcagcggaagagacccaagggcaggaacgcccgcctcagccctcttcgtatctttccctggacccagggcctcaccatggcctggcctgtcctcctagaagaatggctgaatgaatgggcagctgagggggatgctaaaggcagggaacagtaccccgagggcttcagtggctgtctggctcccagctggcctagctgcatcccagggcccctggggtgggaaggaagaggaggcagaggggccaggaacctgcaggagggtggggttccatggcagcccgcgccctgcttccactcaggacgccagccagattcatctgctgggacaccaccttaggaaggaggcacttctctgagaggccttgggaatttcccccaatccacatacacatgggcatcatgttgggagaaactgttttgcaaatacaattaaaaaggatcctcccaaagttttgcctagaaaaaaaaaatgaggctgtctattatgggggcctgcaggcatggtcatcgcattgcaggagctcctgtgggctctggtgcccctgcacccttgctcgtgaacagtggcggctgcccgttcctgtcctcagcctgcccaggggctgcgcggctccccttccagctggcgtgcgtgacctttccagctggcatttcgagtgctctctctgggcaccgctgagctccacggatccccaaggcggtcatttgtcagatggtcctggtgactcccgacatcccatcagcgtctcctgctgctaagacaattgtgtcagacaactctcagcgcctgtcttcccacctccaccgagcagcctgaatgctttactaactggggagaaatcagagcaccggatcctccacttaaacccctgttttctccttgttgtcgctccagaaggcggcaaacttggcccactctgcaccacagggaccttggcaaggaaaccttacaccatcctgaagtaggggaagggagcctcgggagggccggcgacctcccgtactcaactccatgcctgtgagatgccaggcactggtctggtgacgtggacccagcaaggacaactttgctctcgtaagatccctggtcagggggcagagagtgacccaataaagaacccacgtgtcgatgattgggaaatggtgttacaaaaaaataggacaggatggcagtgtggagtgtgatggagaagggacacccttcaccaaggtccttgtgaggaggcatcggagctaggacctggacttctggaagaaggccattccaggtggaggcagcagcaggtgcaaaggccctgaggcaggtgctgagttgaagtgtgccaaggacacagaggagatctccacggctggcacttgagtgaaggagaaatcagcggggaccggggcagtcatgtggtgggaagccgctggagggctttgggcaggcagtgacaggtctgagtcgtgtttcagagattctgtggggcagccgtgaggagcatagagaatgaggtcacaggcttgggacgcccgggctcccagcctggcatacgtgatggtgctattagtggatggtgcagcatgacccgggaagcccctgcgtggtggtgccccccggaccgggctgttgaatgctcatgggcagagctgcttctgtgtcatggagctgtcctggagtgctgagcagtggccacccagggttggccgggtgctcgagccctgagagggccggtggacctcctgtgggccccaggtcttgccgtccctgaaggctgaggcttgcagggtgcgatgctctcacagcactgctggggcagatggcggagcacagcagggcaggggcgcgtgggccggggcagctctgcagtgcgggccccctgtgtctgtctcatgctagcagggcgagggtctgggccgggcttaggctggctggccactgacttccccgagaggttcttcttactcggctgcccctctactacgtgctggcctcacctccaaggactcaggcccagggttgatcctgccagggccacaacagatgtgggactggccctggtggccaattccccacccagcagaagactgccctgccctctcatccctcaggctgtgctcctgtcaggcctggtcctggaataagagccatgtcctcagagcctgtgggagcacttggtgctatgagactcgatctcatggagttgcttccttcctgggtgtcctttccctggttgagttcatctgcctggctctctgctggcaccgggcttggcactggagatcaaagcttcatgaggctggagcaggagggcccccgcttcccctaggctttaggggccagtcacccttcctggacatccaccttccccaggaacacgggttttggggaagctctctggggccctttcctgccctggcctgagggtctgtgctgggtgctgggtgtgtacagaggtgctgtctaggactcaacccaaggttgagtaggagtcgtgaaaatgctccttattttaggggaaaacagtttctcaggatgcggtattgtgttagctttagtttttttgtagatattcttaccaggttgagcacgtttctttctctgttagttgagagtttttaatttttagtcatgaatgaatcatatcatatggttttctctatcacttgatataagcatattttttttccttcttcagtctgttaatatgctgggttacactgacttttggatattgtgccagactctgcaaatccaggacaaacatgacttgtctgttgtgcactctgctgtttatacatggctggactagacttgccagtgttttgctgaggatttttgtgtctatgttcattgagggatattggtttataggttcatgagggatattggtttgtagggtttttttttttattgaactgtctttgtctggttttaatatcagggtaatgttgacctcataaaatgaatgggagaattggtgccattttttcctgagaggttagtagaattttccagtaaaaccgtctagacctggaaatttcttttttgcaggattttaaactatgaattctttttctttaatagttacagaactttttatgctatctactttgtcttgggtaagttttggtagcttatagtttttgaggaaatcatgcatttcttcaacactgatggatttatatgcatagaattgtttatactattccattatcttttttatggctgtgatgtcattagtgatatcctttttaaaaatattctgatactggtaattcatatttttttctgtttctcttcttcagtctcactagagatttatcagttgactgatctttacaaagaaccaaatttggtttcattgatcttctctattattttcatattttcagtttcattgatttttactcttatcatttcctcccttctacttgctttgggcttattttgctttttctatttgagcatgttttggtattcaattttaatttacctattgtgtttggttgtatatctttgtatagtgtttactggttgctccagggattataataaacctatataactcttcagagtctttttcaaatcaatattttaccacttcaagttgaatgttgagaccctgccatcatataggtccctctgtcctcccctgaatgttgttgtcttttatacacctacatacatggaaaactacatcagacagcattatcattcctctttaaaatacgcaagagcctaatctgttatattttttcaggtatttctgttgctcttcctttattcctgatgttcaaaatttctttctagcatcattttccccctgtctgaagaacttccttcagcaaccatcttagggtagatctgctggccacacattctataagttttgcttcatctgagaatgtctttatttctccttaattcttgaagtgtatttttgctggagatagaattctgggttgacagttctttttttttttttttcagcattttaacaatgttttgcacttcctttggacttcacagttttgataagaaatctgcagttatctgaaccatttttcccctataagtaatgcactgtttttctctgactgctttcaagacttttttttgtctgtagttttcagagtgtgtttataacgtgtgggattgtgtttccttggatttctctcatttgaggtttgccgatctgttgaattggtaggtttatgcatttcacagaatttgagaagttttcagccattatttatccaaatatttgtttagtaatacattctttctcttctccttctgggacatgactgttagttagatctttcggtattttcccacagtctctaaggctcttggcattataaaatatttttactcgctgcagtttgaattgggtaacttctattgctctatcctcaagttcactgactcattcctctgtcatatccattctgctcttgagcctatccagtgagttcttaaagtttctgttattgtatttttcagttctaaaatttccgtttggtcctttttaaaaatatgtcttccgtttcttgctgagactatctttccattagttgccagagtttttgcccttactttatggagtatttttataatagctgctttaagatcattgtcagttaattccaacatatgtgctatctcagtcttgttatctgttggttgtatttgcctggaggagttgagattttcctggttcttggtatgccaagtaattttggactgtatcctggacactttgatattaccctatgagactttggatcttgtttaaatgctatggagaaggtcattatttttgtttgatcaggtaattaacccttgggttaattgggttccggctgcaagttccaatgtgcctgtggattgcggttcaatgtcaggtccattttcaaagcctgtgcagtcctattctgatcaatcccatgtaaacacaacccagtggcacgtctgggacctgggcattggtccacctcctaagtcagtccccagaacctatggcgtgttgtttagggtcagacccactcgtgcacggctcaagcacgagcccaggagtttctaaccaactttctgatgccagttccccaagctctgctgtctctgccatcttcctagccctgtccagtttcctgcggctccttgttaaatctctctggccagaaagctggggctttattgaccctgctgtcttgcacacttcctgcaactacactcctgggaggaccaaaagaggaaagagcaatggggtttcactccacctttctaggaccacagcacttccagctacacagccaggctcccctcttagagttttaggtgcctgtgggctgccatgagctggcgtgtgagaacacgaagaaaagaaaaaggaaataggaaagaaaaatgaggtgttggcttggctctgagcattcggaaatgctttttctatccttgagctacaacaacagggcttgtctcgagctctgtctgtctgtacccagtgcccgcttctggagtttgacctgccttgtatctaggctgaggaataccagagaatgaagagtaaactctgcgggtttgctgaacctcacattctagtcttcttccccaatctgcatgctgttatttattttgcagggtcctcagctagctgctcatgaatccagtgcatttgggtggctgcaggcagtgggggatgcaggtgaggcgtgctcacaccatcctactggaacctgaaccttctcctagggacctctctatgtgttgagcggtttataatcagggagggacttctaccagcagaaatacagccataggcagatccctgctgaacaggaatttcatagagagagggagggagatcctgcccccagcaattctcacaacatgcccagagcaactgacaggggaatcaggtctcttccaccctccaggggctgcccactgcacagaggagaaaatccaatctcctccccacagcagaggaagctctgtgcagtctgcccccgcccaccactctgacctcctgtaccccacccaggcccaccactctgccctcctgtaccccacccaggcccaccactctgccctcctgtccctcgcccccgcccaccctttgctctccacactccactcacattggccttcttccctttcctcaaacatggcaggtctgttctgacctcgggtcctctgcatgtgctgttctctgtgctggagcccacttccccagatctctccatcgctgcctctttccaatcatttaggcctcagctccagtgtcatctcttccaggaagtcccccgcccccctcaacaatactctgtgctgttgtcctcacggctgcgtcactctctgtcgacttcctctttgcttgcttactgccatttgcccccccgggagatagcacccagggtctgcattcagccacaggtcgcaaatgtgaatgcacctttgtggccacatctatcggtgctgctggcaaggtggaggttgggaagccggacccactgggccacaagtcctcagggctccttcctggtccagaggacccccaggaggaggcagctctgcctccgcagagaatcttgctgcagtttgggttgtccggggccttatcactcccccgcttttttttttttttttttttttttttttgagacggtcttgctctgtcgcccagagcagctgggactacaggcgccccccaccacgcccggctaatgttttatatttttttagtagagacggggtttcactgtgttagccaggatggtctccatctcctgacctcatgatccgcccacctcagcctcccaaaatgctgggattacaggcatgagccaccgcacccggccatcacccccgtctattttcatacatgcagtggggtgagaggcagaagtcccggcttctgctcctgtgtggcttcctactcactctacactccccttcctgacgctggccagaggctggcggaagggctgtgctgggccaggactggcttgcagttcctctgcagggagtcccggagcctggggcctgagggctgccttggaagggcacccaggggcgaggtgtgcaggctgactgttcccaagcagctgggggcctgccctcgctcctctcccgggcacagcacgctgtgagcggggcatcccgcacgccctgctgccaccggctctccggctgcactccttcttcacacgctggatgagaggacactgctggggcagcagggcacatggtgcaggggtcctgccctcatttgtgtcttttcccagaggatgggttgtctccaagttctgcgtcaaaactgaagttcagcatacttaagcccagtggttcacaaaggagatgcttgaaacccacttctctcccccagttactcaggtgctgcccagtggagagagatctgtgcacacagccttgtctccctgcggcatctgggcgccacagggcagccctcaagagatgcccctgtcccagtgcggggctggggaggagcccagccctgtgcgagcagatccggatccaccactcattagctgtctaatcctgaaagagtcatgtcatctcttggagcctgtttcccaatctgtaaaatgggcataatgatactgagctcacttcctttgccttcattatcttattttcaatcccttgacaactctgtaaagtaggtaatattgtgccattttagacacggaaaagcagaggtcgaaagaggccaaatagccacaagtgacagagtggggatttaagtctaaagatctcaagtttcggctgggctcaattctttccttcagcccaggatgttcagggatgacagccaggctgggcccctgagcaatgccctctgctgtctttttttttttttttttcctgggggacaggagcgagcagagcctccagaacctttgcccagatcacagtaggcggttcttgcagctgggaccagttcctcccacttggacagagtgaggagtccaggcttcactgaggccaggagggggctggccgccggctccagactggggaagcctgtgtttggggcttgtgctcagtgtgtggggacatcctccggcctctgtcctgcgggacctctccgacttttaattggctttcttctggctccgcgtagatgaagagtttttgccagagccagagccataacggtttatctgtctgctggcttgcgtttctcagactgttactgaattaagttgtatgtatgaagactcttaaataaaataatatcatcgtgtttattcggagcttggccttaaagtgcacttttgagtgtgcacatcattcttcttaaaccagggcctcctttataaggggatttatcttcactttgagaaacgtctgctaaagcctgctgtgccaaagtcctcatgcttactgctagagccacagaagtgaaggggggtctggcttgtcctcaggcagctcaaagtcagggggacggggacaaaagaccagccaaaaagtgttgcaaagacatcaatgggtgctataagaggatgctattcttttgtttctttagttttccattgtttacaattaaacattattcacaacaactgacaaaacatgattcacaataatttacattattcacaattaaaaattacttttgaacatacaaaacatatggtcattatcattgaataatgtagaaaagtattaaggagaaagcaaaaaccatgaaatcctacccttttgagatagtctctgtgagagacagaataatccttctcccaaagttgtccatgtcccagtcccgagaacctgggaataaatcaggtgacatagcaggggcagtgaaggttacagatggaagtcaggttgctaattagttgacttttaagataaggagattatcctggatggcacagtgtaatggcaaggattcttctttttttttttttttttttgagacggagtctcactctgtcgcccaggctggagtgcagtggcataatctcaggctcactgcaagctccacctcctgggtccaagtgattctcctgcctcagcctccagagtagctgggactacaggcgcctgccaccacgcctggctaattttttgtatttttagtagagacggggtttcactgtgttagccaggatggtctccatctcctgaccttgtgatccgcccgcctcagcctcccaaagtgctgggattacaggtgtgagctggccatgacaaggattcataaaagtagaagatggaggcagaagttcagagtcagagaggggtcagtagatgctccggtgctggctttgaagatggaggagggggccacaagccaaggaatgtgggtagcctctaaaagctggaaaaaaacaaggaaacattctccttagagcttccagaaggaatgcagccctccccacaccttgattttagcccagtgagacccattgtggacttcagatctctagaactgtcagataataaatgtgtgtgtgtgtgtgtgtgtgtgtgtgtgtttgagttggagtcttgatctgttgcccaggctggagtgctgtggtgtgatcttggctcactgcaagctccgcctcctgggttcacaccattctcctgcctcagcctcccaagtagctgggactacaggcgcccgccaccacggccggctgattttttgtatatttagcagagacaggatttcaccgtgttagccaggatggtctccatctcctgacctcgtgatccgcccgcctcagcctcccaaagtgctgggattacaggcgtgagccaccgcgcctggacaaatttgtgtttttaagccactacatttgcagtaatttgttacagctatacaaactaaccgtttttccatcttgttacatatatgtcacactcagaagtgagatcttgtcactcatgctatttgtatcaacatctttaggtttatggttgctctctcttctgccctcttgactggagcactggcttcatttattttcactctggtctataattaagaaggttgtgaacttgcttctggtggtggctttggtctcatccacaggttctgatgtgctgaattctcactgtcatcattttaaaaagatttatgattttgattccagtaacttaagagctatttagaggaatgttgaaaaaacttccgagtggttggattttaggttattaagctttgcgttgattcctagtataatccaaatgttttcagaccttagcatctctgggtttaaattgggtcttgtcagcatttatatctgcatcttgccattccagtgacaccccacccctaaccagcgcagatctcagtttcctacaagggcttgtgaatgcctccccctcaacccctctagcatttctaggcatctcccagttccgtagagcccgtccacacccctcctgccacgtgtgtattctgagcatcccaggctctgcaggtgtccctccgttcaggctgccataacaaaatatcacagactgggtgtttagaaacaacagaagtttatttctcacagttttggagtctcacatgtgagatcggggcgccagtgggtttggtgtctggtgagggctgcttcctcgctcatagctggggccttcttgctgtgtttgcacacagtggagggtgcacaagctccctgggcctctctgataagggcactaatcccattaacggggtccccaccctcatgacctcatcaccttccaaaggcccgcttcacaccatcaccttgggacaggaagagctcatctccatggaggcttggcagggccaggcctgccacagagttaggagtgaaggggacagcctgggttccccgagcctcggggaatttctgaaattgcctctgtctcctggtgtttgctcagcttctatgaatgtcaggtgggcttctgaagggagcacggaatctgcgttgcagggtcactgtggcacgaggggaccctggcctctggtgctgtggaaaccggagcagctgggggcggccagagagaggctgagcaggagggtgtggaggtccccggggccctggggaggagggacagaggccatgggcattggtgcgtgggagggagcagcagaggccagcctgctgagaagggctgtgagggaagggaggtcctgtggctggaggggaagcagagtcttcttgttcaggattgaagagacccggttctgttgttgggctgagagaggactttagagaggaggaggccgaagacgcagcaggggaggcgagaagggacttgtggagagccctgagggagctggtggtgggcagtgggttgtctcggctcagagcaagagctctccgtcctctgggattatagtggagggcgttgggggcactctgccagtgacttcatcagtaggggtggggagttggcattatgccccatgatgcaagggcccaagtcaccctggagagggaagccggggtcttgagggagggtcctgggagacatggggcctcagcgtattggggaagggaacagtcaagagaaaggggcaggctgtggggagggccttctggctggacagtactagcagggagtggggcagaagggggtccccataccaacttcacctcttggttcttggtgccgagaagcagcaatctcaggtttctgcattgccaggcaggtggggtgggaggctacggctgacaggcttgggggattcaggccaggcaggcaggggaggccgggatcaatttttgtaaatgctcccccatgcttgtaaagaatactcatttgctttcggttgtaagtcgtcagatccatccagaaatcaatccggcccatttcccgagtcaatgagtctgtgcccctctgctgtggtctaggagacctgtcacccactgggagtggccgttcgcatttccctttgacagggctgttgagccacttgtgtttctaaccatggcagatgctgcggcccttggtttgtaaagcttggtgactgtgtgctttcaccaagccttgtcaatacaacaggagtttccagtcatttagtacttgctctgagttctattttgatgatactacagacaccctgctttctgggtttgcagttttctctgtctctcttttagcatgtttcaggcatgtgttacagacggcatgccttgtttgttccatctcagtctggttgatctctaactgcaatgttaaacccattgatggttgtgttagtgataccagtggcccgtccttttttcggcctgcacctttgcatctttatgcttgacttgtcccctgtccaccctgggagcaggcaggcagctggtcttcccaggcaccaccctcctgacccacagcacgcagcagcctctctctgcccgccgcctctccctcctgccctctgcccaggccgcccctggggaccttacccactgagcccatctccacctgccttgcggtccttccttatccgagtcggatgccactggtcctctttgctgtacttgctccctgcctgtaccactgtctcccgcctcctgctttccttgctgaattgctgggtccagccccatccctcctcccttactttcctgcctccgagcaggggccccagcctcgctgaaggatctacttcgacattcctgactgctggcctctgcaggcagcatccccccttgggaccttcccgctccctgctcacccacctccttgctcacccacctccccctcctccgagcacagacaggccccggcattgcccctgcccgtcccttgagctccggctgctcccgggtcccatcattgtcagcattctcagaagcacagcccctgccgccacctcctccatggctctctggcatcacccaaagcgtctgctgaggtcccacggaccacagaggtgtggatcctgtggtcattctcctgtccccacggctcaggcctcccccatcctcctgcttcaccatcactgcatcgtccgaggcaccgccagctcctcggtttgctcttcccctgggctctgcaccttggcacgtgctgtgtggctgagcaggaccctcagtctcctggaccacagccagaaaggcatttcctcctgcagtggggcgtcctgggttggaggagccttccctcctcatggcagcctccttccacagccccacctgtctccacgcctcccttgctcccagcacaggccccactagtggtttcagcggaatatggaagggcttttgaggacgtgtgtggaaggtggccttggtggctgctcctgaatcccttccagagcctccagctcctcccaccccgactctcacttgcgggactgccccagccgccatggacggggctcctctgccctgctcagaatgttctggaccagcctgggactttgtgtcctgagtctgtggtggttgcagggaactggctcacccgtgtgcttcagggtggaaattgggctggagtgtggaagtcccatcccaaaccctagagatgggaccagcacctggactatgagagtgagggctgcctggtcgggctacagggcatgtcggatcagtcaggggcctgggacacataagggatcaacagaaaggagttgacaaaggcacaactcacagagctgcgggcaggacgagggagcttgcagggcggggaggctgggggccaccacagcgggagaaataaaaccttctgtctctctccccagccctggtttcctgtcggtgccccccttcacccagggagagccaggaggagccagtccatcaggtctgcctactgggctgtaggacagggcagaaggtgaaggggtggggagcccaacagagacccgccagcccagaacatcagcctggaaggaagggacgcagggacctggttcttctctgtgtcttttcaaagccaggtttcctttctaatccagaatctatttattcagccaggcctggtgccagatgctctcaggctctgaggatgacagacaaacccagcagcctccagtagggtgctcaaggcctggttttgaagtggaaacaatgatccatgcggccagtgggaacccgccaagttccccacaggcccgttcgcctagaggcagtagttgagagcgacaggagggcctccatgccaggagtctgcacagtgactcttccttccttctttagactgcctcagaggctgtcagcatttggggtggaaaagagttgtcctgttgagtgtatacatgacctaagtctactggagactcaatgagggaattgaaggatttttcagggaaaatgttgacatttcctgctgaccctagaaagcaagcccctccgcttggccagcaggaagtttctctggcatcaggggcaggccaccttggaagctgggcacacggggcaggggccaccctgcggatgtgggtgcagccctgcggggaagctgcagtgggggcgggggcagggcttggggtggcccttccactccccaagtctgtgggtgcccaatctccagaccaccattccggacctccacaagctgcctccttgggccacgtgggtgggtcagacttgcatgggtgctcagcatccctgggtcgggttgatcctggcaccccctagggtgggtctgctgggcagccctcggagcctggacagagcttctagccatgcacccatcttccctgttcatgggattgagtcaccaaaggaagggcattcattaaaaataattggctggctggacgtgtttctgggctgtcagctctgactgtaggctgcgtgccttcatcaacatctttctcccggttcccagtcatattttttctttttgaaagtgtctttttctgttacccaggctggagtgcagtggcagcatcttagctcactgcagcttggaccttcagggtttaggtgattctcccacctcagcctcccaagtagctgggaccacaggcatgcaccaccacacccagctaatttttaaattatttgtagagatgaggcctcactatgctggtctggaactcctgggctcaagcagtcttcctgcctcggcctcccaaaagtgctgggattgcaggccccagttcccagtcattaagtggaatgtttgagatgcacaaataccttaaaacaaaaaaacaaaaaaacaaaaaaaccttggccaggtgcggtggctcacacctgtaatctcagcattttgggaagccagggcaggcggatcacagggtcaggagttcgagaccacctagccaatgtgatgaaaccccattctactaaaaaaatacaaaaaaaaaaaaaatttagctgggtgtggtggcgtgtgcctgtaatcacagctactcgggaggctgagacacgagaatcacttgaacccaggaggtggaggttgtggtgagcccagatcatgccactgcactccagcctaggcgacagagcaagactccatcttgagaaaaacaaacaaacaaaaccctaccctggaatgccaactccggtgcttgtcttgggctgggatctatggggcactggcctgttctggcctagcaatgggaggctgatgtcccacgcttgtcctgggctgtggcccggaggcgttggcacactccagtccacatgggaaggccatgttccctatctgtctagctcagcgcacggctctgactcactgcagttagcagggaaaatactcttcacattgagatgtcagttttcacttcaagcctgatttctgatccataaacaaagcctgcaagaatcagaggctgctcatgtgggagtcagctaattaatctgactttcctcaaggaaggcacaggccgctgcctcttttgtgaagattagcactttttaaggacgtgtgagtctgtcaggacaaagcaacaccaataacgttccttattttcggggagcagaggaaagtggggtcagactgtcttccccgtggacaaggaggagcggcttcaggttagcacttacaccagtgctgtgagtgagaagctgtggctgtcaccaaggtgaggtcatggctgcaggaaagacgcttcccaccctctccccccaacaacagaggatgtcccaagcccaggggaccggccagcgtagctcctgacaacctctaggaaaacaggagggcttctctttggatggcaaaactgacctcaactcacttaagcagaagacaattcaaggcaggctattggggggctggggctggaggcctggaaatggggtaccttggagggccccagccaggacctcaggaagccgtctgggcagtggtctgcactccagggtggggtgggagcttggattggccctgcttacaatgggcttctctctcagatgtatcttgcaaggagagagagtcaccttgggcaagctgactcccacccacccaggccccttcctgacagtccttctaggctgttcccaaaggcatggctggctgtccctaggatacatggggccctgggcatatatttcctgcaggactcctgtctatatagacaatttgattaaaaaatttataacaagattcatgagcccacatggggaatagcaagatgtatcaaggaagatttaggggacggggaggagaagcacgaacacatttgctcactgtctgctcagtgcatgcagagaccctcgttactgctcaggctcaggagctatctcttcctgttctttatggtcgagtgtgctgtcccagctaatttcatatttatatctcccacagctggggggtaatagcaaagctgttaccgctcacaatgtgtggctctttggaacctgtttgtgtggagatgctgtatatcttcttgccccgcattccccagccccatgtatttagtgctggttgtggcatttctcctgactccgccgcttctctctgcccccgggaatgccggcttccgttgttcccttgaaggtggttaccgtgcttcattaatgatgaccaccaatgtggatcttgcccagagtgtgcaagaaaatgtgagccatacgtcctcatctggtcgtgttaaatttaatgtttgggccaggtgtggtggctcacatctgtaatcccagcattttgggagaccaaggcagtaggattacttgagcccaggagttcaacatcagccctggcaacatagcaagacctcatttctacaaatttttttttttttttaaattagctagctgttgtggcacacgtctgtggtcccagctacttgggaggctgagttgggaggatcacttgagcccagggggtccaggctgcagtgagctgtgtttgagccactgtactgcagtgggtgacacagtaagatcctgtctctaaataaataaataaataaataaatatcgtttggacctttatagcgaagggaagaaccacacatcttgcagcctcatcttccccatcagtcctgaggctgttacttctgcactcccagaattcaacctcgtttaatggtgggcacactcccgccttccacactctgccaccagcaggcagaatgacaagagaagagggatcccagttgtgacaggcattccatccctctgcagaccagcctgggaggagagcatgatgtccagcacggcttggaggcaagagaggacacgggaagggtcgtggcattgcagggcaacagcttccctctgaaagcactccaagcaggtggatgcagccagccctggaagactgcccggaaatgacacggaacctttgagggtgtgggccaccgccctgggcaccagtgacagaggcacagagtgaaggatgtctgctgccactgcccacccctgaacaccagagcccggaggtggccccacagccgatgcaggagcccacaagtgccactcaggcttgaggcttgggcagctgtatcccagagccccgcactcattctgtctgatgtgagtgggaatcctcaaaacccacgtgtcagcatcatgctggtggctcagtcccattcacacctgtgaaggaagtcccctcctggccagtgagggtggctcgctcatcaagccactcactgagacctgaagcaacctcatagtcaacagccctagagctcctggggcatccgtggccccatgcacagggcagagggttggagagtgccctgaagggaacggcagggcccacagggtggctcaggcataggccctctgcacaagagcattgctccggctacacggttctccctggtgttcctggaacacgccaggcttgcttccttctcagggcctctgtacttgctccccgatccctggaacctaccaccttctacaggacctgctccctggacactggggatgcagtgggcgcctccactccagggaaaggcagccaatgtgaagaatggaccggccagagagcactgagggaggctggggcccagttttatttttatgtgtttaaagttttaattttgaaataactttagatctatgctgtcttggaaaaattgcaagaaaagttgcaaaaatagcatagatttcctctgtgcccttcacccagcttcctccgtatgcaacgtagaacaaggactgaaaccaggaactttgtaggttgatactaagcgttggtacttagtgtcttagttttagtctattttgtgttgctataatggaatacctgagactgggtaatttataaagaaaagaagcttatttagctcatggttctgcaggctgggaagttcaagagcatggccctggcttctggtgaggcctttttgtgctgtgtcataacgtggtggagagggtcaaagggaaagcccatgtgtgcaaagaagggaaacccagggagtgtcctgcttttataacaacccaggctcgggaactaatcaagcctctccagagcaagaattcccttgctaccttgagaacagtatcaagccactcacgagggatcggcctccatgattcagatacctcaccccaggccccaccttccaacactgccacactggggaccaaatgtcaagatgagttttggtgggaacaaaccagtcacattctaaccgtagcactccagactgcactgaattttgtcagtcttccgactcatgtcggttgtctggttcaggctccccctcaggatcccacgtggcatttagttgttgtgtctctcccgtttcctcccatctgaggtttcatgacctggatgtttttgaagaggactggtcagctgttttgtagacggtgcatccccatgggtttttctggtgtgccttgtactggcttgagcttacgtgtttctggcaggactgtcacagaagcactgtgccctccgtagggcaccacgctgggactgtcacattgggatgtccagttgtctcctattgtcagtgatgcccttcttcatttggctaaggtgttacctactgggattccactggatgccccgggagctctagggctgtgactgtgaggttttttcaggtctcagatgagtggcttgatgagcaaaccactctttcactcttttttcccattgcgatgattaaatctcccgtgggtagctgctgtgacgtgatgtgagcattctgtttcttgttatccttttgctcactaattgtagcctccacggataagtcgtacctgccgcagtcctgactgtgctgttgccgatggggtttactaccatgattttctatctcatcatttcttttacatttttagttgaattaccctgtgagaaagagctgcccttcccctcccacttatttattattcagttatttgtttctaccaatactgatctgtggatatttattttattcaatgggttctaacctattactatcatttattattgtgttcaaattgccccagatttgaccaccgaaagcaccttccagctgcctcctccatcgttccgctgtgcttgggtgtgatttcacacggggcggtgggacaggccgtctctgagcagggagtgtgggtgtgagcagagccctgcaggaggggcgcagtcctgtggcagtcagaaccagctggggggctgcagcctgctctcggggaaggcctggtatgcacaaggtcagcacctggcctggagctgccacctgctcacctgtctggtttctggtgggggccctgagatcccgggcttggcactgccggagggcggggctgtgctgcggtatggatgccgtgccgtgctgtgctgtgcaggcagggttactggacataagcctggtgtggcctttcataccctggggtgccactgtctcccagtgtgacacctggtggccttgtcccttgtgaggaccaggatctgtggggcacttgatcccatgagttcagtctccccgaatctgtagtggcatccagggagggcaggtgcgcctgagcctgcctgcattctggatacggcgcctttggtcattgctggcctcgctgctccggctctccagtgggccaaccacccacagaggggcctagggccctggcggctgctgtcctggctctagaataaatacacatcccagagtcaccagtgtgggctcaccagtgctggggccctgcccccgcccctcccccggagccaccctgggtgggtggggacacgggctgggcagtgtctgaaggcctgcagagcagcctggccacagcccagacaacctggccctcagagccctggctcttcccataaataaaccagacaggatccttcgtcagatggtatggcctgatttttgttttgggaactctggacagaaggggaagcagacagcctcgggcctggcagggctgcccgcccgggagtggcagctgggcaggcgggcagaggacggtcggcggtcagcgtgccctggatagcacagtgggccccagagatcacagcaggaaaagaagcccaattcaaaggaagcaggagtgaggcagtgcacaggctctgtgtgtgcatgaggccggaggggtcctgagaggggcctgtggcccagggacccggggagatgacagcctgtgatggaaagtgaaagggggggtcctctggctgggaaaactgcctgatctgggcagctttgcacaagcagacatggaggacatgccccactgagtctcaccatcaactctcaactgcagccccctctgggggaaccgaggctttgagagaggaaaggctgatccttgttgcacagtggagtggggggactggcgttgggcgggctgcgtcccagcctgtgctctccccatgggagttcctgtctgcccctgcttctaagggggacgtccgtcgggtagtgtgtcttccccacactgctgggagccagccaggcagctgggcccttggtgggcactggtttccctctgagcacctggcccctcctggaggagcacccgctgtgggaaggagcagaccctgcctcctgggtcctcgagactggggacctgctctccgggctgagctgccacagaaagggtattggatgctgttcaaaacacgccacacatctagaattgcataccccgtcttccaacagctgcgtagactcagccttgggatcgcccagaaaattctggggtgcagtgggcatggggagtgcccccacacgggagccttagccagcctctctgcaggaatgtgagacaccagcctcagctggctccagtcgtgggctctggagcagggctcctgctggaccgtgagagagtggcctgctgctggcggaggggtcctgaggcccgtccaccacccaccggctgtgcagcattcttgtctccctgcgcctgcactcactgccccgtgtccccatgtgagaatgcccagtttagaaggaagggtgagatgggcatcccatgtggccagccctgggcgggctcctacttccctggagtggcagctttcctccatgctggatttctggcccctggggagtgatcctggcattgaccttccggcctgtccagagtggctccccaaggaacagcccgcccagctctggccaccggaccctgccagcagcctgctccgattctgtgtggacttggcgcctggaggctgttatgggctgagtgacgccctccctagatcccccagttcctttgttgaggtcctaaactcccgtagatcaggatattggctgtatttggaggcagggtctttaaagagataattaactgaaaatgaagtcactgattcaacatgaatgactggtgtcctaagaagaagcgattaggacagaagtacacacagggggacggccatgtgaggacaggggaaagatgctgtcgacaagccaaggagagaggcctcgagagaaaccgcctctgcccacaccttaattttagagctctagcctccaggactgtgagagaataggttctgctattcaagccccggcctgtgctgccctgtgatggctgcccgagcaacctagggaaggcgccggccccgaccttttgtgggagggggtgctggcagtctacctgggcagcatctcctggtggatgtgggtgagcctgctgtgaatgctgggggacggtcctgggtccccaggccctcagttcttggagtgcagccttgcagggtttggttgctctccagggtgggtcccctggggaatctggtaaggaagcatatgttggcaactcccagacatgtgcccctgccaccccagccccctgagcagacagacccaccgtgccggctctgtctctgggagtgctggtgctcaggcgtgctggtctcctgggctggttggaggaagggaggggcggtgtgtgcagacctccaaggaggcagggaggctggcagggaacagctgtgcaaaggtgttaggttccagctggtgtgggcaggtgccagcccaggggagggcctgtcgacagggtctttttttttttttttttttttttgagacaagagtctctcactctgtagcccaagctggagtgcagcggtgcgatcttagctcattgcaacctccgccttctgggctcaagcgattctcatgcctcagcctcccgagtagctgggactacagacgcccaccaccatgtcccgctaatttgttgtattttggtagagacagggtttcaccatgttgcccaggatggtctcaaactcctgacctcaggtgatccgcctgcctcggcctcccaaagtgctaggattataggcgtgagccaccgtgcccggcctgttggcaggatcttgaatggggaagttggaccttattccatgagctctcctccaccacacgtctcaaggccacaatctgctgtggtccagctggtgagacatggaagctcagaaagaaaaatcttgctttttgatagtttggcaaatgttcctgcagcacgagtcatttttcttctttagtagagagcgccctgttatttatgtgaatgttaatttgtgactggggacgttccccgacgtgggcttcatgctgaacgagacctgggaaatgtcagccagagaatctggccgggacgagtgtcagttctcgtcacaaataggcaggcctgttgcagtcccagagtctgggtctgacccactgacctctgtgtcctggctgggtctggctggccagctctgtttcctggaggctaccccggcattggtgtgtgcaggagccatggagatgggggagctggctgcagagggctgagtgtgggacattctggacaggccaggtcccgagggagccactcaagcgttgcttgatttagcagaaggccgcctggctggcccctgcgctggccccgtgaggcattcttgtcggcatcttgtttattccattttcccccttatctttctctctgtgctctccccctttccgtctctcctgtcttcacatgaattgtctgttttgctatatgccctttgtaaaaatgtaaaacaaaaaaaatacagaaaatattaataaaaagtgaaactcacccccgatcgtaacactgctgaccctttgttacgcgtttcctaacagctgtcatgccatgatcatcatgatggtgatggtgctgccagtcggctgatttatcacgtgctgtgcccagtgctagagacgcagtatctcgcttagccctcacatcagccatggaaaccctgttattatctccattcaaccctgcagacactgtccacagagaggccactcagtcagaggtgaagtaaacatttgaatcgaggcagagtgactcggaggccacatgcttaattattagactgtgctgacgtttggcacagagatatacatgattttacgtaaggaggtcatgctgcagctgggcttgccgccttcttcggtcaccaatatgtcatgggtgtgtctgttccttaagtggtcaaaaaatctgagaaactcttttagcctagcataaatctgtaaattttgtaaaattattttgcagggcatagagtgttattgaaataatctgactggctgggaacggtggttcacacctgtaatcccagcactttgggaggccgaggtgggcggatcacctgaggtcaggagttcgagaccagcctggccaacatggcgaaaccccgtctctactaaaaatgcaaaaattagccaggcatggtgttgtgcacctgtaatcccagctacttgggaggctgaggcaggagaattgcttgaacctgggaggcagaggtctcagtgaactgagctcaggccactgtactccactccagcctgggtgacagaacaagacactgtctccaaaataataataataataatctgaccatttattgtttttgttgtctgtttttgtttgtttgtttgtttttgagatggagtctcactctgttgcccagaatggagtgcagtgatgcaatctcggctcactgcaacctcagcctcctgggttcaagcaattctcctgcctcagcctcccaagcagctgggaccacaggcgcgtaccaccaagcccggctaatttttgtgtttttagtagagacggggtttcaccatattggccaggctggtcttgaactcctggccttgtgatccattcgcctcgtcctcccaaagtgctgggattatggacgtgagccactgcgcccggttggattttgggtttttttgagacagggtatctctctgtctcccaggctggagtctccaaaataataataataataataataataataataataataataataatcatctgaccatttattgttttgttttgtttgtttagttttaggttttggtttttttgagtcagggtctgtctctgtctcccaggctggagtgcagtgacatgatctcggctcactgtaactctgcctcctgggttcaagtgattctcccgcctcagcctcctgagtagctgggattacaggtgtgcaccaccacgtctggctaattttgtatttttaggacagatggggtttcaccatgttggccagcctggtctcaaattcctaactgcctcagcctcccagagttctgggatcacatcatgcccagcctacatttattgttatatatttgttcttacttctgtcatctaatttatgttttctgtttttctggatttttttttttttttttttttgctgtttttctagtctaccatattttctatatggtctgccttcagtcatttggaaggtatacattagttttactagttgtgacttttctaattttgagtagaattcttcagcttgtatctactgattttagaaacttaccagtaactgttgatgctaactgaagattctgaagattaggaaacgagtgcaattaaactgtaattccttttttcttcctctactctttgtctgattgttgtgggcttgtttggcaattttttgcctgcccccatttattaaagttaaattatgaatagtttatatattacatagctttttttttccagaatatatgctaaatgtcttctgatttgtaaccctcattatccctgtagcatagatgcagagggcaattccgctatttcgacctgtgatttccccacttgccaggtgtctcagttttaaagtcaagtccaggctgcgtaaagtggcaggtggggggtgctggggagggatgccaagcagaactgagacagacgctctcgagggcattctctagcagcagggttgaagccatccctctgtgcaccctctcccagggcccagagttgctcacagtggctcacctggttagttgatagacttagggctcccatctcaagatgacatggttttaccgtgttagccaggatggtctcaatctcctgacctcgtgatccgcctgcctcagcctcccaaagtgctgggattacagggtgtgagccaccatgcctgaccaagcccttggtttctaatgcagagtttctttgtaggccaatgtttcctaaacattggcctaggaggtgaactaatgggtaccaaacatgactccagaatgcatttaattctatcaaatcccagctagctttgtggcagaaattgacaagctgatcctaaaattcatacagaaatacaagggatccagactaaccaaaatgctattgaggagaagaacagaggaagggctcatgctttgtaattctaagacttactacaaagctgtagtaatcaagactgtgtggtgttggcagaaggatagacatatagattggtagaatagaactgagagtttggaaatacatcctcatattgattcttgacaaaggtccaagacaagtcagtgggggaaagaatggtcttttcaacaaatggtgttggcacacctggatatccacatatggaaaaatgaagttggaccccttcctcacaccatacacaaatattaactgtaaatggatggatcatagatctacatgtaagagctaaaactatagaactcttaaataatgtaggagtaaatctttgttactttggattaggcaaagtcttagatatgacaccagaagcacaagtggacaaaagaaaaaaataggtgaactggacttcaagaaagtccttcatgacttcagtggacactaataagaaagttgaaaagacagcccacagaacaagagaaaatattcataaattgtatatctaataagggatttgtgtctagaatatataaagagctcttacaggtcaataaaaagaaaatggtcttattaaaaatagggaaagtatctgaatggatgtttctccaaagttaaataaatgacctataagctcatgaaaagatgcttagcatcattagttgtcagggaaatgcaagccgaagcatgatgggacaccacttcacacctgctggatagctagagtcaaagagcctaagaataatgagtattggtggggatgaggggaaattgaaccctcacacactgctgggggcactgagaatggtccagcccctgtagaggacagtctggcacagttactgtatgacccagtaattccactttgagaggaatgaaaacacatgtccacacaaaaacttgtccacagatgttcatagcagcattatgcataggagccaaaaaccaacaacccacatgtccatcaaccggcaaatggataaataaaatgtggtatatacatgtgatggggtattatttgacaataaaagaggaatgaaatactgctatatgctacaccatggatgaaccttgaaaacatactaagtgaaggaagccagtcacaaaaggccacatagcatgtgattccacgtatatgaaatgtccagaataggccaattcatagagacagaatgtagattagtggttgcccagggctgggttggggaggagaggttggggaaaacatggggagtgactgccaatgtgtacggggtttctttttggggtgatgaaaatgttctaaaatcaatagtggttatggttgaattgttcactttcagcatatagtttagatggctgagatgtatggtatggtaatcacagcaccataaagctgttatatattaaaaagcattgaactggccgggcgccatggcttatgcctgtaatcccagcactttgtgaggccgaggcaggtggatcacctgaggtcaggagtttgagaccagcctggccaacatggtgaaaccccatctctactagaaatacaaaaattagctggatgtggtggtgtgtaccagtaatcccagttacttgggaggctgaggcaggagaatcgcttaaaaatgggaggcagagtttgcagtgagctgaggttgcgccactgcactccagcctgggtgacagagcgagactctgtctcaaaaaaagaagaaaaaaagcattgaactttataatgaaaaatgattcccttttcagttgcattttaaactctctggttgagtcgaggggagtctcagtttggtgctgacagatctttaccagctctctgctacttactgacctctataacaagagagaagggcagcggtgtaggctttgaggtgcaaatagaagcccggagagagaggaagacactgggggtgcgcccagggacagacggctgctgggaccccatggaaggccttgcgtgccatgggacggccttggcctttattttacaggagtgggtttctggtttttggtttggttctttctccttggtcctagtagagttttagaaggatgatcggtacctgccaacgtgtgcggggtttctttttggggtgatgaataaacaggataagcagtaattcataggttacgtagtccagctcctcagtttgcagatgagggaactgggggcctgcaagggggcaggactggccatgaccgcattggaaaccagggcccctggctcagcgtccagtgcttactctccctgcctgcctcgccccccaccctgcccttcaaagtggagtctagctttccttagagcctcgctgggcatgtgactgtcggggctccttggtcctgttggaaattggctccggccagcttaggccaaaaaagagactttctggagtaaaggtctgtagggcctgaaaccaggtccagggaaggttagagtggccaagcaaagtcatcaggttctgtggagctcagaggcaactctgttgtggtcactgtgctcagcagaaccctggaaggcccagctccagccatagctccaagacagagccctagacaaggggtcgctctccaagaggaaggacgggagtggctggcacctggcgaggatcccatgagacagaggaggagctggtggagatgcgggtgaggacagctgtttcctaaccccatggacagctcctgcccgctggcgtcccttttggaaaagtggaaaagtcagtgtgtgaaatcctctgggatgctgaactgtaaaggagcccccagtggtgaggaccgagtggctcaaatcccactcgatacttcccactcctgggactgtccagtggtgaggacggagtggctcaaatcccactcaatgacacttcccactcctgggactgttcagtagtgaggggtccagcccccttccctgaaagctcccaaggttgttagagacctccctggggagctgggagaggcaagagagtgcccgagcaggctctgagaggaggcgccctgggaactgcaggcactgtgcagctctccctgtgagaccgtcattccaccaggcagctgtcacagcaggggaggctgcctggccattgccccgttgtccagcagatctcccaggttcattaccaaaaggaagatggggagaaagaatcttggagttagaatactttcaggaatgggaatcttagcagatgccagcatctgggggactcttggcaaggtgcgtgctgtgtgtgtatttcggagggaggtgagtttgagggcaacagggacttgcagccttgtcccttggcaaagtctgggtccctctgtgcatggacctgtgtgcttcctatgctttgtgccttctatgcttgattgttgccactgcaaccttggcacacacctgacagtgtttatgctggaggttgacaaggttgagtgacagaccaggtcccagtcatacacaggtgggaggctgctgatggctgcagctgtggcttccatgggaaggggcagtgggaaccagccagcctgggtgctctgcagaaggaaacaggatgcatgcttgtgtttcctgtgaacccctaacttccaggctgtctgtggttgaatacttaaaaattcagagtaatagaggagagctgttaagcctttggatctttataaatttttaacatctagttgccatttctagtaactactttaccatcaatccaactgcaaaggagcaggttctatagaaggaagaggcagggcaggcgttgtgtaactcaccaggatctgaatgccggcaacttgacttgatgacccgggtactaccaggctctgggcccctgcggtggcacctgaaggtcagggacagagccctccccatgatcctctctctgtcccccaggggagaacctggctgggtttgccagacatccacagacttcaagagcagagtgggactcacacttagagccaggtcggggtaccaacctttctgtaagaccccaggctggacagctgtggggttggacagacaggccaccagcaggctcccaactgagtgcttttcagcctagtgtgcttctggagtttctttaatatttattgagtggggagaggaaactgattctaattaataaaaattacatgtaaaaacagatacacttgacactggcagcaggaaaatcaaagtcccggaaaaaaatgcagcaaaacatagctcacattttgtgctttgctctcctgtcaattttcttctgtgtgttttagacagatcattcctgggatgcatatactgaagtgtttgaaaatcagggaataaaatgatctccacttcttccgtgaagtgccccccgccccgagcattattctggccagcggtcttggcaggacgtcagctgatggtcttgggggggtcagcctttggtctcgggggggtcagcctttggtctcgcggggggtcagcctttggtctcgggggtggtcagccttttgtctcgggggtggtcagcctttggtctcgggggggtcagcctttggtctcgggggggtgtcagcctttggtctcgggtggggggtcagcctttggtctcggggggggggtcagcctttggtctcgggggggggtcagcctttggtcttggagggggtcagccgttggtctcggggggggtcagcctttggtctcgggggggggtcagcctttggtctcgcaggggggtcagcctttggtctcagggggggtcagcctttggtctcacggggggttcagcctttggtctcggggggggtcagcctttggtctcgcgggggggtcagcctttggtctcgggggcggtcagcctttggtctcggggggtgtcagcctttggtctcgggggggttcagcctttggtctcgcgggggggtcagcctttggtctcgggggtgtcagcctttggtctctggggggtgtcagcctttggtctcgggggggtcagcctttggtctctggggggtgtcagcctttggtctcgggtggggggtcagcctttggtttcgcgggggggtcagcctttggtctcgggggggtcagcctttggtctctggggggtgtcagcctttggtctcgggtggggggtcagcctttggtctcgggggggggggtcagcctttggtctcgggggcggtcagcctttggtctcgcggggggtcagcctttggtctcggggggggggtcagcctttggtctcggggggtgtcagcctttggtctcaggggggtcagcctttggtctcggggtgtcagcctttggtctcggggcaggtgccaccatgttcatcgtccagcatgcgttgtgcgcatcgcacggtggtcaacagagacgggcggggctgtgaggagcatgttgaacgtctgtgttggagaatgccaccgcttggaggcttctggctgtgtgaggaagcctgagcccaggccctgcttcagatggaccccagtgtgctcctgtgccctccgaggagtcgcctgcaggggtgcccttccaggaggcaaggcccagggcagcatcagatggagctagtgctgttggctcagcccagtgattgtcctcagggaggcagccagggaggggagcctgacccctgctggtcagggagaccccaaactgtcccccgggttactccggccagagagtactgcccttccccaggctgagcctggcctcattgtcacactaggtccctccagaataaccccagggcctcaggcctgtggcatcgatggctcccgacctgggctgcaagttcccccagaagatggagctgccataaggggtcctcatgccccagtgtcctgccctaattggctcaatcggcccagtctggcccagggacctgtctgggagatgccctttccgtgtaggtgtgagttctgatccctagaacctgtgtgtccccagcagcctgtctgcccatctaggcctcggtttcctcatttggaaagcaagctggctggatgaaatcacttgggtggaggcgtggcctggttctcagtgtctcccaggctgcatgtgctcctgtgtgagtgtgcacgggaaatgacctgcctcatgtacagacgagtcactggacgcttggggagcttgacaccttgcctgaggtcacctggccagatagaaagggtgccaggaagtcagaacttcacgctccaggacagcttgcccgctgccgccccccagggttaattcctgcacttcatccaatgagtttcagtcataagatggatttgaggcaccagccttctccacaccacgcaccgggaccatcagtgctggaccctcccaactcctgcactggtaaacacactgcccctgtgccagtggacaggcctggctgtgttcttcccgcctgcctgctcggtgcctcccttgggggacgtggcctgcagctttggggtcatcggttcgctcattccacaggcatctgctgagtcttcgccaggcctggttgagccctgagacccagggatgagtcagaagcgtggggcctgcagggttcccaccccctcttccgctctcctcccacagccctgctgacctccttctccgacctcggtcttgccctggtaactctggttaccactgcctcctaggcctcttccccagaagcccaggatgcctgagcccagagggtcctgcgccccttgcccttcttctcatgcccctcggagaatggcacccactttgccggccacccaccaggaccctgaattacttttctgcggctgctgtaaggaaccacttaaaacagcaggaattcgttctctcacagttctgaggccggacgtccgaagtcggtataacctgacccaaatccaggcatcggcagggctgcgctccctctggagactctgggggaggacactttctggcctctgccagctcctgggggctgccagcattccttggcttgaggccacatcgctccaatctccaaagctggcatctggcatcctccctgtctgcccatggcctcgtcctctgcgcatctgcctaatccccctccactccccggcataaggaagtgggcaaggactgcattcagggcccagccagccccagagctgacctgatcacacccgcagagtctctttccaccatgtccactaccctcacagctgccagggatgggggcctgggtaactttgggggccggttcttcagccacagacctggaagcccaccaggtgcttcctcctccctcccatctcagccggctctaccctaccacgtcctgtccatttcgctcctcacctccttcatacctgccactcgtccttgtctctcatgctcccgtctggaccattacccctctcccaggtgcctgtaacaccttctccccaggaccccagacccatttttgttccgcagcccattccccctgccgcagccaccatgcttctgaactggaatcagatcaaggctccccccagaagccctgggctgcctacaatctccctcaccagccccctgagtgatgggccaccgggcaccgtgcccttgatgctcctgtccacccacctggtcagctcttcccaccagctgtgctccgtccacctccccggccatggcatgtgcggtttcccccatatggagcactggtcctctctctgactctttgcctggccagcacaaagggattgggtgggtttgggtagatgtcacctcctgccggaggcatccttcattctggagccaggcctgatgctgggctctgtgttcctccaggccctgcacctccaccagcccctgcctggcacatcagcttcccgagggcccaggctgagtgcgccgggaggcatctccagcctccctcgctacacttgaggctaggggcagccgcccagcaggccctggggggcactgactgcatctcggtctgcagaggctcccagccagcaacaggatggggctcaccgagcacctggggtcagggagaaggaggggcagcccgtgcgccaccgtgcccccccacaaccaagatgatgatatggcagaggccatcatgaggttactttggggggggtgtggtttccgcacatccagatggcaggtgccgggggctgcccaccagagggcacactcctaactggacaggggaccccggccagcgccagctaagctggagtgtcgatgggtgctggaaatgccagcttttctgattttcaagagagtctggaaatctggtcgtttatgtgaactctcctgtttcttaagtttggcaacaaattcaagcttttaaaatcccctgcatgggtcataagcttgtgatctgaaggaaacactctgaaggctggacacagtgtgcacttccagtgtgagaccttggtttatggataatggaccagaagataaaagtgtaggagctggagttgtcatgggatgggtggacctgatggtgccagcaggctggatggcagggtatggcaggggagggcagggtatggcaggggagggcaggctggatggcaggggagggcaggagaggtgagggggtctgaatcaggcctcgaagggggaacacaggtttaccagatggccgagctggggatggggtggtggggtgggagaatggggattcctgagttggcagcatggggttcaggggctgggtggctcggcagggtgcacccagcccagtgagaagcatggggtggtgcaagccgcggtctgggagggtggggcaggccaagagcctgaatgccagcatatagagcagcctgagtcccaacggaaatgaggacccagcgaggagtttgtagtcagggagggtgctggctggcctagggggtcaggggcagcagttcagctgcctgtagagtctgggctggtggctgacacagagagcaggagagacagttggggggcagtagggactggagccagttgcaggggcatgtgttccatccaagacccgctgtggtcagggcctgcgtttccaaggaaagctgggattccatgttcaagacatgaaatctcatcattctgagtgttagcttcagagctttaaaaatattgtttggcccagatggaacatgtgtgtgggcagattcaatccccggctggctgttttgacctttgtcttggactctgggctcctgggagtgggggcagcacttggcccatattgatgcactttggtggatgccctcctggggacacgcacaggcccacagctgcccttgaatgtctccctgcttctctggacggttttgactttataaacacagtaacttttctgaaagcagacagggttggtgtataggggtggagatgacccagacagaggcccctttcctagacagggtgggcggcggggggcggcctctgggaccacatgttcataccctccggccagcccagggttcaagctgagcaccagctggggtgctgggcagggtcttcaggtgggaggtactccctgagggggtctcctcgctgttccccttccttggtcttttgtgtgctggaaatctgatcctgttgtctttgtcccgcaggctggtctgatccggatggaggaggaggagttcttcatcgaacccttggagaaggggctggcggcgcaggaggctgagcaaggccgtgtgcatgtggtgtatcgccggccacccacgtcccctcctctcggggggccacaggccctggacacaggtgaggctactgcaggtgggcaggctgtgtggagagccctctgaggccctggtccccaggggagcatcccagagactcaggcagctctccacagaccagcttggctgctgaggctgagccccggtctcagtggctcagaaatgggccagctgcctggctgacggcagggcgtagcagggctgctggggctggggcctctgttctgggtgcatgtgggtgacaagcagcccagacacctctgccttcatgtctggggcctccatggtggactatgaaggctgtccaagggcccatcttctgttgcctaaaggcaagcaagtgtcgtggagcggggcgggggcccccggccaggcctgagtccagtgcctgcgtctctgagtctgtgcctgtgaagaggcctccagagccccagacagcgcctctcctgctctgtgctgccatggtccctgggagggtgcctgtggtaggtcccaaccctcacctggctgctcagggagaaaggccctgcatgctctttctggatccctggaggcatgtgccctacaaggactctggaggtgctcccagcagcctcagcagtctctgcacagactcatgggcgtctgtctttttcaactcagaacccacgtgtgccctgggcccagaaacgtgaaaggagctgccaggcggccatggtgacagtccatgactgtcgcctcagatctggcctcactgtgccagcccacacctcccagcatcccccagtctctggtcctggattgtggtgaagccagggttggtgtctgatgtggttctgcaggcccatagttctcagggtcccccgtgtggtcagggactcctggcctgtgcttggctcttgctgggagagtgggaagctgcgagctcagccctcagcctctggtcaggacccctgggtgaggagagtctggagtctggggcccaggatcgggcacacctgcacgttcacagcgagtgctccaggggcctgggctgggccagcccccgtgctgtgatttactaaggtactcccgtcactccatagcagccccgcctcatttactgtaggtctgtctgacttcctagcttgacagaaaaattgggtacagcctggcaggcatacttctaatttcatgaaacggcatcagatacctttgcaaaggaattgttccatcaggaagcccaatgtactctggagccaatcagtgcaaccggtggccccttgttccttggtgacaaatcagcgtctgctatgctgcagacagccgggccactgggtactgcctgcccagccttttccagctgtggtctcagcctcgacttatccccacccttggactattttgcagggaaggaaggaggagtaatctaggagggccagcgtggaaggggctgagcgagtgctccagacccgggggcagggccccagctttgctccttgctagctagctgctgtcgggcaagcccagtggcattagcaacccctgtgtccccgagagctcaggggctggtcacttgtgctgtgggcttggtgcttctggctggcctctcctggaagattcagggtggttctgggggcctctgctcaggcgaggtgagctggccacgtgcccttggccatgtctctgatcccagattccatatggtgcttgtcttcctgaacatggcagcccttcccccacagcctggccggccttgccttattttctgggcttctgctggtgtttggcatcttctgctgaatcctccctccacccccacccccaatccacatatctttaatgagaacttgaaattcagaacacaggaaaggaatttcaatctcagaataagcccagaaaccattggccttagaagacgctgggtgaggccagctgccaggtcaggggtgaggctgggctggaaggtgggggtttggtaatgggctgtcggggaggaggtgagcctgtccagccttagctccaggcctggggcccaggctgtggatgtgagcgtgggcctggggctataggtctggatcccagaacttggggctggggccaagtcccctttgcttgatgttcctgtctggtgtcagcagaccctgcatgaggggctcgggccttcagtgagctagctcccacgccatgcacctaatcgttcccacgtggccctgggctgagatcgacacactgactggaagggcaccaggcccagtgagtgccggagctgggtggagggcccacggtgacctcaggcgtccagctttccatctgcctgggccttttcagggcccagagtggcaactgggagatacataaaagctgtgtcctgtggccaggcatagtgaggggcacagcctgcctggcacacaactccaggacctgggtgcgggtgtgtgtgtatgtgtgtgtgtgtataggggaccctttcttccagtgaattctgagggaaccctgatatatcagtgtggccctggcagaagctggcaggaggtgctggctggcagtttcttcctgcctccccaaaagcaacgtctggaagtgggtgtgaagcaccctgctatttatgttctgccggggaaggtgacacacctgccctgggtgtcccagtgggggatgggcatctgtctgggtggcaggatatccctgcagcgtcaggggtgcctccttttcaggatgtcctgttttccccgagaagcccacgggctgctcagggtgatctcggggactcatggagcctcagggaatcattttcactaatagtctctgtcatccaagatcagttgctggattgcagattgcctgggggaaacggatagaaaatgacggttttaaagcatttcacagacaggccagggatgagtgtgtgcactgggcagcttaggcaacacccgggagaggatgttattaggaggggcaaggggtgagggagcggggagggtccttttctctcctccctggccatgctggccttggcagaagggtcctgctcagtgctgctggcctgggaacctggccaggaccggaggccgagctctgaggctgggtggccttttggggagcagtggttgaggtgtccccccaggcattctgacaggcatctccaatccctgttctctgcccttcccaaggccagctctgtgtccagggacactgtgctggggtacagggacagggcaccctgtggcattgtcctctctggtgtgtgtgcatctcatcctgtgtgggactgttgaggagggagtcctcacggagcttgaaacaataggaacattgatatggtttgtctctgtgtctccacctgaatctcatcttgtagctcccataattcccatgtgttatgggagggacccagtgagagatgattgaatcatgggggtgggtctttcccatgctgttctcatgatggtgagtgggtctcacgagatctgagggttttaaaaacgggagttgccctgcacaagctctctctctctcggctgctgccatgtgagacgtgcctttcatcttctgccatgattgtgaggcctccccagccatgtggaactgtaagtccaataaacctctttcttttgtaagttgcccagtctcgggtatgtctttatcagcattgtgaaaacggactaatacaaatgcctctctcacagctctgtgggccagaagtctgaaatgaatctcactgagccaagatcaagggtggacagggctgtgctccctccagaggctccaggggagaatctgtttctggcccatccccgctcctgggggctgccagcctcccttggcttgtggctgcatcatgccaatctctgcccccgggtcatgtcgccccctcctcttctgacgtgtccctgtgcttccctcttgcaaggatgccttgattacatttaggactcacccgagtaatccaggacaggcttctcatctcaagagccttactgcaagcacatctgcaaagccctttcttcccatagaaggtacccgtctcaggttgcagggatcaggatccagcatctttgggggcaccatgcagccagctacaggatgtgaatggccctcacgtacaaggctggccacgcagtgcacagcacacccgggaggcgcccgtctgggtcacgcggaggagcagcactgtaggcttcacttaggcctccccagggcatatagcccagaggcacagcccaggcaggccctggtcctgctgcctccctcactggaccctccaccctgtcgtgtgggagctcttccctgcatgtctaagtgccagtctcagcctggcagtcctcccccaccgcccgcgttaagggacctggagcggctgactccaagaccacgtgcacagagaagccaaccctgtgctgacactgagggcctgtcttagcttcccagagactgaccttgggactctgtgaaggttgccacacagtgagaaagaccccgagtcacgtgttgagcatgtggtctctgtttcagacacacagtgccatttgcagaaagacaagagctgcaaactcagagcctgcagggcctggcaggcaatgccaacaaggacagcagtggaggaaaaaaagataattgcacccacccttggcctggctttcatttctctccttttgatggaaacgtggagaccaagaatacatctccactaaaaagaaacagcagtgggaatgcagccacacgtggtgtccagccctggccttgccatgggcacagggcgtctgggaggccctgcaaggagggacagaccctcctcaactcccttgacctcaatttggtagaagttgggtctggtgcagctgaacatcctatcaagaaaatccagacatcagactttttatgtgaactttcctgatgttaaaatgtggcttaaaatttctggaatgagaggatgaactgagaaggctccaggaatccagccacggcgctgagctcagtgagtcggcaacagctggcttggcagggcccaggccgacccgggtacgagagacagcccctatcaccatgcgaaaggaccaggcctcaggggtctggggagtcactcaggaagtgcctggttggagacacagagacaggtcctggcacaaggacgctggccaggtccagggctcagccagcaaatccagacaaagccctctttccacagaagcctccacatcagctctctgcctccagccctgggccctgcacacccagtgggagctgtcatgcctggggtcccctcccgtgctcactatatagaccaaacaaaacacggtcccccattggctacccatgctttctgtgatgcagaggtagaagcatcttctgccctcctctgtgggctgctctcctggggctcgccccggcctggccttgggacagaggaggggcaggtgcttcccatcctggggaactgctaccaggctgctgtgcacacaccctgctgggctgaaggaagagaagtcagacagcaacgtgccagtgaccttggctgcctccaccccagacaccgccggtgccaagcctctgcctgctgctgtcaggctgcagcatcctccctgacgggcagacgaggcacgccaccacgggagcctctcagcctcgctgcaccaaggaaggccctccaggagacagaggacaagcgccggcactgggcagctcctccatgtggctgagcgtggctgccacctgcagcccacagccagcccttccccaccaggccaggaagagcccctcctgacccacagtctccaccctgtgactttgccttgagttgggtaggagttttccaggccgcaggggatcctgggggaagagtgggcggcgggggtgggggcggacctcaggcatgacagttccccctgggtgtgcagagcccagggctggaggcagagagctgtggggcagcctccatggaagcagcagccttgaatgacccaaggtggggatggcgccctccagtctcacaaagagttgagtgtttcagcaagctcgtactggttgcagtgtgagggaggctggtgggggaggctggagcaatggcacaggagagagagaggagctctgttctgtcagaccacaggactggggagcaggcgagactcatccattcagtggcgagcagatagccagccccactgacacagcggatgtgaggcttggcccaggtgggggctggggggcccaggatggggcaggagggccgtgtgctttgttggggggtgccaatttgctgaatgccaggtcagagagcctttctgccctgtagctgtcgacgtccatctcagcttcctgtggctgctgtaccaggttacccacaccttaatggcttaaaacagcacacctgcattcctcacagttcgggagctcagaactctgaaataggattttaggggctaagatcaaggtgctggcagggctggttccttcgggaggccccagggcagaatccattcctggcccctcccagctcctgggggctgttggcgttccttggcttgtggcaacattgctgcagtctctgcctccctggtcacgtggcttctcctcttctatagccagctctccctcttagaaggacacttgtgataacatttagggcccgctgggaccatccaggttactttccccatctcaagacccctgatttaaacacatttgcaaagtctcttctgccatataaggtaatgctcacgagttttgggggattaggacatggacgtccgggggtcatgattcagctgacatgtctaagtgttgaaccttgggtcctaagggagaatggagagagggctttggctggatttgcagggtgagccctggacctggccagcgtcttgtgcccagacctgtctctgtgtctccaaccgggcacttcccaagtgactccccagacccctgaggccagggcctctggcgtggtgataggtgctctctctcataccctggtcagcctgggccctgccaagccactgttgccgactcactgagttcagcgcctcggcgctggatccctggagtcttctcagctcatcctctctttccaccctggagctgagcctgcagcccaggccccgggaaacccagggagaagcactgattgtgaaacccgaggcggctccgggaggcgtgcttcagggctgagcgcacccttggcagacgccgcggcgctcctgtcctcgtgcagaccgggcccttgggatggctgttggagatgccagcgcggtgatgtggcccacgcggaaggggtgggcgggggccggcgctgggaaagccgaggctgcacattctccgaggctggagttgcctggggtcagccggggagagcaggaggggccagctcccgggcctggctggctctctggctggagtctgctgctcagagcgctgccctgtgggtgcttcccaccccctgggctgtgaaggcagaagcgaggcttgcagccccagcgagggctgggccccccttattccacagtggagacgtgccagggtgtgctccccctccacggcgtctgggcctggcactccgcctgacagcccccacgtgcgcagcaactcccctgtgcctccgacataaatttagtccctgagtctcaggcttgcccttcccccgccacctctcccctcccgacatggtttctggttcaggggtggagccgaccaggtaaatgtggctggcaagggcctggatctttggtggagcaccgtgggcaggtgacaagcctgacccggaggatggtggccttggccctggcttggctgcagccccaactcgagtgcaggggacagttctggaagaccggccagtggttctgaggagctgcattagggctgctcccacagatgcttccagcactaggtgggtgagtggggtgggcagcgggcagtttggtgcagggttcagtgtgctcagccccacccggcatgctgctgttggtgcaggggtcagtgtgctcagccccgcccggcatgctgctgttggtgcaggggtcagcgctggtgcaggggtcagcgcgctcagctccgcccagcatgctgctgttggtgcaggggtcagtgtgctcagctccacccgacatgctgttgttctggctcactaaggggcccagagcagctcacccagcccctcaggatctcagaacctgggtgctgagatctccactgtacctgggtgcagtggcacaggggctgctggaattacgcagggcacagggcgcctgcccagtgctcactgcgacacttgctctccgtcccctttccctcctctgcctcgccatcttccacagacacagtgaattgatactttctttccttcccttggatctgtgttgggaatgtcctccaaagagcttttcgggttttgcacaaggtaacagtccctggcatgcagacagtacacggctcaggggtgaagctgtgatctgctcacgggggcatctggcgtttgatcagcaactgtgggctgggcatgccccctcttttcaggtccccagcatggcagaggcaggcttctgggagagaggcatgtgtccagggcatcttttcatgtctgtgacatctgtgccttggatgtaggagcctgctggctggggtgaagtttgggcaaggagcagtgggacctgcttgggacccaggtgaggcttccttcatgccctggctgccccatggatgacggtgaaagagacatgggcaccctgcataatggggacaaagggactgcatcccatagtgggtccctagacagaggcctcttggggatagagaggggtggggcgacaggtgagaggcgttgggtaccagcatcagggctgcagaggcagctgtagggacatctgaaggggacaggaagctcttccccagcagcagcgaggacaggcctggctcagaaactgcatttgggtccgaggtccaaactctgccagtttgtgccagccggaggcctctgaccacaggccccatctcctctcagaattctctgcaggttggcagacacttcagccagctccaagcctgaaatattttctataaaaatttccaattttctttgacccgtttctctttgaaattaatcctaggcagcgctgtgctctgggccctgaaggagctctgagcggggaaaggtcgcgcagtcagatgggcgtgctggcgtctgtcttctctctctcctgctctctggcttcatttttctctccttctgtctcaccttctttcgtgtgcctgtgcacacacacgtttgggacaagggctggattcttcggctgggatgtctctcagagctcttgacttggtccctttggctggggcttgccgtgaggtgtgggctgcgccacgagcacagctggtagagaacccggccaggagcgcagctcacgcctcccacgcctcccatcccaaactgtcggcacacccagagagagcctgcaggacaggacaggaggtgacctgggcactgggcctgtgtggagaggtggctggtgcgctggtctggttgggaaaaggccgggcacctgaatgccatgcgggttcattaatgctcaataataatgctgctccccaaatcatgggggaataatgctgctccccaaatcatgggggaataatgctgctccccaaatcatgggggaataatactgctccccaaatcatgggggaataatgctgctccccaaatcatgggggaataatgctgctccccaaatcatgggggaataatgctgctccccaaatcatgggggaataatgctgctccccaaatcatgggggaataatgctgctccccaaatcatgggggaataatgctgctccccaaatcatgggggaataatgctgctccccaaatcatgggggaataatgctgctccccaaatcatgggggaataatgctgctccccaaatcatgggggaataatactgctccccaaatcatgggggaataatactgctccccaaatcatgggggaataatagcattagcagctctactgcttagggggagactgaggctcagagagggcaccttgcctgctgccacaagtgtattttcctgcattcactcgtcacgttcttgctatgtgtccaccatgtgtctgacaggactgggtgctggggctgtagcagcggaggaacccgatcgagtccctgttctctgggctcacagccccgcaggggagacctggtgagcagatgctcgcagacagtggagaatcctgtgaacaaagtaaaacggggtgaaagggcagcgtgagaaggcaggtaagggagggaggcgccccaggttggtgatgatgggaaagcccagccctgggaagggtgttccaggcagagggaacagcacatgcaggagccctgaggctggagttaccgcagcgtgaccaaggggcagaaggaagagctagtacctggaactgaggacgtaatgggggagtgggaggcgtgcagggccgggagggatgggtggcactcatcgctttgaagggacggtcacggtacggggtgagaattcattccctgtgcggtggaggcctttggagggttttcggtggacggtgtggaagcagggaggagtcccggtgacagatggcggtggaggcagtgggttcaggatgagtttgaggtggagcttccgggacgtggtgtgaaggaaggaatcaaggacacatcctgcccctgagaggtcacgtggctgggaggctggctggtggcctgaggctggccgggcaggtgtgctggtgggggtggccgggcaggtgtgctggtgggggtggcaggttaggtggtctgggccacgtgcaggagtcagaattggcacccatcactctgactccacagctgcccgcttccactgctctgcactgccctggcccagagggaggtgttttcccaggaaagaaggtgccaaggccaagacccatgtgttcccagactcacggggcgggggcaggagcccccaatgcagccccacaggcagccaggccctgggatgcactgccacctcctcttgctccgggaggcagaggctgtgctctgtggggcgggctgtcagggacagtgtgaggtttggggtcccatggacgtgtgtgcatccttgtttgtctagcaggaccggtccagcttccccttgcctgccactgtggggagggaccccagactggccgggatgaatggatgcaggaactgtggcctgcacgtacttaggagtgtgcagggcagggtgtgtggctgcctctaggcctttgcaggcagagccttcctgtccaccccaaggggccgcaggcagcgctaccagctgttccccacacaaaagctgcccgagacagctggaatgctccctgctcctggtgcaaactctcttgaaactcaggggtggggacatcctgggagctgacctcaggttctgttcctgcaaataggtatctgttgctgacccggcagatggcggcctgagccagcccagacgcgctcgagccctggccctgagcagccatcagggggcacctactgagtgactaaatgaattaggaaatcccagcgcttaacagactcaccactcggggcagagccagactggctcccacagcagctcctggtttctccaaatcctcaccagcacgggggctttagtgtttaatattttgctgctccggcagcaaagcggcgttgctttttgcgctaatttgcgcttctttggttactggcgaggatgagtgatcttccctgggtttgattactctgcatgtctcctattcctaagtcctttgcctgtttatctcctggggtcttatatattgggataagccctttatctctttttagatattgactttctgtcatgttcgatacaagcttttccccaggccgtagttcctctttcctttccagttttgttagcgttagttgcacaaaagtctgtttttctgtagctgagtctgaatgatccttctcctgccccgttggagccaagtttgcgttcaaggacatgcccattcaccgagggcctgcgcgaaggtgggcactcttcatggtgtcatttaataggcacggtagtcctggaagcagagagaaaactaaggtgcagggctaccactgtccaagcagtagcgggaacagcagggagcaagaagaacgtgacgcgttcctggagcacttaccgttgaccgcgtctgccagcacgctgcaggtacatcatctcctaggattcttgtaatgagccccacggtgggttggtgcttttgctgtgcccacgttacagatgaggaaactgaggtgccgacggtcgcacagatagtaagctgtagaaacagtgggagccaggccttttgactcctgcatcaggagggaggagcaggcttagaacccagggctgctgacacccagtgcagtgccctcctgtccccgctcagagcctgggctggcaaaacccggtagcctgtgaccccatctgtttgttggacagagggccttccaagcaccaaggcctggaactccacttaacggctgcagaaactggggcccagcgagggtgagtgaggatgtgtctccaggtcacttagcacgttagcttcggggagaatcttttgcttacagtggaatttgcagcattttgaggaatgcctggcacacggttggtgcgtaaatatccgtgaaaagaaagaataagcatagtgcctaggaagcccggtcgcccaggagctcactccgggagcaacagttgctccctgcaggcattggagggcttggcactgacgcctcctgttgttgccacagtgtcagggctgcagactcaggttggcagctgtgggtggctactggtcccatgggcccatgggacattgggtggccctgggcctttgctagtcccacttcctcacacttgagcaggactgacttcgccggcttgtgacccatccggcagggccctatgcccactttaacactctgtcattcctgccttagaagtcgtaatcactttttgaacaagggactgtgcgtttccattttgcactgtgccctgcaaatcaagtggccagtgctgttcatcactctttcttctgtgactctgcttcctccctgtggtctcatggagctgtggtccaggccccgaggttgaggacacagggcactgcacagtggccaaaattgggggtgcccagtagacacgggctcccttccttccaggcccaagcaccagcactttctgacagttaactgtctgtcctttatttgggaatgtctgatgccagactgcagatggcgaggaagatggccctgtccatgctggaacgacagacccggtatcaggaatgtgcccctgtgactgccacaggcctgtttggtgcctgagggcagcaatgcgtgaatcccagcctctgccctggggatgccgtcgggctggagcactgctcccagcgtgccttggccactgttccctgcgcggttgtctctggacataaagcacctgtggaatcccagggctgctccccttcctctctcccttgattcatccaacagatctttacccggcacgcacagcaggaccgggcactgggccaggctctgggaccagacaggcacagccctgacctcatacagcccacagtgcactagtcagtccacaaatacctgcacaatgaaagacttgggaagtgccacagagtgagcccgcagtcactggacgttgggctgaggcctggagtgtgggttgcagttccccaggaggaaaaggggccagggcagcagatgcgaagtacctgaggggtgaggacggggcttgtttgggggtgtggcaggaggggcagggtgagggcctgaggggactggaggtcagatcacgatggcttctgtgggctccgtcgtggaggaggggctgtgccatgcagcaggtggcatggtctggtttccgaggagggtgagcacggaagaggcagggagccggcaggaggctgctgtcctgtgtgcagggagagactgcggcctggatcaggtggccatgggaatgagagcagcggccggatcagcccctcagcgccatcgtgcaggaagggtgttgggagtcctggtaggcagtccacaggttggtcagagggggatactccttgcctggcagaaccgtattcccattccaaatcaccgtgaggctgggaggacccagatcacagccccacccggctgcctgtgacagctccacccctgtctggacctcagacctgtcgaggtggcgctcgctagaatcatttcctctgtgggatccgggcctgggaaggtccctgtgtctggcccttttctcaaggacctttcccagatcattctggacacatatttgagtccagctgcagattcctagctgcgagcaatgctgcccaggcttgagccttttttggacgactgcagggactccgtggggtgtgccatgggggctgccttcagcctcctcatgctctgcctttgacaattcacgtggcaggagctggggccgaggctggggtggccaggcttggagggatggagtcaggagaacaaagggctgagatggctctgcaagtctggccaggcgacgtccagcagggcaaaaaggactaggtgctgcccaaaccacagcaggagcacctggtgggctgcggggaggagctcaggggtcaagttgacgaggagttcagtacacattgtctgggttggcggggggcggtctgggggggtcaggctgggaataagaagcatgatggcctgctcaggtctgcccacccaaatcagagcccacagccatgggcagtcccagccccagcgtgtgcagagggctctggagggcagagctggataacactggccccaggaaggccagagcccccaggatgagagcatctgtcctctcaaccttgcctggagcctgggggtcaggcgttcgctgaggacagtggtctcgtatgggcacactgatgggggcctggcaggtgacgccagcagagatcactgggcccaggtagacacggggtcggccagcagcaggagggcctccaattttataagagaagctggaaattgattttacttacaatctcttcattttaaactgttggcagctaattcaaaatttgtgaaagccgtgtaagggttgagcagcccggggcagtggccgggatgggggtcaggaggcggcctcagtgctggggaccttcactggagcccacggcgctcaggaccgagcttcttggatgtggccagggctgcctcggagttgaaatgtacttcagaggaatttttattttcctttcgggaatgtcaagagaggcctttccagcggttccgtttctgtgaggcgaaacctgcggtcgtcctgttgttcttggaggcagcgatgaagcccatctgtagcgcatcagcgggagccagcagcggggagggcgcagggccccagcccaggcagacagagctgttggatgcggcactgagggagcaggcgtggcgccgggttcggagcagcccctggactccccgggctgggcggacagacccccggctggtgcatctggtgcccagttccgggtctgaggttctgttccccgggctcccggcacctatacccgtgcctggatgtcctccaggcccccgcagcctggagagcaaacggccgatgatggtctcaagagggttctgcccttgtgtccagaacgtcaggtgcctgtgctcctttgttctaggcaatatcccgggagctcccagcattcttggccttcatcaccacgaggacaaagctgggcttggatttgtcccgaggccttgaactgggaaggagtgtggggactcacaggcctgtaggaaccacctcggccacctttgaaactcacaatgtgggcccttggtgacagagaccccggggaccaggcctgggcctccctttcttggtgtccttggtgctccccatgggctgtggtgaccccagtgatgggccaggcagccggggccgccagtgtgggcctggcctgcggagtccttgctctggcctgacctcagtcttctcgtctgtatgtacatcggggtgctggactaaagccaggcctcagccctgcagctcttgggcggcctcgccgccccaccccgcaatgttttatttgactcgtacaacggcttcagaaatgttgagtgtacacttaaaaatcaggaggtttcacatgaaaatctcaattttcagttccttcagaaggcctggccaccctgggcgtgttcctgccagcagcactgggtgggaggctctgtgcctcctctggatgggcgaacacaacccctccctccctgccgattcgtgcctggcccccccactcatgctggccccgcctgcctggtttgcagtggagtgtgagactcctggactctggttggtagttacacgtacataaactctctccgtctctctctcctctctctctctcacacacacgcaggcatgcacacacccatggtcagagcagacacatccacatcttcatccatgtaggaaatgctggagtgaaccgagccgcacccaggagcttccctgagctgggcaccaggagcccagggtctgtcctgtctctggatgagtcctgctgccttggcctcagctgaggcctcaggcccaaagctccatggcaggcctgacactattttccttataataagcccccgtcctctttcctgttgggcacccgtgtccccaggggcgggtcacaagatgacaacttgggacctggcggcttactgttctgtgggctgagctggctgctgggccctgtgcgaaaggcacctgtgctcccacctgaaggagcctggggcctctgctctgagggcagaacaagaccctcccggtctccctgtgggaagaaggaccgtgtcagagacgctgtccacggtggaccaaggccaagctgcgggagaggctggggacagagaaggagactggtgggtacctgcccatgctcatgtgttgggggtgtaggcagaccccagggcctaccagagcagccagtggggagcagccagttcctaggcccagcagcatctgtgcaaaggggtccagtagggtcacagtgcccgaattgtgtcacacactccagggctgcccagccctgcctgctgctgcagagcccctgatccccgaggatgaagacaccaggaaggagcaagaagtggcccctgtgccatcagtgtctgtgccgtgccacccctgcttgggggcacattggttttccacatggtgtcctttgaatggaggtgaggcgggccccagccaggccataatcttgggagacggctctacctcagggctttgctgaccccattctgagtcaggccccagccaggtcttgggagatgggacagaaagtgaggggaccccaagattgaattgtaggaaggatctgaactcactggtggaggcagagagggaagatggggatgaggctgatggaaatgcagtctgctcacaggcacaaaggccacatcggcagccctagccctgagcccaccccacagttcctgacccccaatcctcaccctctagagatgacctgtggtcaagcatgaccgattctgccccaaaaatgtgtataaatggcaacagtgacaaatgacgctgctatggtcttgcctctgactttgttacccggttcacttgccatggatgtgaaggattcactttccagtatcagagtctttctgtctacccattcatccatctatccaatcattcatccatttatccatctgtcatccgtccatccattcatctatccaatcatttatccattcattcatccatcgtgtattcattcgtctacccactcattcatccatccatctatccatccatcattgatctccattcatctacttactcatccatctacccatcccctatctacccatccatccatccaattatttatccattcattcatccatcatccatccatccatccatcattcatcatccattcatctacacactcattcatccacccaatccatccatccattcatccagtcagtgtctgcaagcaccccaggccagcgccctgctgggcactgagtatgaacaatctggtctctgtccctgaagagtctggctgggggaaaaggcagactcccagatgaaccatgacaaatgctgctaataggctgcttggcagcccttcctcattgtgccctgttgtgtttctttcagccaaaatatatttctgtgcatctttgacgccatcaacagttgataggagagtcaggcagagggggctatgggcttcagggacagtgagagggagtgtgtgtgtgacctggtagcttagagaatattcttgtgggcttaatctgcacgcccccccgacttcacccatctgggcctcttctgacctcctacaagcatttgagttgcttcctctgaccttttaaaaatcaatggactataatacatatgagtatgaaagtgtgtaatccagtggtttttggcagtgttgtgcagccatcatcaccatctagttccaaaatgttttcatcaccccagtgggaaccctgcacccagagcagtcactccccattccccttcccagctcatagtgaccactaatctactccctgtgtctttggatttgcctattctgtatacttcatagaaacccaattgataatatgtggcctttggggtctggctggagtccttctaaggattgatctaaaagctccagggccccttgtcatgggagcatcatatgcccagcgacatgaatataaaataataatactgcataattccagaataggcagcagcgtgtgtgtatgaagctcgggactgtgagacaggagggagaagtggggactgtggttaaaacagtccagagtgcctcttcctaagggaggcccctcctagttcctgcagtgagatccgtgttgacactgaagtggccttgtgccctgctgccccgccctgggatggcatatattagagggggctccgatcacctctgaactgggaaatgtggagtagtgcaggacacagcagcaggaaccacagctcccagccccaccccagagagaaaggcccatgagcagctggtgcagggactggactggagccgatgatcagatttggagttggtgtggacatggcgtgtcacctctcaggagagggggcaggaagtgaggagcctgaggccaaagggtgagaagggtctgaactcactgctggaggggcatgtgtgtccccagggttgcagcctggctggggcagccagcacagtggtgacaggacaaattagagaaaaagggatgcctttttttttttttgagatggagtctcactttgttacccaggctggagtgcagtggctcgatctcggctcactgcagcctctgcctctcgggttccagtgattctcctgcctcagcctccctagcagctgggattacaggcatgtgccaccacaccccccgaatttttttgtattttttgtagagatggggtgtcaccctgttggtcaggctggtctcgaactcctggcctcaagggatccgcccaccttggcctcccaaagtgctgggattataggcctgagccactgcgcccggccgggatgtctttttttataagacaaattataaaggagaaaaaaggacagaaaaaccaagacaaattgagatcatagagtaagatgggagaaacaagcccagatttatcaataatccaggtaaatgtaaatggattaaactcacaaattcaaagacagaggctgtcatatctgacaaacgagacaaaccccaaattcaaaatctggctggacgctatcaccagagtaaagtgtaaaggcaagaaaaagtggaaagtaaagtatggaaacagacctatcaggccgccaaaggcaagccgacattgctgtatcaatctcagactcaacagacctcaagacaggagacgctgctggggaaagacaggtcaccgtttaatgagaaaaggttcatttccccaagatgataaagcagttctaaaggtagagtcacttaataaaataacctcaacatatttgacgtgaactttgttagaaatagagaaattgacaaatttatcatcatttttgagagaatccaaccatttttttccaattggtgttggatcaagtagacaaaaaacccagcacagataaggaagttctaaataacacaaataataagcttgacattgatgaattttgcatctgacaagtagaggttatttctttttctcaagcacataggaaacacttgtaacaactggtcaattaagtgcaaatctcacagaaactaaaagaatagtgtcagcaggtcttgttccctgaccatcatgcctgtgagagagaaattaatagcccccaaagcaaaaatccccattatttggaaatttaaaaaaaatacttttaaataattcatgggtcaaagaagaaataatagtggaacttcaaaaatacaactcaatgataataaaagcactaaatatcaaaacgtggatggaaatttacattagaaaagaaaaaggtctaaaaattaaagagataaatttccagtgtgagaagttagaaaaaggcaacattgatccaaagaaaatagaaggaaaaagataatacaaaataagatcagaaatcagtgagacaaggccaggtgcagcaaagtgcctataatcccagcattttgggagtctgaggcggatggatcacctgagctcaggggttcgagaccagcccgggcaaaatggtgaaaccccatctctaccaaaaaaatctaaaaattagctacacgtggtggcatgcacctgtggaaccagctacttgggaggctgaggcaggagaattgcttgagcctgggaggtagaggttgcagtgagctgagagtgcaccactgcactccagcctgggtgacaaagtcagaccctatctcaaaaaaaaaaaaaaaagaaaagaaaaagaaaaaaaaatcagtgagacacaaaacctctgagttctgatcattgttgctgttaggaagattcggggtcagtgttgccagatcctcagtttttcaagataagtcaaaaataggtaattctgcagacaatctctgcattaaaaaaaaagtgtcagtaatctgaatttggcctgtgcacgtctttcctcccagagctgcttctgcacacagcacctcctctctgggccatcttctctgtggccagcttctcctcgatggccatttgtggacaagtctttgtgtgtacatatatgttcattactcttaggtatatgcctaggagaattgctggctcacatgataacacagtgtttcactttttgaggaaacaccaagactgttttccaaaatgtcctgcacgtagtgtccctcctggagggccggggctaggtcaccatacacagaacacgcagagacaccccagaaggccaattcttgtgtctagttagcagggacctgtctctgtggggtggggggctgctggtttctgactctcatctgcagacccctcaggcactggcctcgttgtttaattcataaattggggaggtgatggagggggtctgaggcctgcttttttggtggcagagtaatttctacattgggtccttgctgaagtaggtcaccatcaggcagaaatacgattcctgagactttttggagataacaagttcaaaccctgcctggctgggtttctagcagctctgcttccagtaccgtgtggatgtcattttcacttacgctgtctcacaagggcatgggtggaaagaactctgtttctaggtaagggatggaaggctcagagatggcacaattagaaagtggaggatctgggatttgaacccaggcccgcctgatgcagaattgggctctttctgctacactagcttcaggtgccggctgagccctgggagggaggagtgagcaaatgcatgaggctttgcctttgccgaggcaggacaagctgaagaggtctttctccttccctagagtgagcaggatctctggacttctctcctgtctagtgtttcagctggggctccactggcggaagcaatgtgcgggcaggatgcgtgatgcctgtgggtggacagtgccactgtcagaagacaagccgaggctgctatgggagggcgttagagggtgacattggcctcccatcagccaggtttcgaaagttaggagcagatgtacagggtttgtcacccaactacttgctccccttcttggttaccgcatgaccaacccagtggcctcccagggccttgcgctacacaacactggacagccagaaagcaggtaatgctgcgtcacccacagagggttgcctggggcctgggctgggctggaaatggctctgagaacagaggtaaggagtagatcattgtttaatctttcctttatggtgggtttattgagctgtaattcacatatgctgtagttcagcgtttcgggcgcataattccataatttttactatattcactcagctgtgcaaccatcaccacagtcaactttagatcattttcattgctcccaaaagaaaccctgtacccacgagccatcattccccattttccctcaagaagtgttacttcttcctttgcaatgtggatgccttttatttatttatttttttcttgctgaattgctctgactagaatgtccggtactatgttgaatacaggtggtgagagcaggcttccagtcttacagttgaccatgatgagtacttttggcttttcgtaaataccctttatcatgctgaggaatttcccttctagtccttgtttcttgagtattttttgatcacaaagggtgttgggttctgtctaatgctttctctgcatcaaccaagatgactgtgtggtttattttcctccattttatgaatgtagtatattatatggattgatttttgtgtgttgaaccactcttgcattccacggataaatcccacttggtgattgtatataagccttttaatatgctgctgaatttggtttgctagaatatcattgaggatttttgcacctatatttataagagacattagtctgtagttttcttatgatgtttttgtctggtttcggtatcagggtaatgctggcctcatagaaagatggatattaattctttaagtgataggtagaattcccagtaaagccatctggtcctaggtttttctttattgggagtttttgatgactgattcaagctctttacttgttatagatctgtacaaattttccatttctccttgagtcaattttggtagtttctgtgttgctaggaatttgtccatttcttctaggttatttaatttgttcgtatacaattgtacataatattctcttataatcatttttatttctataaggtcggtagtaatgtccccacttttgtttgtgattttagtaattggagccttctctctttttatcttggtcagtttggctaaatgtttgtcagttttgttgatctttcaaagaaccagcttttggtttcattgagtcttcttattgtttttcaattctctattttgtctaccttcactataatcttgattatttccttttttctgctagctttgagtttctgttgcttttcttctggttccttcatgtgtaaagttaggttattgatttgagatctttattatttttaatgtaggaatttgaagctataaatattcttctgggcactgcttttgtatgtcctttaagttttgggtatgttgtgtttttattttcatttgtctcaagatttattatttattatatattctaatttatcttgtaacatattacctgacctaatggttctttaagagaatattgttaaatttctacatatttgtgaatttttaaagggtttcttctgtcattgatttctagttttattccactgtggttggagaagatgctttgtatggtttcagtctctttaaggttattgagacttgttttgtgacctaacatatgacctatcctggagaatgatcatcatacatgagaagaatacacattctgccgctgttgagtggggtgctctatgtatgtctgtcaggtctagttgatttacagtgttgttcatgtcctctattttcttactgatcatgtgccggttgttttatccatttttgaaagtggaatattgaagtcttcagctattattgtaaaatggtctatttccatcttcaattctgtcagtttttgcttcatagattttgggattctgttgttaggtgtgtttatgtttataattgttatatcttcttggtggattgactctttcatcaatatataatgctgttctttgttgtaaaatttttggacttgaagtctatcttgtctgatattagtatggccatcccaggtctcttctggtttctatttgcatagcatttctttatccatcttttcattttcaaactatttgtgtattttgaatctaaatttggtcccctgtggataagcatatagttggattatatcttgggattttttaatccattctcccattctctgaattttaattgcagcatttagtccatctgtatttaaataattactgataaggagggactgaattctgctatctgctatttgttttgtatatgtcatattctttattcctcaattcctcaaatatttccttcttttgtgtttaacacattgttttttagtgtactgttttgattcatgttttcatttattttgctgtatatttaaaagctatggtcttattggttatcctgggaattacagctattatcttaaacacataacaattttgtttgaattgatatcaacttagtgtcaatagtatacaaaatgctttgctcctatacagctctgtcttccccaccctttattataatattgttacatttcatacatgtgtgtctattaatgtagatttataattattgctttatgcatctatagactaaatcatataggaaaaaagagaagagttacaaacgaagattttggggttccctttattagtattcttcatttcatcatatggctttgagttactgtcttctgtccttttatttcaacctgaaggactttctttaacacttattggagggcaggtcaactagaaaacaaactctctcagtttttgtttctctgaaagtgtcttaatttttcttgtatttttgaaggatagttttgttggaatttttagccgcaggacagtatttttttcagcaccttaaatatgtcatcccgttggtttctggcctttattgtttctgatgacaaatcagttgttaagctcattgagagcccttgtatatgtggcaagctgctcctctctcgtggatttcaagactctctttttgtctttgtcttttgacaatttgattacaatgtatcttgatgtaactctttgagttttcaaacttggagtcattgagctccttggatgtgtagaatcatgttctttttatcaaatttggggaatttggagccattgttttttcaaacattctttatgcccctttgtttctctattctctttcttgaactctcattttttgtattttggtgtacttgatctcttaggttctgttcctttttcctcattctttttccttctacttctcagattggatgattgctgataatgtaagtttgctgattctttgtttgcctgctcaaatctgctattgaactgatctattgaaatttttatttcagttattatgcttttcagctccaaaattgtttgtggttcctttttataatttctatttctttattgatattctctattttgtgatacattatgttcttgctttacttacgttatttgcccatggtttcttttagttctttgaacacatttaagacaatttatttaaaatctttgtctggcacatgaggtgtctaggcttcctcagggaaggtcttttttatttcctgtgagtggaccatcctttcttgttattttgcatactttgtattttttgttggaaactggacattttgaatgtggagactctggaaatcagatgccccccacttcccagggcttgttgttttttatgtgttgttgcttgtttgtttagtgatttttctaaactatttttgtaaagtctgcattgttcattatatatggccaccaaagtctctgttttgttagcttagtggtcagctagtgatttgacagagactttcttaaaagccagggtaggaagaaatactctcctcgtctttgtagattggttctgtgtttgagcacacctttgatgcttagccagactgtttacaactctgtcttagccttcacttcctacttgtacagaccctaaatgtcagccagaggtgaaaacttttgagtcttcttagaccttttctgagcatgcatctcaccctagacatgtcagtggtagaatcctagattctctggtatgcacaagagctttccaaaaaccttatttcctcaaatatctccttccctaccctcttcctccccaagcctttagatatgtttattgtgcgtcttgccccaactattgtcctgtgccccaggtgtctgcagctaatacatttacctttaaatacttttgacaaacactgtctgggaaaccacttcagtcctggggaagctccgagacagttgaaacaaaggcaagccagcagatgggttaaaacccacaaccacaattctctggatataaggtccatatttctttcttttgagttttcaaactgggagtcattgagctccttggatgtgtaggttggtatcagcaacctacaccaggaatgtggtctgccatcttcatggccactgctgagttggagaataagataatggtaagcaagtaaattaaaacaccataacccactgtcaccaaaattcagtagctgctttcttcattaagcattccctggttgttgtaggtttctggttaaattctggagttccaaaaaagtcgattctgagatttactagcttatttcctgtttttgtggaggggcagaattttggagtcctctattctgtcactttggtgatgtcctctcccttgtcgtatgcatcttatcagaatctttagatttatattaacttaattcctgtgagctatagaaacattactcttatatagctctattcttccacccccatctttgttttttttgttttttttttttttttttttttttttttttgagacggagtctcgctctgtcgcccaggctggagtgcagtggcgcgatctcggctcactgcaagctccgcctcccgggttcacgccattctcctgcctcagcctcccgagtagctgggactacaggcgcccgctaccacgcccggctaattttttgtatttttagtagagacggggtttcaccgtgttagccaggatggtctcgatctcctgacctcgtgatccgcctgcctcggcctcccaaagtgctgggattacaggcgtgagccaccgcgcccggcccacccccatctttgtactgttcttgctgtgcaacttgtgttggtttttgattgctgcggtaacaaattaccacaaatttagtggcttaaataatgcaatggtattattttgcagttttggaagtcagagtctgaaatgagtctcactgagtttaaatcagggttttggcagggttttgttccttctgggtcctcctccggggaggatctgtttccttgccctttccagtttctggaggccacctgcattccttggctcatgacttctgtccttcgtcttttatgccagcaacatcaggccaagtccttcccgtgcagccatccctccagtttctctcttctgcttcccccttccccctctatggacccttgtgattacactgggcccatctggctaatccaggataatttcaatattttaaagtcatctgatttacaatgttaattttcctttacatataaccttacagatagataggttctggggattagaatgtgaacatctttggagggccacagttctgcctaccacacagctatatatgctacaaacctaacaattgttgtaattattgctttatataatttcatgcttaaagaagctgaaaaaagagaggagagtacatatatatcaacagtttgccttcctgttgaccatttctggctctcttcatttgttgcggtggattcaagttcccatctggtgtcatttttttactccagtagctgtgtttctgttcacctgctttgtgctgttagtcaaatatattacatttatatattatatgggcccaataatacaattatatacatcttcttctatattattgctttttaagccagttaagggaagaaaagagaagaaatacccatttatattgtcttttaaagttgcgtgattacctttactggtactgtatgtgtgtgggtgtgaattcaagttaccaactgaggtcacttgctttcagcttgaagaacttcctttagtatgtctgataaaatgggtctactcataattctctgtttttacttatctgggactgtctatattgcaccttaattttgaaaaatagttctgctggagaaagattcttggttgacagcttttttacattggatatgccattctgctgccttctggcttccattattaggagaagtcggctggaaatcccactgggattcccacatatgtggcaagtcatttttcttttgctgctttcagaattttctctttgtctttggctttcggcatttttactatgatgtctctgggtgtggatctcttggcatttatcccgtttgaagtttgctgagtttctcggacacgtaggttaatgttttcaccaaatttagggagctttttgccactgtttcttccatcttttctgctcctttatactcacttgcctctttctgggactcccattgtgcatatgttcatgccctttatggtttccacatttttcttaagttccgtttacttttcttcattcttttttccctgtgtccttcaaattgcataatgtctattgatctgttttcaagattctttcttctgccagttccaatctactgttaagcctctcagttatggtgcttttcaactccagaatttccatttggttcttgtttataatttctctttattgatagtctttatttgatgagatattgtcatcatcactcctttacataagcatggtttccttttttcaaagacatatttccaatggctgctttgaaatctttgctgcaaaatctgacagctgttacatctgacatctgggctttcttaccagcagtgtctgttgccgcctttttttctgtgaatgagtcatttgtgtttctgttgtgtgaaactggacattttgggtcatgtggcagctctgcatactgattcccctcccccatctctgaggctgtttgcagttgtttgtgtatttatttgtttcctgatttggttagactgttttcacaaagtctgtattcttcacagtgggaagcctcagctgttggagggcacagccttgagcgtgtgcagggtcatcccgggatgacagtgatttcagcagggctccctatgactgtccctttctctgatctgtctgttacactctctgcttcatttggtatcacacccagctactaggcttcactaattgagggatgattgctctattattttcaacaatgtcctgagacataaattgtcacatagtttgatccaattaaatttgggtagggatgattttgaggccagtctttgaaattcattctccccctggaagagatcctcataacgatctgttctcctgattttttttttttttttccagtaaataagctggtctgtggttcaggttgttgttctcatagagctgtcagcctcctcttaaattcttgccgccagaatcttcactgaagccaccactccaggtattgggcaggaggtagcctctgatcttcttggtttgcctccccctagcatggaatatttttctagcaagcaggctggacttagggtgattaggagcccagcactctcgccctgctgcacctgagacggagctcctgccctgagttagggctgggtggaggaaggtgctccggcctttcggtcacactcagcagggagttaccctctgtcactgggagttggagatgatgagaaacgctggtggcccatctatcctggtgaaatactgtattccttgactgggatctgagggaagagggagccctgtgttcttggccacacacccccagagtggaactccccataagctgaactggaaggactagaagcggggaagagagagcaagtgatggctcaggtgccaccgattcttgctgttcttactgggatttttcttcccaagatttggttgattttcttgaatagatgatgttgcttagtttgttgtgtgctcttaggataatttctagagactttaaattgttgttgatggtgacttttcaatacttttcaccagttatggttgttctgaggggaatgtgtccatggggctcctctcaccaccattccagaagtggaattctcatggcagatgattcctaatctttttttaaagggccacagcaataaggaaggtagaagacactggatatgtcagggtcattcaaggtataattagagatccaaatccaattaagccaagaaaaggagatttgctggcacacgcgagcaagacagcaggcaccgctggcccacacgaggctgccaaggctcagcgtctctcctcctcctaggacttggctctcttctgcagagacttccttctcagattggctcttcacatacgcagccccaggcctacgctgtgagcttactgagccaggaagggaatatttttttctcccaatgttcagatctcatggaagacccatgattagtctcactccagtcatgtgttcaccccctggaccaatcactgtgctgagggcattgagtaccaggtgtgggctatgtgcccccccaccacagccactggggagtagcatgggcatgaattacccatccaccagagacacattgggtggggcaaggcccttcccgctggcggaaaggggctactggtgtgaaaaatcaacaagatggtcccccacttgccccttttaaaaaatgcgtagagataggtacacacactattttgcctatagtttattttaatgcactgtaaatctcttcgacatactcagaacttaaaaagaaacttcatgtgcattatctcttttgactacacttttcctgcaaaaatggtcacttcctgaaaaagtgaaataaattcaaattgcacaagtaaaagaaagaggaaacttgaattctgcccaaaggaaacttcttcaagaaggctgtgctcttttgattttaatacactgaaattacagaatggcctttgacatggcaattttcatgtcgttttgaacgtcaaattgattttgactctgtttggaaggcagtgaggcccaaagccctgactcatgaaagagcagaataacaacccgaactcgcctcgttttgctggacgtggaagcccggctgggttgatctgctgtctcctcgttttccaccagcgtgaggtcatctctggcagtgtgtgcctcacagaggctggctggggcagcaggtactggccactggtgcagggtcccattgcctgcgatgagggacacagctaacgttcccgaggagcttccaggcaccttgcactctgtccctggcaacacagtgacaaggctttgttcctccacccgaaacaaggcagtggcatggcctccggttctcgaaggttcactcctatcttccgctcacacttcagtttctttgtagtcttgaatcattgttctccagcatattctacagagggccttggtctacctcacccatgcagctaaacccatctattagggaaaccaacactcaagctcactcctgccattaaactctcctgagatttgagtttcctcctctttcacaagaccggaaatcccttgtaagttaagccaagctcattaacgttgtcttctgcggcatccatagagttctgccaggagagttgaaccctgttcctcttccctttaccggacaaaacctctgggagaggtgggctcaagctctgaatctggtgacgtttatggtttccgcagcagtgtgtctattggcatcgcgtatcagggtcgagggtggcaaggcatggggtctgcagagtttctgccctcccccaaacagcaagatccacacgcactgacacgcgtcacgggaactcatttgacacaggatcaagtttgcaaaatttcccatgaggtcgaccatgaccacagctgtcaaggtttccaaaaaggactccccactggatttggccttggtcataccttaaaccttcttttgccagcggcccctatacctgcataatccgttgcagtgttgcattctgatgaccttctattttcccggttcccttttgctccgacctgtgctccagcaaacctgcaggccattgatgctgccgccttgtcacggtctctcacaccactgatccttccctccaccccttacccagcctccttctcttaaactgcaggttccctcattggagtcactcttgctttgtaacatctactgaacaatgccctagtcctggtaaaatgaaactttctacctacttcatgctggcacgggtacccctgaacaaagctcagccctgcttctgctcttgcttacgatgatgttcaccagcaaggtgccgctagcagccagactgctcccctcagtctgtttgcctccttccagatgacttttcatatcttccgtcctctgaacacctccaacatctgctccctatccgcattcacacctgacggcttccctcgtctgtcacctactctcccagctttttgctctctcagcagcaccccctaggtggagacgccatcttcgattcctctcctctcactgtgtcttaaccccacttggaccaggcctctgtgtgtgccactctgccagaggcaccctccccgaggtcatcatgctgctgcatctccctgccaatcctcagtcgccatccctagcacgtggcaggctagtccctcctgctcccttggtgtggcttaccggacacccactttcttggtctaatcacagcactcacagttcatccccgtttcctttgctgatccttcctcttcccgcaccctctggggttgatgcgcccagggctctgtcctggacgctccttggtctccctctgcacccctctgtgggcgatctcattcctcttgttgctttatgtaccatgaaatggctcccagatttgcgtctccagcccagatctctctcctgcacccaagactcatattccaactgcccctccaccttccatgctctctgtattgcccacgctcctgactccagcagaatctgcacctcatctgtctctgcactcttcaaatccaagttccaaggcatttctctacttgccaacctcaatttggaagtaccacctcagcacgcccctcactgaactcgcgctcaccctctccgcactccaccctcggccttccccagctctgtgcacggctgatccttccttccatttgcacagccaaagctctgcagttagggttgacccctctcttcctctcacactgatgagaaacctgttgagaaatctttttaggttttctttcaaaatccaccccgaccctgatcacttctcaccatctccacggttgtcacttgcgtcaagcctttgtcctcttctgatgactttgggagcccccagcagacctccctgcctccccacccccatgtgtcctcaacacagcagcagggattcttttctctaacagctttattgagatataattcacatactatacaggtcacccatttaaagtgtacgattcaatggtttttattatattcacaacatcttctccctccccaaagaccccacaccccttagctgtcgtccttcctcccccaccaccttccaggcaaccattcatccacttcctgcctctctagatctgcctactggggcatttcctgtaagaggaatcctgcactatggtggaagggtcctggggcggtccgtggtcagggatcctttgatgccttctgctggatcatgtctgtcttctgctggaaatcccacagtggctcctgcttcgttcagctcagaagtcagcacccagcacccgggccacctaccagaccccacacgacccagcgcctcgccctgggaccccgtggcctccattttccttctcactcacttgattcctgccatcctgggcctccttgcccttcttttcaaaaccccacatggggtcctccttccgcctggatgccctttctagacaccctcagctcaccctcccacctcattcgagtctttgcttgcatgttcccttccagtgggacctaccctggcgctctaaggctttgtagacagctccccccgcaccacctgccctggcactcgcagaccctgtgccctccagccccttcccgcagcactcactgccctccggcatactcagagcactggcaccctctgttccttctgctagcgtggccgctccacagagcagggagctgcggtgactcccacggtctcccaggagcagtccctgaggggagctggcccctacacagtagctgggggtgaatccgtggacacccagcaggtgaaaaccgggactcagctccctggagagacgtctgcggttccacctgctgcatgttccagagaactagagcagctccaagttccgctgtggcttccttcaagctcaggaggaatatctgtgagcccagagtggatggaactgcttgtttcttccaagccacagaacagcttggctgtttccagagtgcacagcctccccaaagtctctccaagaacatggcttcggtgtgtgtttattgtaggatgttcaaggcctccgtggggcggggcagggggaccccaagttctggttaagtaactgtcctttaacaccgccgttctcaggagccacagctacactgcggcgtgcgtgtcgggagcgatggctgcctgggactcttcagcttgtgggtttgctcttcctttctcaagcaccttgcagtacaagaagcactgggtttttgtgtcctggtgaatccagggatcaaggaaaaccagaggacacagatgctccaagatgcctccttcctttcaccattttccagacaaagcagacagggacacagagaggcccagagcccctcatcaggccccgtctcctttaattccgtcctcattaaaccctgctagactttccaacatgctgaccttgagaatcacacatcgcctcatctcccccagcctcccagagctgggcagcaccgcttaactgacgcgactggatccaggtgacgaagcctttcttgagagtagctgaagtgacactgtcttagtcagtagaggctgctaccacaaaaagcacccccaacaccaggtggcttacatagtgtttatttctttctcatggttctggaggctgggaagtccaagatcaaagtgctggcagattttgtgtctgctgagggcctaccttctggttcacacatggcaccttcttgcactttgtcttcatgcattgcaaggggcaagagagctctctggggcctcttttatgttatttctacatttttaatttaaaaaaatgtttagagacagagtctcactcatcacctaggctggagtgcagtggcacgatcctagctcactgtgtccttgaactcctgggatcaagcgatcctcctgcctcagcctctcacgtagctggggctagagatgtgagccaccacatgcaacatatttttttttatttttagtttttgtagtgatgagggcttgctgtgttaaccaagctggtcttgtacttctgtgctcaagctatcctcccgtctcaaccccccaaagtgctgagattactggtgtaagccactgcacctggccatggggcttctttgataagggcactaatcccattcatgaggccccaccctcatgacctaattaccccccaaaggccccacctcctaaaatcatccctctggggattaggtttcaacatatgaattttgggggtacaaatattcagtccatagcatacatcgaagggggaaattcttttttctgaaaccaggtcttgctttgtcacccaggctgaagtgcagcagcatggactcggcttactgcagcctcaacctctcagggtcagtcagtcctcccacctcagcctcccgagtagctgggactgcaggtgcaccccattacgtttggctaattttttttatgtgtatggagacagggttttaccatattgcccaggctgctcttgaattcttgacctcaagtgatcctaccgcctcagacttccaaagggctgggattacaggcatgagccgcagcaaagaaagtctttttaaacgattctttatcagaggcctctgacagctcattcttgttccccaccttaagcacctctggctttcattgatattgcttgcttgggtcttagtgcctcagtcagggcctggaggttgggatttcctggtgaatttgatggttagtctcctggttcacccttacgggagtggctggaacaattggcgtccctcttccccaagcacctgaagacaagtcctgccctttgtgtgctcagagaggagggagggaaagtgatttctgggcccaaagtccaagacttggagggagggaagaccccaaacacagcacagagggacgatgcccatcattgctcccaaggcagctcttccccctgcctgggagcggagctgacctcatggcagagggctaggcagagtgtggttaatatctcacaaggcacaggacatctggaagctgagatgtgccaagaggctttgaggctgagcatatttcagggctgggatgggagggagcttctcatctgtttagtggcagctagaccaggagggcacctgggaccaggaccaggctaggtggacatgagtggtcacaggaggctgaggctgcagggtgtctgggaaggcacttggccagatgcagagggcaacccatgccctgagggtgggggcactgttggagcaatcccagtgcagggagacccccaggatctagcaggagctctgtgcagggctcacatggttcatgggggcccagcaacagagaggaccctattggcaaccatcagcactggattctgcctttggtctgagcagaggtggtccaccccgcttcccctctccttcctctctgcccttcctctccagggcaaggcctggcctaccagcactttcgttggccctgctcagatgcttgggactaggtgggaacaaggccctctcctatgagagttcctggcagcaccaacccctaggacctgagacaaaggggccaggtgagtttctttaagggcccctcgctcattcgatttggggtccctctgatttccatgcagcctgggacttggtaggacttggacacacataggctggcatctggctccattggtgtgaaggcgtcagttctgtcccacacaccctgagcatttcatgctattctgaggcatgaggatgagctcgtattcttgctccttgtctattccttcatcccattgtgccaaaccttcatgagcctcctctcagccaaggcaggtgacccagagatgaatctgatgcatgattttacccctggagctcatggtctggttaggggacttggaaactggtgagcttatacttctgcatgatcagtggtttaaaagaaggaagcacagggtgcttgagtctaggagagagagtaacttgctctctttgcgggcctaacgagctgggagctgggttttgaagactgaataggagtctgccagaaagggcagggcaggcattctgggcagagtgagcagtgttttctcggacccatggctgtaagggcgttgcgggaacatgagcaggtccctgggagggttggcaggcaggtcaggcccatcaggaggccctagccagtgtgctcgcactcccgcacgggtctgctaggcttgggaagagggaggtacagaggattttaatgggggcaagctcaggtgaggactcgagctacagggagtgaagggcagggagcagcagcggatggggccaggtctgggaggaggctgctgcatccaggtagagggaggggctgagctcatcatggacggggagatggggaaggtgccaggatgcggtgactccttggatgtggagatgagatgggcacagcagcaatggctgatgggttggggtagggaaaggtgacaggtttgtttgggacttgttggcatgaaggtgccttgtgacaccccaggggcagttgcaggcagcagggggcggggtctggagcctggggaggtgcaggctggaggtgggtcggggggcacctgtcagcaggtccatggtcatggaggtcaaagcagcaggtgtggagcaggcagagaggagagcgagggtgaagccctgcacacggaagcccagtcctagtggatgagcagcgtccagggcacggtggactgggccccacttcctgtgggggtgcagcctccacttctctctgagatgcatggtgaggccttctccatgcagagctggagaagtcacctgaggactgcccacctgggtgaattcaggcagagcagcaggaatcccccacagagcaggggttaagcctcgagggctggtgatatctctggcatctgatggggagggcgcctgtggcaggagagggtctcttctggcagagagcttgcatgaagtccagctgccctgagccaggaagagttactgggaggacattaggaaacctgcagagtccacggggagtcgggctgtggaagggcctggcagtcggggtcctggacacaggagggtcttaaccattgtgaccaggtgtttagtgacaccactaccttttcctcttctggctcctgcggctcaaatcccacactctgtgagggagaggatgtttggcttggggagggctgtgtgcatgcagggttccaggaattccaggaaataacactgggctgctgctctgagaaaggggagaatggatgctgggccacccccagaccttggtgcctggtccttggggacctggagatggctgctcagcggcttgagggcttcagtgtagtcagtgtagtgtgtgtttctgtttttttgtttttgtttgttttgtttgtttgttcattttgttttgttttgaaacggagtctcactctatcactcaggctggagtgcaatggtacaatctcctctcaccgcaacctctccctccgggttcaagcgattctcctgcctccagcctcccgagtagctgggattacaggtgcctgccaacacgcctggctaatttttgtattttttagaggagacagggttttgccatgttggccaggctggtcttgaactcctgacctcgtgatccaccctcccccaccctcagcctttcaaagtgctgggattacaggcgtgagccaccatgcccgggctgtttttgttttttaatgtgacacattttaacaagcatagcatttaacaaagcagataatatgatacaacacatacacacaagatacactgtcacagtcatgggagatggcactgatgatgttcagtcagtatttaggcaggattggaaagaaaaatgtctctgctgtgttttgcacacttgtacacagacacagaagttttttattccaaaatgtggagttatctgcaactctgcaaattatacttgatatttacttttcttgatatatttgctgaaaaacgattctcccagtaaacagtggtgatttctcagaacagtagttatttgtcagcagcctttaactacggcaaacctttttcacttgagtttgaagggtgaacgccttcccgcctcccgacacagatgctcatggtcgtgcataatttcatgtgcttccattctccagacttgttggaaatgccatattttatgcttgtaattagtcagatgagccaaaggatttgaaatttaaacatttgaaccctaagagaatcttgaaactttaaccaaagaaacagaagaagaatgtatacaaacatgggaattgcagttcaacagccctttattaaaaaaaaaaaggtattgtgctggcagtggaatcaaagacaaaaatatgatcatcacagtctacaaggcactttaccgatctactcatcctcatcctgatgcagacacgcgtgggaatcgtctgagtggcaggacctgcagccattgtcacccgactttacagatgaagcagctaagaaatgactcaataaacttatagtgatttgcttgacatgtcagagttaaaatgtaacagccccagaaggagtggcctagcacagcgttcaagagcacagactcttggtagccatgccagggttcatatcctggttctgacacttccgagcagtgtgaaattgggatagcctttctcagtttccccatctgcagaatgaagataagcatcacagctaactcacacagctgctgcgaagaatcagtgggcaactatagacgaggtgcttggaacagtgcctgagccaccttaagagcagtatggatgtttctgtctgtcagggatcccgtgtggcttccatggcgccgcacttgggcatagtcggagatttgataaaacattggtgcaatgtaacagccgcacacaggtgcactggcttagcaaactggagtttggattaatttaatcaaaaccaagtgtcgagagggcaccaaagtccaggataaacgtggaatatcttcctggagcatcgattttactttaaaaagatgcactctatttcataatgtaaaattgacactttttaaaagacagaatgcggaggcaactgtggagttctcatttttggcaaaagctgatacgggttctgccttcactctctgggatattggctaatttcctctttttttttttctttttcttttttctttttttttttcctagagacagggtctcgctctgtggccccagctggagtgcagtggcacaatcatggctcactgcagcctctaactctggtactcaagtgatcctaccccctcggcctcctaaagtgctgagactgcaggggtgagccactgcctctgctgacttcactattcactgcaccgagaagactctcatgtgtatttataacaatttggataaaaattttggacattgatccatgtcagctgcgagacagggaacgacttgttatatgcaccaatttgtcctttaattacttgttaagctttgatttgtcctattatcagaattctcatcctcttctctgcaagtttatgctcgccatggtaggcgactgtagaggtcaccggccccttacagttcagcaagtgtggatttgtgcagacaccgggacgccatcagcacatcgaggcggtagacactcgtcttctcccacggtttccttctgtcccttcatttctgttgctgttgttgtttgcttttgtggaaagaacacttaacgtgagctcagacctctcagagaatttcgaagtgcacagtgccacatggtcagctacaggcacaacgttgtacagcagacctctagtacttactcgtccagcatcactaaaactttacacccattgaacagcaactccccatttcccgctcccccagctctggcagcctctatggtgtcatctgctttcatgcgtttgattacagatcctcatgtgagtggacgagtgccgtatttgtccttctgggcctggcttatttcagaatgcgtgtgcatgtggggagggggtctgcgtaccattacactgtcactgatgtggatgtgcaatacaggcctgggtccctctcatcttttggtagcccccccggctttttttttttgagactgagtttcgctctgttgcccaggctggagtgcagtggcacgatctcggctcactgcaacctccgcctcccgggttcaagccattctcctgcctcagcctcctgagtagctgcaattacaggcgcccaccaccatgcccggctaatttttgtatttttagtagaaatggggtttcaccatgttggccagcctggtctcgaactcctgacctcaggcaatccgcctgcctcggcctcccaaagtgctgggattagaagcatgagccactgcgcaggccttgataaccctattgttttacaaaatgaaagagtgcctgacagtacatgaatggtggtatgttttaggtacatgcgtgaaatggaggaagtctgtatagacgcagacacaccgcagtgcagtggtgccagccaaatccacgctcccagaagtgagacccaaggtgacagtaactggacccaagtatccccaagtctcaccgtctctgtgtgcctgtgtgcacagccctcccgggcataacgtcaagcgtatgtatttgatgtgtgtttgaggctgggtcttgccctggcatcagcagaagcaggccctggagcgcataagtgaccaccagacctgcacaccctctgcacagctgagcatctcggcatcaatgccctgtgagtgcccagggccaggtaggcactcaggaagcctgcaggccctgggatgtccagaccgcactttctggtaatcccacattgcccatcctctgcctctgcgcatcccctccccccttgcccccgagggcaccctgcctgcccacctcacgcccagccctgcccagcctgccctgccctcctcccgccgggaccacctctgctaaatcacttaatccggtgatatgtttcctctggcaggccaagcccatccctcctgactctcagggatttgattatagtgttttctaacaaagtcaaaaacagatttccatgagaggcttatagctcagtaattctatggtgctttggtgcagtgtgccaaggcgcagggatgtacggggtcaggatgtcgagagaaaaggtcacaaaattaaattagaaccaaggagggtaagccttggcaagagaggcctgtccggccagctgacaggggcatgcgccctggagaaccccgagaaaggggagttgtgaaaatgagccatttcacgcctaattacgatttcccataaggtacttaggagggatgatgtgcgctggacttggacaattaacgtaattaaacattcatgctgcctgcggcccatttcctgcctggggatatctttggaagctgaagcatttcttttttcttggaggtgatttcaagaatggctgcagaggaagggcttcctgcggggctgggccttgggggatgtacctctgcaccccagtggggcaggacccctacaaagagtgtttcttggtggcagctgggggcctgggggccggggaaggctggatgccactgacctggaattacctctccgtcgggaatgggcagcggggtctcatgtttgtggagtgggcagcagggtctcgtgtttgtggaattacctctccgtcgggagtgggcagcggggtctcgtgtttgtggagtgggcagcggggtctcgtgtttgtggaattacctctccgtcgggagtgggcagcggggtctcatgtttgtggagtgggcagcggggtctcgtgtttgtggaattacctctccgtcgggagtgggcagcggggtctcgtgtttgtgactctgcctgtgttttgatcacggccaagtcacttaagcccagattctctggcgtcccctcctttcctccgattctctgacagaagcctgtaaggacttccttggcttctctgggcctcaggttttctatgtgtcttacttgtggacactgatcaggacactgagggtctgacggagagagggtggcctgaccgaggtgcacagctggaggtgcctgaccgaggtgcacagctggaggtagctttgctgggaccagaacccagggcacttgctcacgtgctggctgtcacctctcaagcacaggccgggggaggagctcaggatccagccagactgactgagctgttctcaggtgaccgcacaccacagacttcagtgcagactggcagagcttcggctccctcctctgggaaggagcaccgggcttcctagctccagagttgtggatgctggatgaggaggccgtggtgaaggcaccgccccgggtctggagccccacaggagccttccccagatgctccgcaggcagtggatgtccgctggctttggttagtgttctgcctgccttaagggcaggcacagtcggcccagccgcgcatggtgggttctggggctgggggcacctccaggtctcagggcacctgccttgctgccgagagactgcatcaggcaggaggcaaggcagtggccggcataagagctgggccttgctgcagagtctccttccgcttcacacccacactggttttgggctatggcaggtggagcagggaggagccagggccccggaggtcttcaggctggggcaagtccacccccaattctgccctgctggctggagaggacaagaaaacaggctggtgcccagactgggttctggtggagtgagctgagtcaggaacagccctgtccgtgcacctggcccgttcctgtcacctctgtgggcctcaggttttctatgtgtcttacttgtgggctgtggccagcatcgttatgcctacttttcagatcaggacactgatctgtgtgcgccactgcggtgctctgcagctgattcatcctggaggccgcccacacctggggcctccggcccaccctctctctgtgctccagaccactcctgcctgagtgtctcatgggtgtctgtccttgtgtccccacagaaatctcagcccaacacgccccacacggccttctcctcctcccacgcggctcctcccgagggtcccttgcagggaaggcttcccagggtgaccggttgcccaggtcagaaacccggaatcctccctggccccactttctgcacccaagctgtgactccccctctcagtctttgtccacacgctgcctcccctgccttccaccctccttcctggctccctctccagccccaagccagggctgccctgccccctctagtctctctgcacttctgccctcctcccggcctcggccatctctcctctcctggccctccctccttggcacagcaggggcttccctcactcccaggccctctgcactgctggtcctgtgggccgtggtcaggaacacccttccccctctgcctgcctctcagccctccccatgagcgtcaggttccctctctgtgtctgggccctgcagtcctagagggcatctggggttgaggggatgctggtcctgctcactctgtggtcccagcccagcaggctcatcatcactcaaagggccccagctgggggccctgcagcccaccagatactgccgtgccagcacccagagccaggccaagcagatcggtgccagaccagttccaccccagatcacagctgggccttgactgtcagggtggcccccttcagctgccaagtgtagagtcgtcagggagcaggccaggctgggggctccctctgcccctgacccctgggggagctgctgggagagtcctggcctctcctgcatgtgcgtggcttgctttttggctggactaaggattgcagccatatgaaatgctcattgctgtcctcatccccctcccattggctgtcctggaactcagctcctttctgcagggcagccactgcacacctttcttctgtgtcctttcaggatgtcctgtgcacacacaagtatatatatatacacatgtgtacacacacatatataaatcctaggattagaatctctggctcaagggattttgtgtcctgtagatactgtgttttcgtttttctgactttttcctgcacactgtagactacaccgtgtgctaccctgcatttgcgattatcagggaacatgtcttggacgtcgtccacagcagcccctccagacctgcccattcctcctgctcaggcattccatcctgtgaatcacttgcttaaccagaccttgactgatggggacgttacttcttttcaccgtttcttataatgcagccgtggatatccttacacttatttccttggctacttgtatgaggacatttgtaggattaaatttgataactagaattgtggattcaaaaggtttgtgcattttcaactttgataaggatgaccacaaccctaggatggttggctggatccgtttctctcagcatgtacccctgatccgtacatttttatttggacaatctgatgcaggttgtttctttaattaagggtgaggtcgagcgtcttctcatacactgaaaagctgctcggtggctcatacccgtaataccaacactgtgggaggccagggtggatggatcacctgaggtcaggagtttgaaaccagcctggctaacatggtgaaatcctgtctctactaaaaatacaaaaaaaaaaaaaaattaaccaggtatgatagcaggcacctgtaatcccagctgcttggaaggctgaggcaggaaaactgcttgaatccgggaggcggtggttgcagtgagctgagatcacgccactgtactccagcctgggtgacagagactctgtctcaaaaaaaaaaaagaaagaaggaaagaagaaagagaagaaagaaagaaaggaaggaaggaaggaaagaaggaagggaaagaaagaaagagataaagaagaaaagaaaagctgctgtcttttcttttctgacaattgtcccctcatattgaaatgagagaagttctcttgtcctcctcgcagggcgtgctatgggggtgtggcttccttcttcagtgtccctctgctcaaacctctgggggagaatacagacgggcaggctgtggggctccgaccccacagcagtgtctaggggtgaatgtttgcagcccctgaagccccagtgggcgtgtgctgcatgtgctcttttactttagctgtctgtaggcggcttgtgttaaccagctcagttagaccctctaccttgtcgcaaggacagagggctttctgtatctcgggttcttccttgatgtcctggaagaatcagatcacacgtgggcttggagaatgagtgcgaggttttattgagtggaagtagctctcagcagatgggggaagccagaaggaggatggggtgcaaagggctttccctggagtcgggccgctaagcagcctgggctctcctctgactgccccggccaaactccgtgtcgttctgcttctgccggtcggtggcctgcagcgtgctggtgctcgttggtgcgttcctctcgacgtccagccgcctgtgtgttcctcccctcatgcgctcctctcgacgtccagccgcctgtgtctgcctgttagggtctcgggtttttataggcacaggatggggacatggtggaccagggtggtcttgggaaatgtgacatttgggcacaaaggcaagagtgcctgtcctcacataggtccgtgagggtggagcccttagccagggaccatgcacttccctgcttccatatcatttaaagggagcatgcccttctctacccagcacttttgtatcaataccgtttgtccatttcccttttggattgctggattgtttcctgttgatttgtaagagcgctttatgtattaaggaaattagtcctttgtctgaagcgcacatgatgtgggtgagcccttggctgtgcggggctgaattgagagtccatgagagggaggaggagcctggtgcgtgctgagtgttagttgccgtgtggataaccagggagtgttcctcaggcccctgcgtgaggattccaccataaaacacatccatcaggagctgtccttcaaggtgggaaagggatgtggagaaacaagtggggcgtgaactgcggcccgggaagcttcagccactgtgaggcagaggcaggtggactcactctggttggccagaacctactgtgctcaaaacctctccaggccagacggaggaggatacagggaaacggttgctcagggcgtggagccgaggtggcagacagacctgaggacacagctttggtctgggcgtggagctgaggtggcagacagacctggggacccagctttggttcatttcacaagcagcacagcacctacattattcttaaattgctttttgccagtatttagagatcagagacttcacatgcaaatccagatttctcacttccttacaaaaataagacccagcaacatggacctgcaccctcctagtcaccactggccaccttgggctggaggcagtgtgccctctcatccccctgcccacatggcttttctcacgggagcaaaatatttctcagtgaagagggaataagcaaaagacaagccaagagggccgcatgctccaaggaaaattgggagagtatatttctttctggaaatgcagaccgtttctctctgttcaacatgtgaacaaaatatgtctaggtcagagagatggggcatcgggaaacacgcccagcctagcagggacccacaggtcgagggtcagggaggcccgagtgagaattgctgtggtgtgaggcctgcggccggcagcgtgttgtcaggatggcgcctacggatgtcagggtgtgccgggagccatggcgacagctcccaagaaaaagaggagaagacggtggtagcgtgcacccaccgcatggctgcagtaagcgcacagcatccacctgccccgctgacctcacgccgccctcatgctctccctgtaaatgacggccaggaaggaaaccgatgtagactccacggccaactgctcccaccaaggagatacagacaatccgcccgcatccacgctgcgcctcgtcctaccctgtcctgtctccacctgctcagaagtagcataaggataactaagttttccatttatccaataggcgtttttggcccgtttatttattcattttgccaagccccatgtgggtacctggggacttagagaggggtcaagggccacctcagtcttccaggagttcactgtagagcctgtgtgtgcatgtgcacgtttgtgtgtgtgcatgtgtgtgcctgagtgtgcatgtcacatatgcacacacgtgtgacatgcacacacatccatagactcacatacacgcacatgcactcacatacactcacatgtgatgaatgtatgcatgtgcgtttgtgtgcatgtaagagcattcgtgtgtgtgagtgcattcatgtgtgagtgtgcgtctgtgagtgtatgtgtgtgtgcattcatgtgagtgtgcatgtgagtatgcgagtgcattcacgcgtgagtgcatgcgtgtgcgagtgcattcgcgtgtgtgtgagtgcattcgtgtgagtgtgagtgcatgtgtgtgagtgcattcgtatgagtgtgcatgtgagtgtgagtccatttgtgtgtgagtgcattcgtgtgtgagtgtgcgtgtgtgagtgcgttcgtgtgagtgcatgtgtgtatgtgactgcatgcgtgtgtgtgagtgcattcgtgtgtgcgtgtttgtgagtgtctgagtgcattcgtgtgtatatgagtgcatttgtgtgagtgtgcatgtgtgtatgtgagtgcgttcgtgtgtgtgtgtatgagtgcattcgtgtgagtgtgcatgtgtgtatgtgactgcgtgcatgtgtgtgtgtgcatgtgtctgaggagtgatcactgagcaggccagcctgtgatggtgacaccccagagcgctctcctagaggtggtgccacgcaaggctggcaaatggtagttagcaaaatacttgacgagtgaatgaacaatgaacaaatgaatgaaaatgaaggttttgggagccagagaaggagacagtgacttgtcctggtggagggcatgggcccagggcaggcaggtaggaactgttgcaaacaggaggaaagtcaggctggacctggaagcagggggaggggttgcctggcagaaagtggcaacaggactgggtgctctggggagggtgctcctgccctgggagaagcatgctggaggttcggaggcagctgggccctgcaggggctgctgccagacttgatgccctctcagggcttggcaggagtcagttcacaacatgcaatgctgtgatggcagccacgtcacctctgcagggcaggcaggagcacatgggcagctggttgggagcacaggccagagggccacccacccagcccatctcagtgagccacaggcctgccgctggctgctacctggaagggtcacaccagcttttaagcaagaagaggaaaccccagccttttaaagtagaattaggatgatttctatagtttctgcccggccagctgctggtccagtcttctgagcccttgcagtgttgagggcagctggggcccggcaagcagggcctttgccatcctctctgcaggcagggtggccctccctcccctcctggttctcagggtggccctgggatctgggcttgtagtgcatccctgccacctgccccggttggggaggaaaggccctgtgaggctgccttggggattaaattttcaggactcagcactcactctgatttctgatttcctcccttctcgaaatagggctgatcaaattaagcctcgtcaacaccgtggtctgggtgctgtgtggggagtatgaggagccccttccctcctcaactgcagctgggatattctagggcaggaagcatcatgggacaggagtgtgtggggtccaccagggccaattgtcaccacccccaaactcaggcttctggacccacggagttcacacaggaagacaaatgggaggaacccccgtccctgcagggttggatggcctggcctctgggctcagagtggcggctgcactgggggcctctcggtgctgtctctgagtctgcaccttgggatttacccgtgggagaggcaggtctgagagaagatcccacagccaggcgtgaaggacaggagagaccagaaacaaaggttgggcaggcctgctcctcagccccatggggggctggagcagagggaaggaggacatgtggtttgggggcccagcagcctgaggggaaagggaggtccctgacactcactgggagagagggctgagggtctggcaagttccagggtcttgagctgaggggggcgtggtgagcattgcatcacctctgcggggggctcttctctgggcagatccagggagcctggctgctgcccgcccacatggggtttccctgccccctcaggaggcgcaggggcatgggagcgtcctggaggatgggacatcagggcatgggagcatcaagaggccccaggcctcaccacccttccacccccagcatgggggagggctggggtggtccccggggttgtcctcggtcactcctgctccttgagcaggtcctggtcagacatggactgtgcttggtgccacgactgaaagtggggggtctttgtgcccaagggtcatggtgggtgatggcagcaaggtcctcagctgggccagggccctggtactttcagctccctcttggctgctggaccaggtgcaatcaccaccatgggccattggaagctcgggatgcgggggacagagccagatgctggggtcacgcaggggtgcctgttgcctgggcccagggcttgttccctcatttgcgtaagagaggtcccgtgcccactccaccggctaccatgaagaagaaacaggaggtgtgtgaagtccctggtgcctgggcatctgaggaactcttcctcctaggaaggcagcttggtggcacagtgtggcccaccgtgcagggctgccccaggtcccacaatcagctaggaagagcctgtgcttggctgcagcaccccagcactgctgtgtgcctggactcctgacctagaggggtcaggaaggaggagggagcagaggcaggtgctgagtccctgcacgtggctcatggccgggtaggagagggcctcatttgcacagggtcgggcagcatctgagacctcccgcttgtgttggctgcaagctcttcccaggggaccaggacctcacccctgcagggcccacgcccaccctgcatgaacgcagggctcaacatcaaaggacgtgaaggccacaacaagggaaactgaggttggcaggtaaagaaatgccttggaacttggatttgaagagtgcagagatgggggaggcgcagatgctgctggagtcaggagcgtgggcagtacagagggcatagagcgtggaggggtaggttccagagaccctgaggagtgaggagggagctgcctttgagggagggggagaggcaggttctgctcctggcatggacctggctgcatgcgggccccactccctaggtggacgatgcagctggcagtgcagccggaggtgcacgtgcgggcagaggaggcagcaggccctggaccttctgagtgtgaggtacctgaggccttccggggagcaatgccaggcttccagatgatgtccaaatcaggggctctggagcatgtaccggactggtgacagggattttccgcctgtcatctgctgagccactggccaagcctccggccacatgggtcccgtggcactggctgtcagcaccccacttgccggcccccacctcctctgcgttcagaacacaacccctgggaattctcccttcctttgggacccgtggggatcttcgttttgttctgaagttcacagtgaatattttcaataaaagacctgccggcctctccatcggcccccaccacttggctgccgcgtgctgcggtgcccccgtgacattacccaggccagctccccttccctgggccaactgcccagcagagggaaggcttggagccctgggggctgtggtgagtcctggggaccctccctggcttaagcagatgctaggcaggggcagggcttgctggctcttgtcacccgccccagcctctgaaggccccgagacccccgtgaatccttggaggtgagtgggctgcagaggccgctggagagtggcacggggcaggtgcagaggagcctcggtagttcggcgggtgctggggggacgaaggggaagttgtgtttgggaacctctgtgggggctgtagacaggaggccccagccctggggtgaagagggggaagttgtgtttgggaacctctgtgagggctgtagacaggaagccccagccctgctgcaggacacctcagaggggctcgcacagctgctggtcactcagcatggccctgctggcttgggctcaacctcagcagcctcacacctctgctgggcaccatttcccaaggacacgtatctgggagccggaccagagcctggccccttttctggtcatagaccttaaatactgcagaccttctcctcgccccacactgggaggtgcaggcacagggcagaagagagtggcctggtctgatgcctcaatcgttcaagagagctgtggctgcaaagccaaaccatggtgtctctctcaggccagcacatttggctgtgtctgtgtttgtaagggcacacaggactctcgtggttgcaagagacagagagctaaatgaattgacctgaagaattaggatgtccaggggtgcatcaccttcagccatagctggatttggggacctgaacagtgtcagcagcacacggggctgccctcatctctcgcctctgctgctcctgggggaaggaggtacttagcagtcccagagtcacattttcccagcagagaggaaagcacgggagtcttcctgtgcacaccaacacacagcatcaggttccagtggcctaacaggaccccttgggcactcctggagctggggtgcagtgggattggctccccatgagccatatggggtgcaaataggggagggtggtttactagcagaaaaggtgtaatggccagacagggcaggccaccgtgctgtgcaaccccaggtggctctgtgagggtgtgcaggtgctgggcaggccaggaccttctgtgtccaccactgaggggtgtcctttgtcctctgctgtgcgggggtatgttctgaggactggcccggagaggccttctctcctttagtgcttcctttttctccctgaagcatggctgaggctgagcaggcctgggctggagcgtccatctgtccgcggggcagcccatcccgtgggagtttagagaactgtcaggactgcccctgagattcggcacagcggttcctgatgcgctcctgatggccaggccggccccaggagcccctccccaccctccgatccacctcaggtcataaaaatggcattggatgagctgtgtctgttgaagttgcaaaaattaattcaaagtcagtaataaagttataaagggctgggatgtaataatcctaatgagcatcttttaataaagtacaccagtggggctctgtgctgatggcccccgtggggctgagcctgccttctgcttcccagagcctccaaagagcctgcctgcttccaagcagggctttctgctgtgtcctgattacacttccacataaacatatttcatcttaatgattatctttaggggaatacacagccacagagcgactctctcttggttagtaagaaatggaggggatgaccttgttcccgttgacctcccctgggtggggctcctcatgttggaggagaggctgctggtgctccaggctttggtcctcctgagcctggtggtggcccctgcaggccctggcagtgcttgtgtgcaggaactgggctggcattctggcctggccatttgccaacatcatggccttagtctaattccctgagcctccctctcctcttctgggcagtgtggcagttctggctctgcagggcggtcattaggacttacgttttggggactcctaagcactggaaaaaggatgacttgttcccatccacatggttggcaggttgaggcagtagcacagcacctctgtctgtgtgcaggtgcctcagtgagtgtgccgtctgccctcaggccatcccctacctagtgagtgtgccgtctgccctcaggccatcccctacctagtgagtgtgcctgtctgccctcaggccatcccctagtgagtgtgcccatcccccccttgcgccatcccctagtgagtgtgcccatcccccctcacaccatcccctagcaagtgtgccatctgcccttgcattcagccagcagagtccagcagagtgggaaactgctcacaggggatggggcagctaaggagagggctgggaaagagccctaggcttggaacccaaagcccgcccaacagcaagatgataaaaaggtgcctcgctacattttcttctagcacttccatgacttccttttgatcatctcatccacttggaatctgtttttgcttaaggcatgaggtcaaaatttgaccttttcctccctctaaccagttgtcctaacatcattaaaacaaagaaagaaacaaaagccatttatctccccagcctgctctcttccttctgattttctcctgcagtgagcaaccatttcaggtgatcaaaccgtatcctttccttagtgtacatttttgcaacatgagtgttgctgtcttgcgtctgtgtatccataatttatgtaagtcgctctgaattgtgtctcattctgtttcttaccttttgcacttggcactctgtttttaagatccatccatctatgtagatatcaaacttctaaccttggtagcactttgtgggatgcccccaccacatttgcttctcctctcacccactgatgacccccgtgttgtttccagctcccctcactccacccaagcaatgctgcaaggggcagctccccattgcctccttacagacctgtgcaagtttgcccatctgcaagccagtccatggggccgaacaatggcccatgggccaagggtcagtccaaggagggcactgggctatccgatagacatcctgtatctttaggatatgagccgcatggtgctcttcctcatgatcccctcagtagtgccagactgccaggttgtcccctcctgctccacctccgccgtttcctagcaccgtttgctacctgtatcatttactaattttattcactgtattgctacttgagcaactatttataattacatgcaaatgaatatcaaagacgattaatattaaagtggagagctggcacacgctggcagtgtaaggagagggcggcactgcccccgctggatggaggctcccggaggtgagcagatcagtctccaggtcgtggtctgacttctgcttctccgggaactgacaaggcccctcctggggaagtcgtgagcaaggtctcgaggaagtcttgggctcagcacagtcaggcacctggtagggcccaggtggggaccacgcgctggacctgcagcggaaatacggtcagagggagggggctgacctgtacgtcctgcttctaagctcgccacggcctgcctccagctctcggtggggggaaagctggaaacttctgtgaatgttgtgcgtcctcagcagaggaggggagcgcccctcatcggcacatggccaagccaagtactgccaagaacctaggccaggctctcctgggcattttgtccccgggctacagatggcctgatggaggtggggtcttggtgaagacagttcaccccgtgggtcacgctgctcagtatggctcagtcgctctccacatctggtgcagagccatcacctcagggtcacttctcgccaccctccatgggcctcccaggccatgtcttctgtgttgggctcccgttttctctatctgtgttgggcttccgttttctatatctgtgtcttactctttctttgttgccttttttgtttttgatggtgcacacctttcagtagcttcttgagaggagtgcttgtcacataaatcttttgagaactgacatgtctagaaatgtccttattccactttcatacttgatggggaatgtgtctggatgcagaattccagttggacaatcattttccttcagaattctgaaggctttcctccactgttttcctgcatcgaatgctgcttttgagaactctgagtcattctgattccaattctttgtctatgacctctcctgtaacctgattttcccccttcttattctccgggagactttgtagaatgtggctgtcttcatggccagcctgggattcagctttcttgatgtaccaagtctgttaccacttgcccatctgtttccagcctcccacagttcccttgttgtttcttcccctcctgctctgcctatccttggaggcttgtgactttaaattttttttaaatttctttactgaacttttaatgggattctagaaaggagccaaatcagatatctgtgttcaatccgccattttaacctggaaaccccacatattcttggatctgtttttggaagtttttttgttttgttttgtgtttttgagacggagtttcactcttgttgctcaggctggagtgcaatggcgtgatctcagcttaccacagcctccgcctccccggttcaagcgattctcctgcctcagcctcccgagtagctgggattacaggcatgcaccaccatgcccagctaattttgtatttttagtagagatagggtttctccatattggtcaggctggtctcaaactcccaacctcaggtgatccacccgcctcggcctcccaaagtactggaattacaggcgtgagccactgcacccagcctgtttttggaagttttattcagctccattgatctgtttctttcatgacattgacacaactacgttttcattaatattattttataatacactgcattaatttgaaaaaaatatgcctcctcattgtcattctttttcattatttttctgtctggtgtggtcttccggatgaatgttggaatcactttgttgggttttaacaattatttgatggagattatttggcggagaataattttaacaattattttaacaattattcgacggagattatttgacagagaataattttaacaattattcgacggagattatttgacggagaataattttaacaattattttaacaattatttgatggagattatgccaaatttcttgattcatttggaggaggaccaacttccagtccaggattatgtccatgtagcttcatttactgaggtcttcttttgtgtttttggagaccttagactatattatactactttttgtgtagtcgttgaacattcattagtttttgtttgttcttagatacttgggagttttgctgttatagctgataagctcttttttccactctgctttcttgcgggttattcctatgttcaagaagtcttgatctttgcattattttatgtgagatgaggagtatctgttccttgtggatttggttaaactcttctatggaagcatttctttgactgctctttcaatttcttctgaggttattggtttcttcaggttttctacttgagccatgagtggaatgtatattttctatttagtctaggcctattagaatggtgcttttaatttcagatgtttagggtttagggttttattgttatctctgattttgtctcagtaatggtgattgtgggcacggcttttgagttgtgtcctaatgtgtctcagtaatggtgactgtgggcacgatttttgagttgtgtcctaatgtgtctcagtaatggtgactgtgagcacgatttttgagttgtgtcctaatgtgtctcagtaatggtgactgtgggcacggcttttgagttgtgtcctaatgtgtctcagtaatggtgactgtgggcacggcttttgagtttttgagttgtgtcctaatgtggtaaaatgtggaacttctcccgtgtgtgcttgacaaggtcacgtgttctggctgttgggtttgaacgttaggttttcctattaattcaaatagtttctatccctacctaatgctgtatcagacttgtctggaataaatgtattacagtgctcctatcactgtggccttgtctctccttccttgcaccaggttgaagctttaggagcataaagtttcgtatcttttgtatttttttccatgagttgtttgttttatcagtttatctccttaaatgccttggttggcaattacatggtacgtttctttgccccacttgttttaactcctcctggtcatttggacttggttatgccatatgcaagtaatttgtagctggattttgttccatctcatgcttctccaactgccaccacacttttgctcctgttctcggctccccacccccagtgtggcccctccggccctgctgcacctgcctctccttctatcccagttcccaactccccagaggcccccagctcgcctctgctgggccctctgttcccagagcacctctctgccatggctccaggcccctcacagccctgcggttacctgtggggcactggggacactgaggcacaccagaccccatggtctccatcccccagggttctctatctgagagggaaagtcagttaatgcccaggcaaattcacaaatgagacaagacctgcctgcagtggagtgtcacaggaaggaagagcacggggtgctgtcgggagaaatcaggggagggctgatttcaatttgggatgaaataaggaaagttctcccttaggagctgacatttcagcagacacctgaaggaagagagcaatgagggggcggccatcccatggagaggggacagcagtcggccgtgtcactgaacagtgtggtcctcaggttttaagcatccctgccccggcccctgtccctgtcgtcccctagtggcacgcagtgtggctgtgcaggaggcagatgggggcagaacatgctcctgtctttcaagagctctgagtcccatgggaggcagcgggctcccttccttctgggtctttcagggggcctaaatttggccagcacagcggcagcagcaaaaagggcatcgcaggtgaagaggccagcccagaaaaggcataggactgagcttcgcacaggggacagcgaacacccagccacccttagcactgcaaagcccctgcctgacctcagagcccacacctgcccactgcacttgccctcagcccacacctgcccactgcacccgccctcaggcccacacctgcccactgcacccgccctcagggcccacacctgcccactgcacccgccctcagggcccacacctgcccactgcacccgccctcagggcccacacctgcccactgcacccgccctcagggcccacacctgcccactgaacccaccctcagggcccacgcctgcccactgcacctgccctcaggacccacgcctgctcactgcacctgccttcggagcccacacctgcccacaaagcccgtgcctgcccactgcacccgccctcagggcccacacgtgcccactgaacccaccctcagggcccacgcctgcccactgcacctgccttcagagcccacacctgcccacagagcccatgcctgcccactgcacccgccctcagggcccacacgtgcccactgaacccaccctcagggcccacacctgctcactgcacctgccttcagggcccacgcctgctcactgcacctgccttcagagcccacacctgcccacagagcccgtgcctgcccactgcacctgcccacagatcccacacctgcccactgtacccaccctcagagcccgcaccatcccacgatgctcccgaggttgcagactcagtcccaggttttctcttctctagtctaatcatacttgtttctacaattctcattcccgcaaatcacccctcagtgctggtgaagtacagaagggctccgggcatgtggacaacgttggactcagaggcctgggcgcgtgcccactcctcctctctggtggtgtggcttgtccgagtcatgtaattttcctgctccttggtttgtttccctgatgctgaaataggacgatatgctgatggtgacacgcctccaccttggcgaggggattggatggctgctgggggtatggagctgccactgtgaagggctgtgcacacacccctgcctggagactcggggtgtgcctaggatgctggcagttgcagcccttgcccacgtgccctgtgcactgtggcactgtggatgagcccgtggctactgtgacccacccgttcccctgatggaattccctggacagaactgctgcctcccctcattccatcctctccctgtttattgattgactcttcgatagagtctttttgttccattctagagactctaaaacaggatggctctggagtgcttcccacagtgtcattatttggccacgatgtgagcaaagagatctccagctgccatccaaaaggggccctgagcacagggaatgccaggaactcgaaagctctgtgttacctatttaaaagatgggatcctgccacagacacctcccttcagggtagctgcagcccacctgggtatgacttctggggcttggtcaatcagcacccccagggggcccagtgccttcttgtggggaaggctgcacacagaggaaaggaaggccaagggcagtgtcatcctcctgcctctgcaggagatgggtgcgctgatcactcatccaggcggggtgagtgccgagggatacagcagaggctgtgtgagctcccagtcaccacagctcagcagggctgggctacacagggagctcccaggggaggaggggagagcagcaaatagccctcttctgccttggagggaccaagtggaacaggggctgttagaccaggtaggcaaccagtgcaggtgggcaggcccaaggccaaggttgacttcaaagggatcactaggaagacgactcaggaccacgccaggcccactggccagagctccctatagcaaggctctatttggggaacaggtctgcaagggccagcatgtggtcagagtctcttcatggcctgggttaagcccaatgtgggaaaaactgaggtggcactcgtgattgacagggtcagggtcaatcttattgtggggaaaactgaggtggcactcgtgattgacaagctggggcttcagcctgactgccgggtcttgttgggacagaggaggacaggaggggggctgggccagagctcctgttgccccaggtctgagggcattgcagatccccctgctcttagggcttctccccttgtcctgtccagcctgagcaccactgaggcttccaggggccagacgcagggcgtggctgtcacctgccaggtggcccaggcccctgtcttcctctcctcacccactttgcctttgggccttgggccgtctctctaggcactggtcctgggtggagggatgctctagaacataatttccaaatttcaccccaaaattatcacgattaaaataatgatggcaacaataataattccatttcaggtgaaattcagattctaaatctttagaaacctttgctgtttttaatgggcttgcaacacacagtttagttaaaaactctgcctgctcggcagaagcagcctcaagacgtgccccagcccagctctgtcccgatgcggcacccatgccctcctacggggaatgtctggaggggtccctgcatggggactctggggttagggccaggaggacatactgtgataccttctggtgccagaatgacattgacagtggcaggcaggtggcctggtgagccaagccctgtgtgttttgtctccaggtgtggcccctcaattcacagacccgggctacccctggggtggccccatctcttaattcctcaagagaagctggatgttctagatttttaaaacatgaaatctcccagttttcaaatactatcaaccagatggcaccacgtgacctcaacgagtgcctctgtggtctggttttgccgagggcaccgcccgtgtgtgacccctagtttgacaagggcagagggtaacgcccggcctgttccccagggaggaagagttttcctatggaaattgccatcactctccttcccaaggtgattctgaaggtgagctgtctctgttcgttggaaatgcaaagaaataaatgtacaaaaatagagtggcgattcctcaacccccctgtcaggcttgagttgctggcgcttcctctgggaacggcatggatggccctgagtcatccaggcagctaagtggactgctcggctccccacagccctgcccgcaggcctgccggccccacccctgtccctggagtggccctggaaagtccttgctgtgtacatgcatgtgtgtgtgcctgtgtgtgtacatgtgtgtgcatgtgtgtgcttgtgtgtgtgtacatgtgtgtgcatgtgtgtgtgtgtgcatgtgtgtgtgcgccgaggggacacagaactgtggagctgggggtggcacaaggacccccgaaggtactggaaccccagcagctgctcagccctggccccacttactcctcttctctttcccagccctcaccctccgcctcgcacctccactgtctgtcttggtcttgcccacagccgggctgcaggtttgtgcctgaaacttcatgttcagtctgtcttgtctgagccaggctgcagggtgcaaggagagagcttctggccgagagtcggccatgctgggatgccatgggtctccccatctgtaaaacggaaatggccacgtccaccgagtggcctgctgtcagcactgggtgaggaagcgtgtgccgggatgagggcctggtaccaggctgcctcactgtccgagtggccgtgccgcctgcaggggccttgttctgcctccagggcctgtcctgggccaccctcacagggagggagtgcctgtccctgcctggaagaggcagcaggagagaggcgttgggggtgaaaagtgttgttctggaagactctttgtagagaggtggtgcagcagggacgctggtctccctcagctgcaggggcctcggggcctggccaccgccctgtgggtcagtgatgtcacgatgacctgcagccctgggtctgtcccgggccaggagtctctgaggacctgcctggggaatgccatggagaccctggggctgggacctggcttagacacagagaccagtgcaagggaaagggggcttccaggacactggggcttggggggcggtgggcagtgtggtctggggctgccatcgatgctgcaggtcagcctggccagccttgctgtggccttcagacgggcagtggagggctgggaactgaagcctggtccagggtggtctccaggcccgcaggacacagaacacagcagagacagcactgcacagaaggcagggacgatatccggggcagactccccaggatggcagccccaagtggccaggggcacaccctgggggcaggaggtcagtgcctgcccagggccgactgcagcggagctgccacagaggggttcatcttggtctctgcacaattcaatcaggccagaggcggtaccgttcacctggggagggggcccgggacctggcccagagatgtggggcctcgcttcagtggaggacttagcagaaagttctgggaggggcccaaggagacactggggaacatgcacagcccaggatgggcctcggtttccccagtcataacagctggcgatgacacctgggacaccagtcctttggcacctggcagcccttcgggggagaagaggtggctctacccactccagcatcgggcagtgtgggcaaggggtggctctgcccactccagcgtcaggcagtgcgggctgaggttcccgacctctccatggctgaatgccagccctgggctccataaggcagacggtgatgctgggctgggtctctcacagtctcagcaggtctgatccatcgtgtggaggccactgtggcccctgctgtggctggggttgccaccaggggctggggaacgagcggtcctggaagtcacagaggtgcctgtctgggccctgctgtgtctgagacagcttggcaagtctctgccatcttcctctgcacctcgctttcctctgtaaaatggaataataccctcggttcagggtgctatgagttttaaatgagaggatggccaagctggcgcctggtaggtttgtgtccgggtgggtttgccctgccgctgaagacggtgtcctctccttgcaggggcctccctggacagcctggacagcctcagccgcgccctgggcgtcctagaggagcacgccaacagctcgaggcggagggcacgcaggcatgctgcggacgatgactacaacatcgaggtcctgctgggcgtggatgactctgtggtgcagttccacgggaaggagcacgtacagaagtacctgctgacactcatgaacattgtgagtggggtggctgagggggcagggtggggcggggagggtcaaccaggggctgggcaggccagagaggcccagctgggccaggtcccctgaggctctgccgatttccttgttagccggaggtgagtgacacagtctcagggaggcttgctgggtccccaggtgagacaagttgaccatccctgacctcagttctctcgtctgcacatcgtgggtgatggtaacttggtgaggctcttcacaggctaaggcgggtttgtgcaaactccagtcgtttgaatgacaatgtcattcaatgtcccgtcatttgaaaaatatgttttcttgatgtttgccacttttaaaactaaaatcatttaaaaaggcaaccttattttacctgaaaagctaatataatagtaagacataaagtgacgttattcagccccagctggatagccctgccttcttctcgctccaaacagaagccccttttctgtttaaagtagagattcacgtgcattagagcgagggccagacaccaacccagggcccctccttaaagctcgcagtgggaggaattggggagggaattcctttctccctgtgagtctgggctattgaaaggggtgtctatgtgccaccttcgtcttctgggcacctgcccatggtctgcctaacactaagagattaaagaaccacctccccctcattccatacccccaacaacctaagcaggaggtgccaggatgctgaaccgtgtgtgggtggaggctgtgcagacctttcctctctctgcctcatgtggtcagagccactgtggggatgaggggcgtccagtcttcaaaatgcaggctcccaggggagcagactggcttggctgagtcctgcagggaaaagaagggggtgagaaggaggaccagggcacggcctggaatgtgagatgctgccagtggggccctaggggcaggggggtatttgtgggaggaagccggggcttagggagggctggaggtggtgtggaagccgggcaggtgggaagttctagaaccccgtgctgcgtgtccacacctgtggatgaatgaggtcctctggggccgggctagaggcaggcagcagggtgtgcaggtctgctcaggatctgctgcccagctctgcttttcggaccaggggtgagcccctccaggagccaagctgacacatgggtcagagtccccagggccctggtgaaaagatacctcaggggcaggaggggatgtgagtgagctgaacactggacagagacaccaccttcatgctcactttcctcttgaccggtcttgggtgagtcagctagccctctggagcccagccttatccgtacagggggccgaagtccgctgcatcggcagaattcgttttatttgggagagcgttgtcacacttaccctcatcttatttttgaaacgtacctttaatgcaataatcataataacggccgggtgcggtggctcacgcctgtaatcccagcactttgggaggccgaggtgggcggatcacgaggtcaggagatcgagaccacggtgaaaccccgtctctactaaaaatacaaaaaattagccgggcgtggtggcgggcgcctgtagtcccagctactcaggaggctgaggcaggagaatggcgtgaacctgggaggcggagcttgcagtgagctgagatcgcaccactgcactctagcctcagtgacagagcgagactccgtctcaaaaataataataataataataataataataacaataaaaccataatggctacattatcgagcccctactatgtgactgtgccgggcccatgctgggcacttgccatgctaaattatcttgggaagtcctcatgctaggtctgtgagactggcaggtataaaatcttggctgccttcacaatatgagttcttcccctagcattatgtcgccttccaacccagcggggaaaggactgggcttggaattacagtccgatggcgactccaggcctcgccttttccaggcgcgtcgttgggaacgctgctcccgtcctctgagccttagttttctcatctgtaaaatgggccagtgttttcatcgtgggggttgatgtgattacatgagataatgtcagtgaatgtgcttttcagtctctcagtagggtgaacacgttttcagtttccacataaaatgtggttttgttatcatgacagtggcactgtttagtgacagtccaggaggggtcacttctgatagcccaccaagggcgctgaccaaatgtggggcccgtggtgagtccttcatgaggctggcagaggcagatcaacctttctcctggtgcccagggtctctctgtcacaacagctggttggaggatgtctagaacgttctctcacttttgccgtccaactttattcaaaccctagtgatccagccgtaccccctattttgaataatgggaaggttcgtttctagaaaagcatgagaaatttaaaaattcttaaattgagatgagttttatcacaacagagaaaccgttttaggagacaagtctcagaagttgagaaagtatttgggccgtgtctgttgtcccctgttgcacagaagtgagcactgattcattcagcaaacgtgttgacagtgtgcttgtcatgggcacagtgggggtgtcctgcagaggcggcggggcgtggcagagagtcccggggcgtgggagaccggcggcggagggtcagcggggggtctctgcctctgatctgagccccagctcccactgcaagagcgcagcgtgggcgagggagataaggcgcggccgtgcctggagcatggcattgccctgacgatgaatgccctgcgtcctcactgagagcctctgcatgcccggagagtcctgaggacagatctaagctatgtcggaccctttggtggtcttggggaggaggggcattgagcaagtgggagcttctgagaaagggtgaccttccagagccctgctgtgcgacagagcttcccgcggtgctggggagatgctcgtctcgccctttctggggcagtagccaccggggctctggagcacttgaagtgtggctggtgtccttgaagaactgaatttttaatttaacttcttatttgttccaagagaattttaatttaaaaaattttaattgcggtgaaatatacagaacataagtcaccgtcttcaccatttttaagcgtgcgattcggtggcgtaagcacattcatgtggctgggccaccatcgccaccaccgtccacagaactcttcatcttgtaaaattgaaactgtgcccattgagtttcagccctttcctcccctccccccgactcctggcacccaccactccactttctgtttctgagaatttgactactctgggtacctcgcataagtggatcaaacaataattgtccttttgtgtctggcttatttcacttagcatgacatcctcggggccatccacattgcagcatgtgtaagaatgtccttccttttcagggaggaccagtatcccgtgtgtgggtggatcggccacattttgtttatccagccatccatgggcactccggtggccccctcatgggctactgtgaatagtgctgccgtgaacgtgggtgttccagactctgttttccgttctcttgactatatgcccataagtagaattgcgggacacagggtaattctttctttaattttttgaggagtttccacgctgtttcccacagtggctgtgccattttgccccccaccaacagtgtacagggattctagtctctccaaattgtcaccaactcttgtcttttttttcttttttacggtagccaccccgaagagtactttgtttggattaattttcacctggatggaagccgcagtgtggctggcagctgctgtgctgaacagggcagggttgggcctgtgcacagaggatctgcctaccgtgccctgtctctgaacttgggtgctatgggggcctcgaaccacaaccccaagtggccctctaaggcctggccagtggcttgtcacactcctcttgtaagtcccagctggtcacagggctccccgtggctggagcgaaagcaaaagcatggaaggacagacgtggcagcagccggctgggactgggctcccagtgaggtgtttgtctggagctgtagagcaggtggggctgggcaacggcacatccagagcccggggtctgggggccagccctgggcaatgagctgcccactgaactggatgcagagaatggtggcacagcctgtgccctgggaaaggccgtcgagccctgggaggaggagctggtgggggccctgatggtggggacccagggaatgcaggctctgaggaggaggtgaggtggtggcaggctgagtgcaggcacagctccaccctggcagccctgcactgcctcagtttccctcatcatttggggtgacttctgcctgcagagctccctttgggatctctttgtggcagagcctgggctgggatatggggtccaggggtggcacaggcagttcagcctcatcgatcacccctgtgctcccctccccagtctcccttgtagctggtgtggagctgcatggccagttttgcctagtggcctgtgtgaaaggaagtgacctgggtcacctgtggaccaaggctggtaagagcttggagtcccctccatctctgtctcccctgccacggaaaccttggaagccatgtgtcccagtaggtacagctgcaacataggctcgggccctcccgacccaccccgcgccatggtgtgagtaaggaaacacggtgtgcggtgtattgtgttcagctgctgagatggggtggattctcggcatagccatcctcctctgtctggtgcccctggctgccgttcatacgggggccggtgtttatggggcgtctattatatgtcaggcaaggggtgcagctgtgagcatgacaggacgtaaccctgctaccttgcattctgggaagggaggcacagacgatactgaagtgaaaaacaaacaggatcatttcaaataatgacaaatgcaatgaaagaaataaaatagttaggagatggagaaggaagaagggtaggggaaggcaggccactttctacagctcaggggctggtgcactggagatatcacgggagcagaggctcacgacaacggaaggatgtgggaagaggtaggatagggatcgcctgttccaggtttgggggagggggcaggcggcgccaaggccctgaggcaggaatggggccggctggaagaatggaggcagcctggcctgtcaagcagggggcacaggtaggggaagtcggggccggcaaggccggccgccgcagtcttccagaggtggaggggagccgcctgtggctccgggagcagtggaaatcactggaggggctgcttcctgtctatgttaaagacaagacgtgatattcccttttctatgggaaagatgaagctgcccttttcatctcagacttgccagaagggaagcggcttggaaatggagcacttcatgaggccacctgggcacagaaaggggctctttggtttaggcaaccacccacctgcccactccagcagcccctgctgggtccagttttcttatcttcctccttacatctagaaaagcatgttttttggtttattgaaatagtccatatttaacacagatgatttattttatttatttatttattgtgagacagagtctcactctgtcgcccaggctggagtacagtggtgtgatcttggctcactgcaacctcttcctcccgagttcaaacgattctcctgcctcagcctcctgagtagctgggattacaggcatgcaccaccacggccgtctaatttttttttttttttttttttgtatttttagtaaagacagtggtttcaccatgttggccaggctggtcttgaactcctgacctcaggtgaccacccaccttggccttccaaagtgctgggattacaggcgtgagccaccgtgccgggacattttttttgctatgtaaaattagcataaattcctgtaggtatgtgaatgtcttctcccagcagttaattgtctactacgttgttttaatgattgcataacatcgcaccatatgactgtcacacactttttacctaacttattatttatatgacatattcacatagcaaaacttatttctccattagaggtcagacatgccactaactgtatcacgttcatagagttgaatctatcgctcgtgcttacttatttccttaagctgagttgctgaaagcgaagtctctggccaacagatatgcccattttttaagctttctacactggaatgttctctgttatggtttcatctattcccgcttcattgagcaaatgactgtctccccacctcctcacaccactgagtccttttgagcagtggtaatttaattacaacggagataagtttttttgttgtaagttgttatttccttgatgttaatgagcctgcatttaaaaatatacgtgtatttgtaaacagagattattttatttttttgcttggcctattcatgcccttgattctgctgggatttgggggtgttttattcatctgaagagtctgtgtacttaagtagataaactttttgtctgtcacatgtgtgggaaatatttcccccagtcctgttgttgaccttttgttttattccgcctgggatagtttttgatgtcctacatttttgtgtgtgtgaccacagggaaagatcctgcagtctttcccttcccaggggaaaagcttctcccttgggtgatgtgtttgatgcctcctgccctccccagaagttaatcttctgagtttctgccctacttggcagctgtacttcccaagctccagttcctcaccaaccgctgactgttcttgggtttagccatagcagccctccacctgaatttctcccaaagtaagaggaaagataggcttagtgcagtggctcacacctgtaatcctaggactttgggaggccaaggcgggcggatcacttgaggtcaagagttcgagacgagcctggccaacatgacaaaacctcatctctactaaaaatacaaaaataagccgagtgtggtggcacgtgcctgtaatcccagctactcgggaggctgaggcaggagaatggcttgaacctgggaggcggaggttgcggtgagctgaggtgacgccactgcactccagtctgggcgacagagtgagattctctctcaaaaaaaaaaaaaaaaaaaaaaggaaagaaaggtgtggcggggagatagagaattcaaaggagccaatgtattacatgcaatgcattcttatttcccctcaatatctggctgctgcaaaactcgtcaggatattaccagtggggaacactggcctaaaggcagagccagtagtaactcccaggccccaacgcacaatgaaaatgtgggatcgcttgttcaaagagcagaggaaggtgccatacaaagggactattaagccacttcctttcttccttagtctctgtctctctgtctctcaactcgctgttctttttatttgctttttaatattgttctaagtgaacaaaaattggaaccttgaattattagcatgaatttcttattcatctttaaattgtgcgatggctattttaaatgcaaatattagagcatttagcttctatgtggggtcactgaaattaaacaaatgtgtattttgtggctgatccctgatgggtgcctcaggctgaccagaagtttatgacaggcacagccagactcagggaggctgggaggaagaagagaggatttcacagagtggaatcctgccgaggggaggctcctcaggtacggggtcctagcagagtgagtgcacccccagcaggaagggcacacccactggggtctgagagcttcctgccacccctggaagaacacattggctgtgccctggccagggcgtctggggaagtagagccaggcacgcccccttcctactggtgcactgctccagcccagagcgtatggccacggccaatcccatctctatgcaggtgtcactcacgggaggttcacctctgccgaaacacgggctctggccagccatccaccagacatgcccctttcctgccagccgtgggcgggatggccaccaccacgcctgccctgagatgccgtggggaatacatgcctgatcctgcccctgctgggggcagctgaaagcctgtcctggggagatgggaccatgctgcattgccccaggagccttcacttacaaaacacacatgcaagggtgagatgacgaagaacttcaagacagagctgcagagggtcaagccccaaggtcggggccttctgaggataggccctggtcatctatgaagtcagcctgtccctagggcgagcccagaaacctgagccctgcgctcagaccccatagcctgagggaacacctgctgccctgcatgtgccccctggatgccacctcagactcccgttctctgtggcctttccccagcctctgcttgggcatgtccacacacctctgaggcccaggcgaagccagccgtgctaagagggcactgggtgtgtgctgagcctgtggcaggcagggggcgggcccttgtccacagaggctctctgcagtgagttttgtttttttttttttttccttgagatagagtcttgctctgtcgcccgggctggagtgcaatggcatgatctcggctcactgcaaccgccacctctcaggttcaagcaattctcctgcctcagcctcccaagtacctgggactactggcacgtgccgccatgcctggctaatttttatatttttagtagagacggggtttcaccatgttggccaggctggtctagaactcttgacctcaggtgatccacccgcctcagcctcccaaagtgctgggatcacaggcatgagccactgctcccggcctacactggagtttgagcacacgcagctgtagccctcctggctgctggcaaccctgggatgagtctggtctcctgaggctcagcggcccttagcctggtcagagatgctgaggccccttggggatgcccacattcccccgtctaagggcagaggggtctcccttccaagcactgtgaggctaggaggatggagtgagagccgtgggcagatgtgtggcccatccagctttgctggccccccagccccgtcactggcagagtgacttctattccctctgccttcattctgctcctgctcctcccagctttctactctggctcagcctgcagcctccaccttgcgttgctgcctcccctgggcccagccgggaggataaggggctctcctctgcccaggcccgccccccgcccccgagggcattgggagaccactgtcatgtttgacctttcctgcttgggaaacatactccctgaagtactgggtgctgccaggctgggacacaggtgacattgctgaacatgcctgatactgaccctggggctttggtatttctcacattttcaaaaacttgctctgccagcgcctgggctagtctctgctcacaaaccagatgctgtggccatgtgtgtgggcctgggcacccctaaagagtgggcttgggcctgacaggcgaggctgccatgctaggaggcagctcagatgtgtgtggcacctcaagtttcgtccccaggtacagacagggactcttctgcaggctcaggtaaatgggaggcagggatgaatgccttggaagatcagagccgttgtggaagtaatatgtttatatatgcatttttttcttttttgagacagggtctcactcagtcacccaggctggagcgtagtgctgcaatcatagctcactgcagcctcaaacttcagcctcccaagcagctgggactacaggcacacaccaccatgcctgactcattttttaaagatttgttttagagacaggttcatgctatgctgcatggtggactcaatcacctgggcttaagtgatcctgctgtctcagcttcctgagtagctgggatcacaggcacgagccaccacgcctggctacagatacatttttaaaagtaaaatctatctgtgccaagacttcaagaaatataaagcttgggcccaaggctgaagcttcctttgtggcttcaagcatttcactaaagcgctaatttcaatcctactcttcccgagaagcctaaggcctcaatgtgttgcttaaatatcaggatctacaaagaccttgaactgtctttgtgagcccctggtcccaccgcactccttgtagacaggaggcagaccattgcagtgggtgatacccagcctgcagcaaggccagcgctcaacctattgctaccaggaacacgtactctcaggcctgccagaggccaccagacagatgtaaggcatctccccctgaagtggccccttttttggatggtaagcattttaaaacatcagttttacattaaagtaaatttggacgtattacttgcatgaaagcaaaattcacgtgaatttgtcaaggtaaactggagattctaaagctgtgttggcaaactctggccccagggccacctggcccttcacctgtttttgtaaataaagttttattggaacacagccacgcctattgatttatgaattgcctgtggccatttttgtgctacaacagtgggttgggtagttgcaacagaaaccatatggcccacaaagctgagaacattcactatgaggtgctaaaggaatttttgctaccaggctgtgcagaaatgtacttgcttagtgcctgccttgagctgtgatggccccaggcctccaaagtgagcatgtgcctttcactacatcagtgcacgtgggtgtacgtattagggaagtactgagcacagtgggctgctcagaccccagcccacccccacactagccttatcagctcaaaggaccggtgaggctacttcggggattctttttaaaggatagaatgaactgctcttaaccgctgtagaacggcagagcaggaggagcaggtttccgggcatgcagaatagtctctcccagctgtgttaactgcttatgttctgggagaatgcctgagcccccaaagcatctcttctgctgagggcagacacgctcctaggcctatggagaacgtggaatccaaggatcttctgcgccttcagtcgcggctataacctttgacccctcccagcacgagaacattctctgtacagtatgttctacgaccgttttttttgaatgaatgatttctctctatgccaggattcagatatttttcctcttttcatttctaatttaatccagaaattggcctggacttaccagagccttgccagggtttgcaaacaatccgaaggcatatgggctcaatttctcaccaactttcacgagtgctgagaccgcatggtggcggtggggaaggcagtggtcggacaggagtgttttcagctggtcgtggtggaaatctcgtaaactggccgcagagatgcaaaccagccaggcggaaggcgtcgccccaagtcatagttcacgagtcgctggctctggttcctgggaaagagaagaacatctctgaaactggacacgaaacacgggtcccttaagtggggggaggcaagcggggttcagggtctgctagtggtgctgtggccctgggggtgttgctggcactgtttctgttcctcacgcttgtcccgctggccttacagcctggccctgtgtgccaccaggagacacagccatgagggccagtggtgtgtgcgaggctgcacgcaaggctcagaagagggcagtgccctcacgtgctcacagtagccaggcccgaggggcccaggtggctgaaggctgttgggagtggtggggactcgggcgaccggagaggccacgcccccctgcagagctcctcgtggttccactcgcttgtgtttctgtaggaataagcagaccactgctgccagctcgctcttccatgagaagctggaaatctactttttttgggaaatctaattatttttcaatgtgggccacagattgaaattaagaagccacactgcacaggtgaagcagaacacggctgcaggacaagtctggtgtgtgggtggcctgagtgttctttccagcctagaaggaaggaggcgactgcctgtcctgctgcgccctgtgctggtcagtgccaactcccggggctgttgggagcaccactcgagttgaacaccaggaaagtgctcagtagagcacgggtgtgggaggagcatgctgggattgggagctgtcctcagtcatgttcggcactccctggactcctggcctccgcatccctgcactgggggagctcagagcacaggagtatggggagcgggatcaggacacgtgattacaccttggttcatcagggaagggtgcctggggcggctggtcagggaaggctcctcggacaagggccaccgcagttgcctctaatgaggactcctggtggtggcacagcgcgcgcaaaggcctggccgcatcgtgaatcgcagtgcgcagattgggccctgctggagcttgtggggcttggagagcgggagcgaggttgatttgtggtctacaaagatagactcctctctcttaggaggtttggggcttatgctttctatccttggaaacacccctccccacctgaggaggggaactcacatttgctggttttgcacgtgctggccctgtgcaaggaggcacacctgtgacctcactaccttgccccagtggccctgtgaggttcccttgcctgcatcaggtcactgagactgagagagacatggccagagcacggcagatggagtcacatacctgtgggaaggtggcccctgtgctggtcctcccctactgtctggcctgaagatcgagagctcccaaatcccctagcatgctccgcgggttctcatctcaggcctcactgacctccccacagcatttggagtcccctggccacacccgcctctccccgcaggccatccgctctgcctcttgctttgccttggcttctgcatagatctactgtgtcctcctgttctgaggcccacccgcctgcccactcactcccttagtgcacccggatagagcagccctaggtgctggggatgtcgtggtgagcacgggatccagaccgcagggagcacatgttccagcagggctggggaggccgacagaccagtgatggtgagcaggtggggaacactcgaacaggggtcttgtgggtggatctcacctctgcttcctcctgaaatgtgcagcaccctccccaccagtggacatctccccacctcctccctcctccctcctccgcagacctcctgatagctgatgtggaagcctcccagcatcctgtccttggcctcccgcggggaactgatggttgtcagaatgggagttagagtccctgtggacgaggagggccagccatccacacacccggatgacagcttgaggcagcctcggagcttgtcttgtgcaggctccagcaaggaggtgacagctgaaccacaagaacagaggcgatgatgtgccacgccgggctgtcgggctgacctggcgtgggctctcactccctgaggcccctcccaggctgcccctggagctgagttgcagtcaagcaatcctgggtcttcctccccagtccaggggtctccttggtggtgtgtctcagcagggttagggactcccacaaaggtgactttgtatcggacccagagagggtctgcccacctgatttttcactgagtacctggaaaaggcctggcacgtagtaggtgctcagtaaatctcttttgaatgaataagtgactaaatgaattcccataaagcgactgtgatctcagagactcccataaaaatgaactctatctgtgggtgtggaactcctcgtggctgggtgtccttatgccttcgcttctatgacagaggctgtgtctccatcgtccatgctgacgtctgaatggccaggtcccgggatacagtttctagttgcagcaggtttgccaaattgctcctcagagcctctgtactgactcccatgcccacttatgtgagcctctcaatctctctgtgcctcggcttcctcactggcacagcggggataacactcactcgcagggtgtgggaagggaaagatatcgcacgcggggaagtactcggcgtaggcggagaagatcagagccgaccagcgaggcgagcagttgttcactcggcccatgatgtctgggaagagccccagccagctcccgtcctggacaagcttttttctcatgggggccacctgcttgccttggcacagcgaggacagggccttggcagccaaaggagacggtcagctgtctccacctggtagtggagatagtcacagtggggtgatccttgagctggttttggtcacagagttggtgtctcccaagtggaaagtgggagggcatcattccacacagaggagccccttgtgcaaaagaggtgccagccctcggccaccctgggagcccgctggggtgggagaaggcgcgtgcggctgagcttggccttggtcctgaagcctggggaaacacgggagtactgagcacccaggttgcatcagcaagaatgcagaacagtccctgcctagtggagacggacagacagctaacaaacgaaggcgactggagatcacgatggtgccaggaagttaccaggatgggacagcacccgaggcagcatagggtgccccgtgggaatgttcacagagtgaggaaacttcagagcaagggaaacttccctgcagccagacaggaggaaggaaacctggctgcagcctgcaagacctcccacccgcgcctggcagggagcctggcctgggggctgcccatgctggcccttctgatcctgagcagaagtgatcacggacccttgtgcttccaataattcggcccctcttcctttggttctgggtttcctgtgtagcggtgggcaggatttcatctatctttccatctgccagagtctggcaagggagctaagccacataaacagactctggtggtgcagggggattgtgacctgctgcacagaagggcaaagccgtttcccgccaagcccaagaggcgctggaacatctgctctgggtgttggaaagcaccctgcatgactgcgctttcagggagggatacgctggcagcagacgacccttgccgtgagcttgtaatgcaggacccttcttgcagccttcaccttactcttgccctgcgctctgagtgccttgggggcccctgcccaggtcgaggggcacagtgcaaggtgatggcctgcagccctctgtcatgccttctcagtctctgaggggttcatacctgctctgccagggcctctcccttcttcctcatcatgcatggatgcctggggagtagggaggctggcctgagtcctcctcagctttgctctgaggtggtcgggtctgacgcctgggccacttaggcatgctggacccctgcccagtccaagccctatgccttgatgggtgtccactctacagcctctgccagccagtgccagctacccacgccctggccctcgccagcaggagctgctgcatcccacacacccccttctggagcgaggggcatccatgtgctgcctgaggcccattcattaacatgagatccctctccattctaaccacctgcttggccaccatgtgggttggcctccaccctcagcagagggtctcatctcagtgggaagtggagcccagaaccccggggactatctgcatctcaccctaaggcgggggcagcggtagggatagggctccggctccaagcctggtgtgggctcagcagcccgccccccaccccggcagctgcttgctgccccctcccccacaccgttcctgtcccctgatgccacagctctctcctcccatagcggcattttccttccctctttccttaggtcacactggtgacagagcagcggcagaatatgatgtgtgggggaataaaaatgcattgttctcaaattacatggtggtgctcaaacggacccaggtgaccgagctcagtcacgggatgggccgggccacacagcctctgagacgggcgtgtggggggatgccagggccgggggtggcacgagccctggccacttagggcccctctttgaaaggaaactcctcactgagccccccagggctctgtggccagggacagccgacaagctcagcagagttccagggaggcagggccgtcctgcagccactgctagcaagaattagaatccctgacttttctcggcctttccctgtcagtggctcgcagtggccgagaggcccctgggggacactgggctctggcctgaggcctcggccgtgtccttctgcgtcctgcagcctcagcagcactggtccttccccgttctgcagcatttccctttctgatgaggcatccggtcagcgggtgggaaggtcagtccctaagtggtggcatggctgttgtttccccaaaggcgacgcagccagcggggagagctccagggctgggtcacactcgcggacgtgcctgggcacagcagcccctccagctctggaaaacacaggggcatgtgcaagctgttcactcagacctctcccgatggtgatggccaggaggagagccagggtgggtgtaagggcgaagcccaggtggaccattctgtgcatggggtcccagggaaacagcttgggctgttggaccctcctgtaatttgatgacagtttcattcagcctgtactaggtgctggggatttcacttttgtcacgcatgtccgtgtgaagagaccaccaccaggctttgtgtgagcaataaagcttttgaatcacctaggtgttgtttttacctaaatcagtctggcctggtgtatgacaacataaactcaaggatagagcccaaaaactcgccaaccaagcaaataattatgctgaacccccttgggcactctctaattggatgtcctgggtcctcccaattcttagtcctttaatacctgtttttctccttttattcggacgctgtgtcttccgtttagtttctcaattcataccaaactgcatccaggccatcaccaatcattctatacgacaaatgctccttctaacaaccccataatatcacctgttaccccaaaatcttccttcagcttaatctctcccactctaggtttccatgctgcccctaatcctgctcgaagcagccctgagaagcatcacccattatctctccatatcacccccaaaaattttcaccaccccaacacttcaccactatttcattttgtttttcttattaatataagaagacaggaatgtcaggcctctgagcccaagctaagccatcatatcccctgtgacctgcacatatacatccagatggcctgaaacaactgaagatccacaaaagaagtgaaaatagatagttcctgccttaactgatggcattccaccattgtgatctgttcctgccccaccctagctgatcaatcaattgaatttgtgaacaatacaccctctccgcccttggggtaatgtactttgtgatattgccacccgcccccgccggacccgcccttgtgaatctactttgtatgatacaccctccccacccttgagaagatactttgtaatattctctccccccaacttaagaagatacttagtaatattcttccccacccccatccttaagaagatactttgtaatattgtccccccctaccttaagaagatattttgtaatattcttccgcccttgagaatgtactttgtaaaatccgtccccagcccacaaaaaattgctcctggccgggcgcggtggctcacgcctgtaatcccagcactttgggaggccgaggcgggcagatcatgaagtcaggagatcaagaccatcctggctaacattgtgaaaccctgcctctactaaaaaaaaaaaaaaaaaaaaaaaaaaaaccaggcgcactggcgggcgcctgtagccccagctactcgggaggctgaggcaagagaatggcatgaacctgggaggtggagctggcagtgagctgagatcatgccactgcactccaacctgggcaacagagagagactccgtctcaaaaaaaaaaaaaaattgctcctaactccaccgtctatcccaaacctataccaacgaatggtagtcccaccaccctttgctgactctctttttggactcagcccacctgcacccaggtgattaaaaagctttattgctcacacaaagcctgtttggtgatctcttcacatggacgcacgtgataattttcattgttgcttcaacctgaaacaaccctgagacacagggactattattatctccattttatagataaagaaactgaggcccagacaggttaagtaactggccccaagtcacgcagcaggattgtggcagagcccatgctggcacccatgaaatctgacctcagagtgggaatatcccccccacactctgctaaccccccaaattcaggagagggggaggggcagcctcttgccgtcgttagtacaaacccgggaaggtttgtaatgcgacctgtcttctcaacgtgcctgctggagtgccacactgaggggtgcagcacatctcttgagaccctgctgggctctgtgcattgatgagctggcctggaagtggaggagccccgtccccaccctgaggcatctgcagaggtatcagcagagtgtggacaggcacaggagacgtcgcctgaggagtgagggggtggccttgggcagagtgttcctgcgctgggtattgaaggaggggactctgaccacctcactttttgatgtatgaactgagcctagtaattctgatcctggccatttccgtttcatggtagtttgatattttgagcaagagtcacgtttcttctagcattccctctgaagcatctgctgaggagccgagggtgaagaagatctgcaatgggaacgttgattctcatgataagcccaggctctggcagccccgtttaggcaccatgcaatgcctaaactcttcctccacggaggccagcagacctctgtcccctgctcctggctgcactctcttctctgcctccatcctggtggtccaagcctggcctccgaaggggcacagagagaacagccttctcctcacttatttcagggggtcccagagaagccacagagcagcaggcccccctcccccaggcctctgacagacttttcaggcctggcttgctcctggacatggttttgccaggtgggccacaggctgcctctggtggcccaaagctcagctgagcgaaggacatgggaactttcctgaaggttggggtggctgctgttccagggcccctgcctgtctcctctgtggctggcaggccagtaggcctccccagtagggagcctgcaccggttcccccctttctgcacccctcccccaccttggcagaggacaaagtcacctctgcccagcagccgcaggccacctcccagggctcaccatcccctgggtggaactctgccaccagtgaggcaaactttacattgccatgcagagccgctccttcctcattgtctattccagaacagaaacttggctgcatctttgcataagcaaaaggcgcattacaatgtgtttccccaaacaagagagcccttggcctctctccgcacagagatggctgcggctttgaacatttccccccaaggtttaaagattccaggatcaatttctcagacagtactcaaggacattgtccctgggcttcccctccccctgcaacctgggaaaggagagctgcttctccccagcacacgcaggccttgggtagggtggatgcggaggaggcccccagggctgctggggggaggggaggggaggcccttagctgggggcctccccatgagaggggtcacaggcctacgctgggtcatacattttgcccatttcctgttattccatatcttcaaagtgattcactccattcattcagcaaatgtttactgagcacctactatgggctagacactgctgggagcagttgcacggcaagtccaaagttcctgaggtggagacaggctgcctgtgcaaggagcagccgggctagccgctggagcacagggagcagggccagggcagcccgagaagactcagcagggccagaccctcctggcctggaggtcacgccaggaactgcggtctcatgccttggggtaggaagggtttaagcaaggaggtcactgcctctttcctttgagatatattttttaggatgagtcttttttttcaaatgctcctgagatatctaaagaattgaggggctgcacagggagagtgaggattccaggcctgaaccaaagcacaggcagcaggagagggcagccggctctggggaaggctggctgggctgtcaggagcaagggtgccatgtggggaggtatctgaagtgacgcatggagaagccagccagggccagcgtggagagggctccgaatgccaggcgaggggctgggccctgcttccgaaggcactggagagccgttgagggttttagacagtggaaggggaaggtgagatctattccgcttggtgatcgtagtgaagaatggtgtgtgtgggtgggggggtggggaggacacgagggggaccgttggggagccctaccgcctgtctcctgtctggcagagaaagtgggtggggccgggggaggagggggatgtgcaggaggcaggcatgtggaggtcgccttctgtcttcagttgctctttttgccacatcagtcgactctctgctctgcagaaatgttgccgctgtgtccttactgaggacgccagtgttttgtcgggaattacactgattactcccagtggttcccatgcccaggtgggccctgcaggcctctggccagggctgggcaggaaattttggcaattttgcagcctcctgaaaagcaggtagagccctgggatggtagagggggcaggacggggctcactcctcaggcccacggaggacaaggacactgtggagcacccctgcctctcacatgccccacaaaccctgcctgccccccatgtctgttcctgatgtatcatattaacctacggggactgagaggctggacagcagaaggagcccggccccggactgtgggttggactttgccatagcacacgcaggggcaggagaaccacccaggccagtggtcagtggtctctgggccacagtgccccatggggttcctgactgctgggaggggctgctgagacctggcctgggagggggccaagttgagggctccggagcaggatcccaggcccagcagccacccagaggagccaggaggccatcgcaagccccaccacggccttgctcaggcctgcctcccagagagtgggcatgcctggggaactatgtgctgtgctggtgtggaagggaggaagggacagaggtttcctggggagaggatcagggagagcgcaccacagttgaaggctaccagggagggagggctgagggggccttggctgcggcctggcctccttctccctggctacctgctgggagcatttgcaggcatgccctctctagctcctcagcagccagggagccccagttaatctccgaaccatctgaggcttccagaggccagggtcagggcacccagcgcaggaggtgggagctggctgctggcggacagcccacagtggagctccccagccaggggcccacgcctagcagcctgacaccccagggctcagctgcctcgaccccacctccaagcagaatgtgaggctgacggtctatcccagggagttccatgcccagcgacggggcttttggagtggttggtcacctcctgtcccaaatcagggagcaggattagatctgctcaatgttcagaaggacacaagattccttcttgagatgagagctgccaccttcggccccaggggtagggctaggagagtgggaagatcttgcgtcctgaggggcagggcctggccaggagccaggagagggccagccccgcatctcctccctccgccctgtgggagctgccggaatgcccttccagagccccagcctctccctgctcaggcggggcagatgacccctattccaatccacatcatccctcacatccgtcccttctctgcactcatccccaaagctgaaccccacattcccacatcttgaccccttccatctactttccgtaaggcacctggagtaagcttcttaaatgccccgccatcatccttcctccatgtcctcccactgctcttagagaggatttggaatccttctcctgacttcgtggtctggcctcagtgctcccctcccacctcctctgctggggcatcccttccacatcccctctgtgcttggaaggtgcctcgctgcttccaaccctgggaggtttgcatgggctgcctcctctgccaggagcgccatccctgctttgctgagctaccctgttctgtttctcaggtctcatgacatgccacgtccttccaggccccagtgggcagattcccactaatatatcctctggttccctgcctttccctcgaggccggtgatcctggagctggtctcgtagcatctgagtgtccctctccgcctcctggcaggagggctggctctgatctactcagagccacaattcatggtgaggcagtggttctgctgggtctgctgggtgccagcctcagcccagtggggaaggagagaccaggtcaggctcgcccaggccattctgggtcccagggtgtggtgggctgcacaagaggccagggtcagtttagtttgagaagtcccattgagagcctgtgaggggcccgtggctgtgctgagggtctgtgtggacggtgaggtcaacatttacacgcttaggctcaaacgtggggaaaaatgcaactttctttcattcttttttttttttttttttttttagacagagtcttgctctgtctcccaggctggagtgcaatgacgcgatctcggctcactgcaacctccgcctcctgggttcaagtgattctcctgcctcagcctcctgagcagctgggattacaagcgctcgccaccatgcctggctaattttgtatttttagtagagagagggtttcaccgtgttggccaggctggtcttgaacttctgacttcaggtgatccaccgccttggcctcccaaagtgctgggattgcaggcgtgagccactgcgcctggccagggctttctttcgttcctatatctggtgctgccctcatctcgggcactcagccccaggatagaaggaaggctgcagtctggcctgtgggaggtggctcagtctcttccccataaagcctttgtctcattccgcttgggctggtataacaaaatgccatagacccaggggtttaaatcacaggaattcatttcccacagttctgaagactgggaatttcaagatcatgttgccagctgggtcattccccagtgaggattctcttcctggtttgcagacagccgccttcttgctgggtcctcccacggcagagagagaggatgcaggctctctggtgtctgttcctataggacactaaccctatcatgagggtcccacccccatgaactcatctacccctaattacctcccaaaagccccatttgcaggcagaggcctggtggggggcagtagggatgagtcccctctgcagtagccttgcaagcaggcctgccctcctctcctgtaggccagtgcccccctgggcttgccctgaagcctggtggtgccccctagagccaggtaaacctgcaagccagtccccaactatcttgcccatgtgtctctggggtgcaggggaccctggcatctgctacacacagctgggagctgggccaccctctcaggcctgagcaggctgggccaccagttgggccctggaagccactcctactgctaggaacctgtcccctctcaggtcccaggcagcagccaggatcaagctcttttgcatttccttccttctcagatgtcaggactgttctgtatgacctgtgaggttggggttgaggatgaggagaagcctggcccctcatccctggcctttctcctctctcctattctgctcccttcagctgcagtgggaccttccctcggtcagactccatgagccaagctggccaagctttgtcgtgatagagaaagcaatactgtggacaattacagaaaccccttctctcttaagaaaaactggcttttaaggctactgtgccagcgtggactaaacaatctagtctgaccctcaaagctgggcaaggacttctgtggtttaggggtgcataccctacccccaggacctcacagggagctgcagggcactatggtttaccagcaatgaaaaaccgtttcattgtttgcacaagcaccattccattgcacctgcatgacggtttcatccccacaacagctttgtgatggggggactgcaatcctcattttacagaggaaacggagggcgatgaccaaatggcaaggcttcctggggacctgggtgccctcctcggagctccatcttgtcagccacaggggcgagatgggtcactgggggtctagaggataaccctcagcgcctacaggggttgctgacccaccctccccagacgcctacagcccggagccacggtgaccagccacgctcccgtgggtctgatgagttgtcccttgcctataggaaagagaggtgggagttgtggggagcccatttacaatcagatgtagatttgctgggcagcagttgccaagaggagctgcgtttgggctggatggtaccctcagcagggtccacatgtcatgaactctgccccacgatcggtgccatctttgttcccagcaccgatgccagcgggcctcgggatccttgtcttgcacgccctgtatgcctgtccacccatccatcatgatgtcattctccttgtgaaccctcgggtttcctgaggtgccttcccactgttttgaggtagcaatcactgttgctcagatgcaggctctacagattggagtgcagggagtgtgtgctggcctgacgtggcagcaggctccgggaagtatgtcttggccatgtccggagctgtcagcagcccctgggctcggtctgcacacagccagtccctgtttctccacttcttgatggtgccaatggcttcagcctttcagcgggtatccctgagtgcctgccaggtgctgcttagcctggctctgggcatgcaagcagggaggatgcaggtggctgcccagcccacaggggcacacagagggctccagaaataacacaccttgtgcttgatgaggggcggctcaggcctgcggggggccttccagggggaagtgactgctgagctggcctcgaggaggagtagggtttggttaaccaacaaaggaggtgacaggaagggggctgcgctagggagggccctgggtgtgtgcggtgggaagctggagggtgggggctcagtgcgaaggaagcccctgacagcctcgagcccgggataacctgacctatgtttctggagggtcttgctggctgtgttctgtagaaggggagttcacccccctgtttttgtgccacgggtccctttgatatctgctgaagcccattggcacctgctcagaataatggttttaaatgtgaagaatgaaacacgtgtaagaatatgattgtgataaatacagagacggcgactgcaggagctccagccatcaaaacagaacagggagagcacattggggatgcagtaatatgagctttttattaacacgttaaaacattatacctggtggtgggcctagaaccgcccccatttccaagtagcgatgcaggtaggtaatccccacacccaccagctatagcttggagtgacttctgccagggccggtcccagccctgcctgtgccgcgggggtccatcacccacgttcactgttgaagggaaggttgtgtttcagctggaggctacagcaagcgtagggctgctttccctgcccacgttccatgttcaggccccaggtgaggaaaccctgggctggtgggtggggttgctcaggaaggggctacagtgatcccagcaggtggtggtggcagcctggagaggcagagggcagggggcaatgagggaggggtcacaaggtggctcctagttgatggtgacgcctgggtggaaagcatgggaagaagaaggagcaggtgggggtcatcccattggcagagccagagccagtcctagggcctgtggttcccgctgatgcctccctgtttctttcaggtcaatgaaatctaccatgacgagtccttgggtgcccacatcaacgtggtcctggtgcggatcatcctcctgagctatggaaaggtgagtgcactgtggccagccgggcctgcctccaccccctcggagtgaggggcctgggagtgaggcatgggcctccttggagagtgtgtgcgtttgccagaaccaccctgcctctccctggctcccctgaggttcctataagaaacaagatccctgctccctttcaccccttgttttaaaatgtggccattactattgttcactgaaaagagtctgttactcccagatcccaagaggaagagacataccaggccacgggggccacacagggaggcaccaggggtggtcaggaggcagagggaattgggtaaacagcagcctgagtccatgttgtttctgcaggaaggaccgatggggacagggtgagctggcttaaggttggccagtttgaataattccagtgggctctggggagtggagcggtcctgagttagttttctgggtaatgagggcagggggatagtggctcagagtgtgaagtctgataaaggaggtggctggggacatgggcgctggattggttggtttgtatctgaaaaatgtgctcatggatgagttgtttcctgtctctaaagattggttaccacttagcggggcagtccctccagagtcagcaaggctcggatgtcaaagcatcagaaacacgtggttaacacgaccctcccttggacttctgcccccgtattaaatctgtggcctcctctcctctggcctcggctgctgtcccagctgggctctcttgcccgtcccacttcctcttgcagccaaacctgggacgtcctttcctggcggtgtgcatgggtgtgtagccgccagggacagtgacctgggatggcaacacgggatgctgtgcagacagaggaagagaggagccccacggtacggcccgtgtagactgcaaagtgcctgtaccagccgtgtgggaagcactttgtatggatgaatgcccttaatctacagggcagatggaggggtgcacactgtgactctgcccatttcacagataagaacaccgaggcttaatgtgacttagtgacatgcccaggtaagcagccagggccatccagcacccgaggagtcaggcttcttacccagacagcagaattcgagcctgtggtctggctgtgcatagaaaatcaaatcataataggatcaaatacatcagataattatataaaagttgaactctgttcaaagagaatctcagtctcaaaaaataaaatcaaactgcatacaacttataaggcacacgatgtaaaaatgatgacgaaggactccggtggcagaagggatcccaggaatactaagtagatttggggccacttccctacacccaccaagcacctcattccacagtgaccgaaggcacccacagggcggatgccagttgcaggccttcgtgtaccccaagagaacacaaaacatcccaaaacaaatccttggaacaaaggggaaattggcaaaaacctaactatgagagtctctaatacacttttaaaagcctttcacagattagatgctaataaggcatagaatttttgaatgacacaatgagtaaagctaaattagtagttatatcactgtttcccttgccctacagaaaaaaagaaagatgaaccttcttttcgaggaatcatagaacacttaaaaattacagaagtgttttgggtcataaagaaaatattgtgaattttatacagctaaaacgattttgtccatcttcgctgatgaaatgcctaaaagtaggggtgggggcagcagaatttataaacctaaaaaaatccaattcatttgaaaacattaaaaaaaaaaaaaacctactaggggccaggcatggtcgctcacacctgtaatcctagcactttgggaggccaaggtgggtagatcacttgaggtcaggagtttgagaccagcctagctaacgtggtgaaaccctgtctctaccaaaaaaatacaaaaattagccgggtgtggtggcatgtgcctgtagtcccaactatttgggaggctgaggtgggcgaattgcttgaacccgggaggcagaggttgcagtgagctgagatcacaccactgcgctccagcctgggtaacagagcaaggaaagagaatattaggactgcagtacagactatttggaacactaataaaaacaagagcactactgtcaaatcttttggaatgtggttaaagctgtattcagaggcaaattcacagatgttttccaaaagcttcttccttgggtgatatgttcgacacacattagccctgccttcaactcagtacatttgaatgaatttcaacagcaacaaaaccaaaaacttaaggaaagcaaaaataaggaaatagttcagaaaaagcagaaatcaataaattagaaaatggaagaaacacatagaatcaatgaagaagagagctttggaaaaagcaaccctctgacctatttaatctagaaaaaaagagagaaggcacaaactaaaagatcagaaagagtatatgtaatgtgactacaaaaagatacttctcctggcagaaaggaaagcatgcagggccatctgcccactaggaagctgttgggaggctctctgcagccggccacttcggaggtccagggatgatcagtggaggagggatgtgcagggcatcctctgccagtgaatgctggctaggagggcagagagaggctcgctgagccctctatcccaggtttgtggcagggggctttggaccacacagatgcagagcctgggggtgggccccagcccagcaatccggttccagctctccattcacaggcggggaggtgcgggggggatctttggactatcccatgtggctggctgcctgcctccagtggagttccctgttccggccttccccaagccgggtctttccagcctgtcccttcctggccaggatcctctggtgttttaggaattctcaagcctttggcatgagagatggacagagttatatcctcttttggaagtttccaaaaatgggaaactcctggtcctggggctagaaaggggagaaaagattatcccattgattggtctgggtgccaggtggcggcttgcattttcccccaggttgctcctacattgtttaaaaagaagaattttgtaattgactagggttaattgcttaccagtgctggcaaagctttggatcttatttggcctgaaaagtgtctgctctttcccagtcttgagtacttgatggaataaagcctcctttattaattactccttagcaggctctatgctaaattatcccgaccctaagccttttctttttctttttctttttttttccttaactgcctcaggtaggtagaaggagtatgtgatcacagtcagaacatttgcagaagagagtcaaaccctgaaggtgagaatttgaggatctctatgccagggacacggagatcctggggaaattgaggatttcctgggatgtgaatatttcaaagctgactccaaaaaatggagaatatgccataagtcccataaccatggagggaactcaagttcttcaccttttccaaagttttgccagtgcattcatactcatttgcaagcatttatcaggcaagactaatacaataccctgtaaactcatgtattctgaaatctacccaatgtgtctttcgtagtcaatgggacccttatacccaaagatgccaaaggtagcccgtcaggacaaagtacagacctgtctcacttctaaaaatagaagtaaaaatcccaaggcattaagagtttaattgaataatgtataaagagaaacttctaccgtgatcatctagggcttatcctaggaatgtggagattgtttaatatcaggaaatctattcatacagttcatcacatcagtttccaaatgacaaaactcatcctctaacaaatactgtttgaagggcttctgtgtgggaagtgctgtgctgggaatattcactggcatagtctctgtcctcaggggaccgcttccagaaggcagatctagacaaggaaacaattgtaccagggctcagggctggatggaggagacgcgggtcaggcagtctttccttacaaggtcaggaaaagcaacgggaggaagtgaccgttccacccacacctgaagatggtccagtgaagtcaccagcatagagatgctctgagttcataggctgggaggggagggagggcagctgaacccagagggacgagcacagggacaggaacagcagacccaatgccaaagacgtcggaaggagccgatcgcaaggagcagagcagacctgcgtctcccgccaaggggtttggcttgcccatgagggcagctttaagcagtgacacgatcccatgtgcatttctaagaagatcactggctcctgtgtgcagaaggggcaggtgggagcagtggcttaggagacagtcactgccatcaaatgggggatgctggcagctggactgggaccaggcctgggtccagggatacagacaggaggacagaggaggccacttcgagaggatgtggcactaggtgggtgaaggcggagagactctcagctgggtagatgatggtatcaacccctgagattggggagcacaggagggaagctgaagaggtcagctgagatgtgcagttagaggtacctggtgccatcccagcggaggaggccaagaagatgtggatgtgggtctggagccctgcggggtctggagctgggggtagcagaagcaactgcaggcatgaggagcttgctgcctagggggagcctgggagagaggcctcagggctccagtgttgaagcctctggcagggcaagggcgtgacggccccgtagcccctcacagggcactcctccttttccagatccccagaaaactagtaacagagggcaacaggacaaccaagattgtatttaaaggcggaaaaagaagcacatttccctaaaagtgttctgcacagcgaattcttaggatatgagtagatgttacagaggactatagaggggtcccaaggtcaaagaagtctggaaaatgctggtcaaacaaaggaaaatgggcattcctgggggtgaaatttcccggagactttcctgtggagctgtgcatggtgtacctccgagagtccgagcagtacaggtggtctctgaaaactttctccacggaagcttcttgctcagcagatccgcagcctgctgaacctgctctggggagcactgccctggagatagtcttggaaacaaacaaacaaaaaagacccataaactagttactgtggttctgaaaatcctagatacttgtatgtgacatgaaactagtattggaaaagagcagagacaaattctcattgtttgctgttaatcatgtgtcgggaaaacctaaaagaatccacggtacaacttgtagagttaggagaggagtctggtgatgtggccaaatatcagaccattgtttaaaaaatcagtagcttctgtgtgaaccaaaaacaacagccttggtagtggggaaaacagggagagaaaatttccattatggtagtaaccaaaaatgtagaatacctggaatagtcctgacaagacaatggacccattggaaggaaattgtacctgattaatgataggaagaaagtgatcacaaatgaagacacaaatgctgtcctcatgggaagctgggtataatcgagaggttggcctttcccagattcatagttggaaatgttatgaagtgattctaagcaccatctaggaacacgaacggtcaagaatggctgagacagctgcggaacccaagcaaggaagagacatcctccaaaggaacatgaacggtcaagcatggctgagacagctgcggaacccaagcaaggaagagacttcctccaaagcaacatggacggtcaagaatggctgagacagctgcggaacccaagcaaggaagagacttcctccaaaggaacatgaacagtcaagaatggctgagacagctgcggaacccaagcaaggaagagacttcctccaaaggaacatgaacggtcaagaatggctgagacagctgcggaacccaagcaaggaagagacttcctccaaaggaacatgaacggtcaagaatggctgagacagctgcggagcccaagcaaggaagagacttcctccaaaggaacatgaatggtcaagaatggctgagacagctgcggaacccaagcaaggaagagacttcctccaaaggaacatgaatggtcaagaatggctgagacagctgcggaacccaagcaaggaagagacttcctccaaaggaacatgaacggtcaagaatggccgagacagctgtgggacccaagcaagtaagagacttcctccaaacatcttgtaaagtgaagataattaaaatagtgccatatgtgcataaactttcatagacagttcagttgaataaaatagttgaaaatacccctcttacaaataacctaccgtgataaacacagaatgcttattgtgttataaataaatatataacataaatttaataaataggaaattaaattatcatgtgacaaatataagccaatacaacattcaactatttaaatcacacaaatcaagaagaaaatattggttgtcaagagctttctaagcataaatccaattgaaggaattgtaaaggggaatatggatatatttggataagtataataccaaacttctgtcaaaaaacacaatgaaaaggcaaatgacaagcaggaaaaacatttgcaatgtgataaatatatcttaatatataaaacctcctctaaatcataaggaaacaaaattgtcaatggaaggaaacaaagaaaaaaatccaagtggctaagagaaagcccatatggaaaaatatctaactctactgttaaagaaataaataatacaccatttataaagcatcaaccctgttaagatgaagagggatttatggctgggtgaatgaagcaggcacactttgagtatgagtacagatattctaaggaaatgtagcaatatttatcactgcccttaaaaatgttctttttttctttctttttttttttttttttgagatggagtcttgctctgttgcccaggctggagtgcagtggcgcgacctcagctcactgcaacctctgccacctgggttcaagtgattctcctgcctcagcctcccaagtagctgggattacaggcacctgccaccacacccagctaattttttgtatttttagtagagatggggtttcaccaggttggccaggctggtcttgaactcctgacctcaggtgatccgcctcggcctcccaaagtgctggggttatggggcgcgagccaccgcatttggcctttaaaatgttcttgatgtttgcccccagacattcatttctgtgaccccagacattcatttctacaactctgttccaaagcagtgatcccagctgtgggccaagttttaggaacaagacaagggtcatggcattatctctcatgtgaacaacagcaaacaacctatattgtccaataatagtggtctagttaagtaatgataaacctatgtggtagagtattaggctgccacaaaattgcattttcgaaacatgtttaatggcattgggaaatggttacagtctaaagctgtttgttgtttgaaaagcaggatctcagttttccgtatgatctcaatttggtgtacaaatatatttaccaaaaagactggaaggaacacatcaaatgtgaacaggatttctctgtgggcagtaggctaattaattttcattttcttctttgtactttactgaattttttaaattcaatatgatgagcatggtttttattattattattattattattattattattattaagagatggggtctagctctgttgcccagactagagtggagtggtgtgatcataactcactgcagcctccatctcttgggctcaagggatcctctcatctcggcctcccaagtagcttggactacaggcacgcaccaccacactcgactaatttttttttctttttttttttgtagagacagggtctcactctgttgcccaggctggtcttgaactcccaggctcaaatgattctcctgcctctgcctcccatagcactgggattacaggtgtgagcagctgagcctggaccagcatgtttcttttataaacaaaacactgcattttaaatttgtgaaatttaaattttttaaatgattttttaaaaaatcatttaaaaatggtaggatccaaatgatgccgtttgactgaattcagcactctggagaaaggtctccggtggcatgccacagggctctgtcacgctcagtcctttatttctgatttcaatgaagacatcaaagagaattcatgctttcccttggcacgtcatctctgcagtgggctggggaggagtaatgaggtttctgtgttccaccctatgggcgctagctcacgcttcctgtggctggggcagggggtccacctgcagcgggtccacctgaaggaaatgggaaatcttggagtgaggacgcaggctgccataggtacgtggtctcccctgcatgagaagcccacgcccctgggttagcaggcaccaccctcctggccagggcctccttggcccctgcccctcatgcgccttgcctgcagaagttctgctttgctgggacccccacccctcatgcacctgcagaagctctgcttcactggggccatgctggggccccacttccacttttggcagagttgggaatggggcagtgggcaggggaccggttgtcaggtgcagcctgctcttcccagggacaacatggggacatgtgcaggccctgggggtgctgagatccatagccagcaaaccagggcagctcatgcctgtggtgggcaccgggcaacttctgcgacccaggtacaaagagaacagagaggacataggtgaactgaggctggccttgcttccgcctcctgctgggaaggggcttgagaactgatggtggtgagggattggaagacagaaccggaagctggacgcacgcttccagagctaactccagatggaaccagcttacccccggccccgagggctcagtggacccgcagctgaggaggcaggggagaggcagtgctgggttgtgaggggtgtgggacccaggacaccccagtgcctgttcccaggcccctcagcctagcttggaggacaacacacagccggtccctctgtcagaccccgggaattcagggatgattggcctcctggaatgttctggaacattccagcattctgggcctttttttctgctcctaactcatgcctgcccagagtggggctcagcaaagctcaccccatactctgcccacctttttctgcctggccctaccccgccttcctcctagaagcctcccagatcaagcacaggaggcagtgatgggggtaggggacgccagtgcccatggggtccgctccatcccggggatctcctgagttgatcagctgagtgtagactgccagaagagccgggcctgcccgctgctgtgcccttctctggggggttctgggctgtgagaggggaagtgagccgaggctatgagtcctcgttgctttaggttggacctactgcaaaagtgcaggaaatagtagagcagaggaggtggcactgctaggggctgggctgaaggcttggggtagagggcacagcggctaggaaaatgggttctggtcatgggccctggctgacttagcgaatgtgctgtgggccacagggcttgggagcagcgtctgtgggaccggaggagccatctgccatccccaggtggccaggggagaggccatcctgggagcagcagtacacagtgcacctcaatgccaaagacctggctgttttctttttcctatttcaaacccatcacagaccaatacttccgtaccatacgttataaatgaattactgggaaaagcaaatgtgacaaaaaccgaggtatccaaaaactctaggtctggatttttattattaaattctgtggacataaactcaacccgtccaattgctataaaagtttctagtttctgtacttatctcactgtggactggaacagtttgtgtccaccaggcacagacttcactttgcatagcactgggggaggccctgttttcaggtctctgaggtgtctgatgaacgtgggaggagatgtatccttgtgcccccaaagcatccggccagcccagagcctctggcttcccgagcagctgctgtttaatcccagggaggtgcatgaacgaggaggggagaggagccctgtgtccaggcagtagcagcagacaagacagcgacagagtggtgagcaccggcaaggaatacagcagggtggcaggcaataggggaccatggatggagcagccaggatggggacttcccagccaagatctgggggcaaaaggcctagctcctgtgtccaagggaacagaccccttttgctcacagagaagcacagccagggattctcgatggggctctggggacaaagtttggcacatggtggggatgaattctgatgagctgctcttcaaggaaccacaggcttcccgtcaaggaatgaggcccccgtctctagaagaattttagcatggcaaaaccaaggcgatggcagtcaggagggggctgagctgtcccccccacggtggggacagactctgggggatgtgagaccatgacccagacttgggcagaaagtggcccagatactcggttcctgttattcatcccaaattgtgacagaaatagaccagctccccacctgccgctcccccattgcctgtcccccaggcctcaccaggctccagtggggataaaattggtagcacttgtttgagtgacatgtttgtcttctagcttatgagaagcctctgagttatctcaagtttttcctaaaacaacatttttctccatttcttaaaaaaaagcagaagaaaagagatgatcttattttatacaatataccaccagccagggagcagagcatcggcaacacttgaggttgcatagcaactggcttttcaattgattttttgagaaggtaccaaagctactcaactgttctcattttaaatatttcctaggatgatgaaaatcaaagcaaatggaaatcagagacttggggagcatcagagaaggacataaagtgtcttgttataaaaaaccaggtcaagacaaagtgtggaatgcttgctggaatttttcagcattggaggtgaaaggtctgagaaattctgcatgtgagtctcttagtggaaagcacgagaagagaggtgctgggggtgggggcttggtgtgcccacccacccacctatagggtagaggatttagagtggcccagccatggtgcaggaaggccaggaagtgaaggtctggggaggatatatcaagggccctggggatctgggacaggggatgaggtgggaaacacaccccatgcctcaccccagggacagccccctgtcctcctgagcatctgggtcccaacccccaacctgataggggtgcaaggcatgatggcccacccacatcatcctccatccacctcctcacccagacctacctgggtccagagaactaggaggcactaaggctggacactgcccttgggaggtgccttagtctgtttgggctgcaataacagaaataccttagactgagtaatttataaccaatggaattgtgttactcactgttctgggggctgggaagtccaagagcaggacgccagcagaactgatgtgtcgtaaggacccattcctcctagagggcaccttctagctgtgccctcgcatgatggaagggtgaacaggctccctcaggcttcttttgtaagggtgctaatctcatttatggagactccaccctcatgacctaatgacctctcaaagaccacacttcctaataccataacattggttctcagctttcaacctttcaaatgtgggggacacaacattcagattctagcaggaggcccctcttctgcctccccacaggcctgcactggctcatgcctgggaaggctcaagttgagaatcctgttctggcagcttggctctctctgggaatagcttcccaggctttggggaagatggctggaaacaaaatgctggaacgatatgggagttctggcagagaaatgaggtgcacgcctcctgccccagctctcgtggttctctgtcgtgatgagatttgatctgtaagccctgcctggaacaagagacctccagccttgggggagcccactttgcactcagctggggggcacggtagaacatgtgctcacagagcagggatggtgggaccttgtccctgccattcattctggctttgtccatactcgtgggacctttggtgagcaatttaacatcatggggccttagtttcccccataagaggaggtctgtgaaaccccagcacacaacaggaatgacgacaatcataaaggcgttcgtgcaagtgactgtttgtagagcttcttctgggacaggcaccgtctgaagccctttatgtgactttatgccctcacccccacagcaaccctgtggagtaggcgctgtgatcatccccatttgacagtgaggaccctggctccagggggcgagcggcctgcccggggccacacgctggtggagccactctgctctgggaggaggggctggactctgtgatcccggctggtcaggagcaccagcttcaggctccttgtcctggtcccctgagggtcagttgctcccaaccaagagtgactttgccacccctccccccacccgggggacatttggcagtgtctggagagacttttggttgtcacgactagggggagggttccactgggttctggcaaggagtgcccaggggtgtgctcaacatcctgccatgaacagggtgcccgcctcacccaacaggaattatctggccccaaatatctggagtgctgaggttgagaaatgtggtctgctcaccagaacccaacctccctgctgtcctatcctgcacctgtttaggaggctggtctgaggcaggagggcccctctgggatggggacggttgagaagctttgctgaagccgcatccccttgggggcatgagccagccccagcgggtaggccagtccccagggactggtgttatactccatcagtatcaacagcacggcagagacaaggacaagggacatttgtgggcgctgactgcaccctgcctgaactgtcatgggcggaagccccccagctccaagctcggagctgcagttgtgcccattttgcaggtggggacaagtaaggtaacttgcccaagaacagagcagatgagatatttcggccgggcctagagctgcccaggtgacctcacctgccacctgcagtggacttggtgagcctcggtcgcgtggcggcctgcggggctggctgagtgcgccttgcccagcaggcagagcctcctggcggggcgggcgcggttccagcggaggcggcctccaggctgctgatccccatcccggtttcctcccacgtctccttgactgaaggagggaagagcatagataattcagctccttccagagcaaacaatggaaatgtcggagagcaacgattggaacagaactttttgctcaggtcataattgatgtatttagggtgaggcccagaggctgtcttggggccgctggggccccgggagcccgggtgcggccgcggagtctgggcgccgggtgcgtccccggcccgggccgctgttctcgcggcagcagcgccacctggtggccgctcgggcccggcccttcctctgcccgccccgcgcggggggcagcaccccgacctctttccggctgtgggactcaggcgagtcctttcagttgtctgagacgcagttcgtcatccggaaggtaggaaaatgaagtggaagcgaggtgtcgtgtgccaagcctgagcctagcggggcgctccttgcggacggtgacttcctgctggggtcagcatctgccggggcggccctttgggctcacttccccaggcctcccgagaacgtccccgcagccggcgcctccctccctgcccagcctggctcctgagggtgctcgtgttcattccttcatcactgagcgcccagcagccggggtcctctggccgcgttcgctgcctcatcctggcatggagagcagaagccgggattgctccgtgaagggaggagtggggctactgagggcaggcgtgggccagggctggggcacagactcgggcccagcaaccacccggccctcaaggagcttaggctttagtgactcagaggccagcgacagcaacaggcacatccccagtaggtgccccatctggcaggtgaccgatcgcacgcaggaggagggacccggcgggcagctcagagccagggtcccgcggccaggatggggctgggacttggagctggacgcagcctactcgtccacccaaggcccacgggccccctaagctcctggctgttccctgaggcccgtggggttacccagacccctgcaggctgggcctgaggttcaggggcccgcagtgtttcctcacccttgccctggccaagcctcctgacagccctggggagcattcagcaaagtgaccttctgacccaaggtgagggccatcaagctcttgcctccctaaggccctcagatctgccctctccacctcatggtgggatccctgggtctttcaggcatgtcctcagaccctttccagcccgggccaggggagccaaacaggctgaacccggaggaaacaccatccttcttgggaccaggctcccggtgctgctgtgggagggccccaggggcctggacgagtgtctgcctcctgcatctgggcagctctgtgaaccagcatagcaaggagggtctccatgtggacataggtgggcactcatgatggccaaggaggaccctgcactctggaagagccagcctggtccagggccccagagcactcgggcagtggagcccagttgggagcccatgtctgcagtggtcgatgtcacctccaaacaggggtggcagagccctccatgaggggtgacgactgtcctggggcccctgtagaggatccgatcagcctcttggaagctcatctgttcccgtgctctgagctagggtcagcccactcaggactcctcctgcatcctgggctggatgggcccctggacttcatccacagccctactgcaggcttctcccgcctggctcttctggggccctaggctggacctgggagttctgggagctgctgccgctgtgaagagtctgccctcagaggccctgcctcactcaggaggtggaccctgcagctaccatgcagccccagggcctcgaaatgtccatccccggtcatacagcaccatctaccgccccctgctctggaggctgggtgcccgcggctgcccctgggagggactggctgccctgtaaagtccctggctggtcctgcagccaccccctttgcagagcccagggtgctacggctcactcctggtccccccctcagcacagctaggaacaggtggagtcacacagacagactttcctagaggagccgtgcagagccgagcaggcagctggaagtcaggtgcattcaggactgggagggacgtagatgaccagggcgagctggtgaaagactcctcagtggaaacaagcagtgcagcctccctcacttctggaggagatccatatatgagaaatgtgtcttcttctcgctcaggggaagcacagttcccaggcttgatacatagcaagggcacaggatggtgggggctggggtgccccaggcagcagggacccatctggcctcctgcatgcaggccaggtggcagaggagcaaaggaggtcgcatcccagcaggtggtcccgctggagcccaagtgacccacaggggagttcactgcatgtcaggacagtatccttggctggaggtctcagcggagagacctgagcttggctcttcccttgggttccgactgcctccagtagcgagggccttgccctgtccacggccagcccagacttccctcctgggccgcagacctgtccagctgccccgatgtctctgcctggacatcagtttctttctgtgaggagtccttagaggcatgcagaacccaaggctgcctgtagctctcatggagtgggaggagtgggtggaggaaagggggctctggggtgcatgagcctgagtttgcggatggttgttttgggtgctgccaccaggcaaacccacttcagccagttttcagtcctttcgaacctgtgctccatgggcctaacatgggtcccagctacggcttgggactgatcacccacaagggctgcacccccagaagtgggagagctcccaaagcaaaacagcccagctcttcccaacgagcaagctggccaggaaagacattgccgtgaccatgtttcctgcactgcggaccccacgctcttcctctggcacttgccgtccccttcccgcgccgcctcttctgccttgctaccaatccccaaagccagacactggtgccgtctctgcctcattgctcccgccctgcagccctgatgcctctcagctcctgccaccaggtcctgaccctcctgacgtggcaccagccacacctgcatgcatctcagtgccacactgtccccttctatccccactccttcctcactgacccaaagggctgttttaagaatgcacacagaccttgccctggcctctgggcacaaggtcaatgtctgggcctcatgggtaccccatagcccttgaatgctccagacccagcaaggacaagatctctgcccctgggctcctctgtgcccgtcagagataggctgggaccttggagatgttgggacgttggcagagagagagaggaagcacaagcagctctgtggcttgtcagttaagctcccagtggcaggttgagtcctggggtgcccggacactgaggtaaccctctcctctacttcttggggtaccccctgctgggacccaggctcccagggtctagcacactctcatgtctcctgaagtcctgcctcccagggctcccctggccccagtgcagcttcccctccctgtgcccatgcaccccagccctcccctctgccccctcctcagggagtctcctcagaaccccaaagccagaagggggtcatagacccctttagctctggaccctgcagcacaacctccttggggttggagaacgaaagtggcaggctgccttcttggactgggccgagaacaaagcgaggcaagaacaaaaacacaaatcaatatttcaataaattgtcttgccgcagcagcaagatcactttggctgctaagacgggctgggaacccaggctgaaccacagaagccagcatctgggaggagagaggtgatcggccagagtggatccagtctgcaggacgtggagaaggggctgcccactgcagggctcttattccagggttctggaataaagtggtgacggggaggatgcgttgttttgtctgcataactgatttcaatttgagccagtgtttactattaggtaggtgtctgtagaatccagatttcacgattgacctgagaaatctgatccagcagctctgggcctctgttcctgccagcactgggcggatgttgctcccttcagctgtgcctgggcacctgggtttgccacagtcctcgccactccttatcaccgacccccactctattctaatagggaaatattcctctgtaccctttctccttcaaaactgggaaaacacaagatggacttacttttcgtgcaaccagcctgcctcattgacttgtcacctgccttgctcctgtaggcgcttgggtttctagcatcctcccggtactccccacaagcccacacactaggatagcggacctccctgcacacccccagcctgcctcagcctggctcctcccgcagctctgtcctacacactagcctcattcctgcctctggtcctgatattggggcatgtctttctggctggactcttgactcctcctcaaagacttggccagggcccttctcccactgagaagcatataaactgcccccagaacatatcagctgcccccagatcagacgccatctttcatgggccagcgagtgtcctgactggggtccctgtggtcccccaaaggaggaagcacgtggctcagattctcttcgctgcaagtgacaagagcacaactcagaattggctttcacaaggagaggaacttcttcaggcataaatgacacccgtcagtggcaggcagccttcgtgatggccgccagtgacccagtctcttaatgtccatgccctgcggtaggcgggactgagattctatcaaaagcagactgtggcttctgtaggggaggtgccttctcttgttgtctcttgggtccctcgagcaggggcgaccgtgtggggtaaagctgacatgggtgacggccccaggaggggcccatacggtatggtgtgcaacagctcagctggggcccgccgtgaccacctgaatgagcctgggagctgacccgcctccggtacagccttcagatgagactgcagccccagtcttagctcgacagtggtctcatcctcctttaatccttggtggggggtctcctgtagtgcaggggggctccagccgctgcaggccccccacctcacaccttgcctactccttggcccgctttggttgtatgttcaccctgatccttcatggtggccaggaaggcgtggtgctgggattggccaggcctgcctgcccctgaagcctggggtctgactcagattaaaggaggggaagtttcacgaaagggaaacaagggcaggcagaagtcaccgcaacccaccagggcatcggaagggaccgtcccactacatggggcttaggaccctgagggcaggtgagttcatcttggacaggactcccttgacactgatgctgggagacgtgccctggaggaagcaaggcccctttccctggagcccagcaaggctaccgagctgtgctgggtgtcctggatggagacactcacactgcagcaggggccctgccaccaccctagcaaaagcgcttattagtgacctttgtgctgaccctctgatttggatttggactggcaatttttaaaaaatgtatgttaaaaagtcattcttgtttggtttttgattttgctcttactgttatttttaattggcatgtaataattgtacatatttctggggtagggtgtgatatttagacacgtgtatgcaatgtgtaatgattacatcagggtaattagcatatctgtcacctcaaacattatcatttctttgtgttgggaacattcaaagtccactcttctagctatttgaaaatgcacaatacattcttacggattccaggcgctttccggcactatagggcactaacgcttattcccccatcttgccgcacttttggatatgttaaccagccttggcaatccccagcccgctgccccccactctccaggaactactctctatttctgtgacatcaactgttttagcttccacgtatgagtgagagcgtgcagtatttgtctttctgagcctggcttatttcatttagcataaggtcccccaggctcatccatatctgggctgccaatcttaagttcagcgagtacaaccaaccacaaggcccacgctctagcaccgaatcacatccaccccgagtttcccttccttcttgtgccatcccaagctcaccccctagctggagacagtgagaagggacattctttcgcccgattcctccttcagaactgtgacctctcaaggctacccagaggcggatactacctggcagggactcgagatgagctgcaggggtcaggcttggatgtgatgcagatacccactcccttcctcctgtatcaattatagtaggtgaggttatgctacagaaacaaacacactttgcatcccagtggcttaaaacgaccaagatttcctgctcacgctgtatgttcaatgtgggttggcggaggattcgggtctcatcgtcactcaggtcctaggtgacagagcagccactgtctttatgttgccagatctcgtgccagaaaggagagctctctgaagggtctcaatgggaaattagatgctccaaccgaaaagagacatgccccacttttgctcacagctcattggccagagctagtcacatgctcttcctggtcatgatgggaacaggaagtgcacctccccttgccctcctccagcttcctctggtctgtccacttctatgccaatgtcccacaagtcttagtcacaggacatcacactctgatttatgacttatttcatcgggactcatggaaaccttgttagaatgagttatcttatctcccaggagcaggaaataaagtctttacaattaactctgtgcttgggacttgggaattggtctgccatcttgtcagtcattgactgggacccctgggaacgacttgtcttacctagccttgaattgtgctcccttcttctggaactaactggcttgctaacaataccctttgttgtttgttttgttttgttttgagacggagtctcactctgtcgcctaggctggagtgcagtggcgtgatctcagctcactgcaacctccacctcccgggttcaagcgattctccttcctcagcctcccaggttgctgggattacgccaccaagccagactaagttttgcatttttagtagagacagggtttcaccatgttggccaggctggtctcaaactcctgacctcaggtgatccacctgcctcagcctcccaaagtgctgggattacaggtgtgagccaccgcgcacggccaactttttgttatttatagacacaaagagaaatacgtggctctactttgtggatacatttatgcaagagaaaaaacacctgcatacgtagcttccaaggaatgcacatctctattttatggccagataaatccttaaaggggaaaagaacatgcccaggactcagaggggctctcggttctcttggagggaactacttcggtgtttggagtctatggtgagaacagaaaccaaaatgcctgctgtgaggattgtggaggaaaaaaggaagggtgccgctcacagaagccttgcttttgaaatgatattgtgtatgtcttatttaaggaggaagtttagggcagtgagttgaatctagattttggtttcagccttcttgggatccgatctcaattctcctacttcctagtttcatgacctgggcaagcttcttaacttctctgagtctcagtttcctgtccaagacaggcttcttagtcctgaagtctaaatgggagtgcctgctgatgtcatggtgcagagagagtgtgcaagacgagcggtcccgaggccaccctagctgtcaggtgtgcgtcatgatacaaaatggaatgggatggttcccgggggcttcccatgcatagttcctgtgggaatcatctgtgtatgcccttgttcttgatatggctgtttttctattaggttgatgccaaagtctttgccattacttttcatggcaatactgcgattacttttgcacccaccaaatatgtcagttgctgtttcttttcctccattgtgttggtttctgcaagtaccttcacacggggggaacgtataaggtgatctgcttcctctggccttgcacaccacactggaatttccgcctcccctgccacggaccctcccaaaactgtgagctctttggggtgaggtccacatgacatttgccttctgtggaggccttgcacggaacaggtgcctcatagaacaaacacagggacttctggaaatggggtagacggtgggactatgcgaggccttagatgacgtagagcttggcttctgcatctcacctgaaaactgcggtgactttgtgtggaaactcacgcaggtgagtgtgactggggaaacttttcttccctgtcaaagactggagcccagtgggagcaggtcctgagagtgaccgggcagggcctttgtaccacctggaacagattcccagtggatggggtctgtcaacactacagcctgctcggccccccactgggccaccaggcgccaacctctctcttccatttctctccatccccctgcagtccatgagcctcatcgagatcgggaacccctctcagagcctggagaatgtctgccgctgggcctacctccagcagaagccagacacgggccacgatgaataccacgatcacgccatcttcctcacacggcaggactttgggccttccggcatgcaaggtgagcctcacccatgcagggccacagaggcgtgaagctggaaatgagcccctggccatgcaaggggccccgggagccttggcccagcccagggaagagtgtcagggcagggaaggccgtggccaccttagctgggtgagggtgtggggcagtgcactgatggacaaatacatcattagaagagaatccagtgtcctgaattggacctatgtgtatagggacgctaatgtgtcacaaaagtgacatttcagagaagaggaggaaaacagcctaacaaatggtgtggggccaatttggaaagaaaggaggcctgtcacctccactcactctatagacagagagcatctcacatggattttaggtctaaataagaaacgcaaaataatgaaagaagataacgtaggtggatggctccatgttcttggagtaagagatgttttctttaaaaagagacaaaaggccgggcgcggtggttcacacctgtaatcccagcactttgggagtcggaggcaggtagatcacgaggtcaggagatcgagaccatcttggctaacatggtgaaaccccgtctctaataaaaatacaaaaaaattagcagggcatggtggcgggcgcctgtagtcccagctacccgggaggctgaggcaggagaatggtgtgaacccgggaggcggagtttgcaatgagtcgagatcgcaccactttgctccagcctgggagacagtgcgagactctgtctcaaaaaaaaaagagacaaaaaaaaccaaacaaaccatgaactcaatggaaaaaactgataaatagtagcacatttcaaaagtttgtgcattaaaggcacgctaatccactgggggaaatatttataaaaaaggatttatatctgaagtatgtgaagaacgcctacaaatcataataaggataataaagacaatccagtcagataatgggcaggagactcttatcaggctcttgacaaaatatgaatgagcaataaacatatgaaaaggcactcaacctcactagacattggaaaaatgcaattaaaacaatgaggctgggcatggtggtggatgcctgtagtcccagccactcgggaacctgaggtgggaggattgtttgagcccaggaagtgagctatgatcacaccactgcactccagcctgggtgacagagcgaggccttgtcttacaagaaaaaaaaaaaaggaaaatttaaaaacacaatgaaatatcaagacgcacctaatagcatagctaggttaaaaagactgaaactaccatgtctgggtgaggagtggatagctcccctcaaacacagcgcagccaggtgttgccctgaccatgtgatgagagtgctgttggctgttttgtcttggggagggcactaatggggagcagagctatcccctaggaggggaaaccgacacagcttttatattaagtgacctgatccctcatttaaaaatgtgaaattggctgggtgtggtggctcactcctgtaatcccagcactttgggaggccaaggcgggcggatcacttgaggtcaggagttcgtgaccagcctggccaacatctctactaaaaacacaaaaattagccagtgtagtggcaggtgcctgtaatcccagctactcaggaggctgaggcaggaaaatcactagaaccccggaggcagaggttgcagtgagccgagattgtgccactgcactccagcctgggcaacagagcaagactctgtctcaaaaaaaaaaaaaaaaaaaagaaaaaatgaaaggacagccaagggttaccagatattttaaaaaaaccaaaacacaagaaatccttacagcatgaaaaagatggaccaagatgtaaaacaaaacaaaaagtttgaaaactggctctaagagaaaatagagataatttagagacaagaaaagcatgtttttaaaagtagtattcccagaatgtttgagaaaatacatccataaaccctaagagttttctatgaaaaattagagaacaacaaaccatttgtataaaattatggataggatgggggaagtaaaaaattcgaaaggtagacggggcgcggtggctcacgcctgtaatcccagcactgtgggaggccgaggcgggcaggtcacgaggtcaggagatggagaccatcctggctaacatggtgaaatcccgtctctagtaaaaatacaaaaattagctgagcatggtggcgggtgcctgtagtcccagctactcaggaggctgaggcagtagaatggactgaacccaggaggcggaggttgcagtgagccgagatcacaccactgcactccagcctggacggcagagtgagactccatctcaaaaaaaaaaaaaaaaaatcgaaagctgaaataaaaagtcaaggccatctcccaatgggagcaaaagacaaaaagattaacatgagagaaaagttaggagacagaccctccatcgaggaggcacactctatctaataagattccggagagagaaaacagccacaaagtaaaataagagggaagaaaacaaagaaaaacataaagatgcgctttcagatctcgcaggctcctgtaatgctgagtaggatgaatggaaagcctcccacggaggcagatgcatctgcaagcctggcatacaaagggcaaagaggagatggcaacgttccactcaggcacacagactccacgctcgtctcaaaatctgcagagcaaaaaatgcagattttcctgtttattacaacgggaaaagacaagggttagatcacgatgcttctatttttaggcgcgtacaccgccagctcacccggggtcccagtggccctccttcccttctctgtggaacgcgtggcctcagggtctctcagtggggcatggcaggagtgagggcaggttggggttctgaaagtcagggctccatgcttggcaggcctctaggaagactcccaggggtacaagcagagacctcgtgtggcacccatagccctgtaggcacttccctatctttccaagccgcctccctctgctgagacaggagctggggaagtgaataggtctcattatccatcttcctcagtttgacgtggggtctctgcgtcatgaacttctgccaccctccccctggccctgggctgtcgtaggccactggcctcatcttctacggcggctctgacctcccagtccgcaccagccagccccctgctgggatattctgcagggtagtgtggcccatcggctgaacagctttgcagccttctgcggcattatggaaacaggtctagctagggtctcaaggaccccagagaaacacggggagacccaagaaacgccccccagaggaggtgggcttggagggtgtgataccaggcagacgaggggcaggatgcctctagcagagagaggtgtggaagcaggtgctgctcaggggccactcagtgaggcaggcagggggcagaggcaggtggcgtgaaagagaacggcaggcaggaaagtcaggtgtcagacaagccatagcaggtgacatctgactaagcagagggccccagctgcagtgtggctgttacaggcagaacggccacggggcttgtgtggtgacgggctgggggcctgctgtcagccagatgtcacaggctatgagctgtctgctgtggtgtcttctgagctgtgccagccgggggcagttgcctgtggtagagagggcattggggccttgaggagaagcagcgcctgggagttaggccaggcctcaccttcccggccaggctatggcagcatctggagccgcctcttgtctcctcccaggctatgctcctgtcaccggcatgtgccatccggtccgcagctgcaccctgaaccatgaggacggcttctcctcagcgtttgtggtggcccatgagactggccacgtgtaagtggcctggggaagggtggggcacagaggggccaccctaggatccccagccctggctgcccacttctcctctgtgccttaagagggacacgccctgtgtcaaagccacttggggtgtggtctcctgtcttcccagcgctgggcagtgctggcccgaggcccacttttgctgaaggaaccaattgaaggaggaagggcttgcctgcagactgagcaggcgctctgggccagctagagctggggaccttgccccattatcacatccaagcccccaggcagggtgggctctaccccatgttatagaggaggctcggaggtttggagggtggctcgccctgggttagaaacctggaggcagggaagccacggtcccccccaggtgtgcatgcccctcctggggacaggatacctgggggactgcccgctggacactgtctccccagagtgcctcggctttcaaattgcagcaggtagatggtcggtgccacccggctcagagtgggccaaggtcaggaggcccgttggggaaagatggggcaccctcctatcatcggggtggggtgggactggcagacccgtgtgccagtgggattcagccagctgcctcggccctcgcaggctgggcatggagcacgacgggcagggcaaccgctgtggcgacgaggtgcggctgggcagcatcatggcgcccctggtgcaggccgccttccaccgcttccactggtcccgctgcagccagcaggagctgagccgctacctgcagtgagtactgcccatgtgccccgtgggcgacccctcagtccctggggtcagctctgggagggtgcaagtccccatgcaccagagccagagccctccgacctcaggtcctctaagcttgtgtgcgggggaggagagagggcacacctgtgagagaagcctggtgtctggaggagaacccattgtcaggggtctgtccttgaatggcaagtgggcacggcggctaccctggggtccgctcaagccaggtcctggtgtcttacaccaaggacaagagatgcagcagggaaactgaggcagcacagccaggggccgggatgtgcaggtagggctgccatggcagctccagcaggggcctcagctgcctccagggctgtggatggtcagccgcgctgaaggctgctcgcggcaccgtgtgtcccccacagctcctatgactgcctgctggatgaccccttcgcccacgactggccggcgctgccccagctcccgggactgcactactccatgaacgagcaatgccgctttgacttcggcctgggctacatgatgtgcacggcggtgagtgtgcagccctgcagccgggaccctcccaggtctggggggaggcgtgctggtgtaggggcagctcccgggacagtgtgaggaccggcccagtgtggggagggcagagcggccctccagagtggcagcctgtccctctgcacccaccactccccaccccctaggcaccctgagcccacctggcaggcccagacgtggtcctaggcaggaagcacacgggggacaggactgtgaccagggtgtcagccaggggcagtgagagcctgcagaggtcaggagggctcccaaggaagaagggaggcctgcaggctaagcggaaggagagggcattcaggaagggagggccacggacgcagaggccacggacgcagaggcctggaggagagcgcggcaggcacaggagcactcgctgctctccagggccaagtgccagggctgagccgtcagaggaaccggccatcggcatggaggccacactgtgggagcttcagtgtctatgagcgtcttaatgctcgcctctgctgcatgaaggaaagaagcaaagtagtcccattttacagatgaggaaacagagacccggagaggctaggtaacctgcctgagcccacaaagcgagcaagtggtagagtcgagtaccaacgcaggagggccacctccttccaagactccctaaggagcacagtggactcgattctcatggcgatgggggctctggaaaggcttgagtaggggaggctcagggccacgtctgagtttcagctgatccctcagggacgtcctgcaggaagtgctatcaggacaggaagcagaaaggccagggaacaggactgtgaagtccaggggaggccgaggctgcagagagggcaggcctgtgggggtgggggtagggcttcgccagggtttaggagggaaatccacggcaaagggtcagcaggtgcccacctagcctcaggctggcacttagggcccagctgcccgccaggctccctgaggtgtgcagcctccaaagactggaggcagagaggcccagccgcgtccagggatgctgcagcctccacaccgtatgggcaaggtcttcaccaccccagaatcacaacacccaccagcctcacgggcccatcatgggccagtcccactggggcatctcaggttccagaacccgggggtgggtggcatccctgggaggtccctgaggtgggagggacctggcaagctatggtgctgtcttccagttccggacctttgacccctgcaagcagctgtggtgcagccatcctgacaacccctacttttgcaagaccaagaaggggccccccttggacgggactatgtgtgcacctggcaaggtgaggcagcatcaagggctcttggagggcagcagggcagaggacaggaatcttaggtgcccgggtcaccagggacaggccctgaagtgggggtgggggccctctcaggggacctctgctgccctctcctttcccccttctaattacccctcacacgctgtacgccggagctgcctccaccctgtgcttctgatgctggagcacacctggcatctgagagttcctcatggtgcttcatgccccccactcaggaatccccctttaaggagcaatttctggggtcctggcagccttcggtcacccctgggcactgtgggtcacctcacctggaggccagcattggagtcctcgggcccagcatgaggcttaacctttccatccccaggacctcagtgtttgtcccttgttgggcacactgtccttcgaggtcccttgatggctgccccaggcccacttcccaccctctggtgactcttgaaagaaggacttcttccctgttgtcctcccagaactccagacctgattctcatttgttcagatgaaatcacacacccactcctcagccagttacttgctagggggctggcatatgcagatgagctaagcctggatccccacccaggaaggctcagccccactgagaccaccttggccctgcagtgggggcagggagtagggagtggacaccggtgcacatcccagccaggcctaggacgcccccaaactgtatggacctgtggctccttgatggaagtctttggctcgggactgggccagctgcctaattttagtctctggcggagcttctgaaagaaacaaattcccaggcccatccttgaagacttttgtttggggtaggatccaataattgtttttggtgttcttttttaaactatggtaaaaattctcacaaaattcactatctgaaccactttacacagttcaggccgggcgcggtggctcatgcctgttatcccagcactttgggaggccaaggtaggtggatcgcctgaggtcagaagttcaagacaagtctggttaacatggcaaaatcccgtctctactaaaaatacaaaaattagctgggcgcggtggtgggtgcctgtaatcccagctactccggaggctgaggcatgaaaatcgtttgagcccaggaggcggaggttgcggtgagccaagatcgcgtcgctgctctccagtctggatcacacagcaagaccctgtctcaaaaaataaaaataaaagtgaagtgcaccattcggtggcatttagtacatttgcaatattgggcaaccatcgccactacccggtcccagagcttttcatccctgcaaaaaggaagcgccatttatcagtcacctctcccctccctcctcgccccatcccctggctagcaccaacctgctttctgtctctatagagttgcctattccggaatttcatataaatggaatcatatatatgtggccttttgtgtctgactcacttcattcagcagaatgtttccaagggccatcctgtgtggcatctatccacattccatttctctcgatcgctgaataacctcccgtcgtgtgggtgtgccacatttggtgtatccgtttctccacggagggacatttggttggtttccaccttttggccgtcgtgagtcacgccgctgtgaacatttgtgtataaggttttgttcgaagacctgggaattggtgtttttaagatgtgcccagacttaatgaagggttagaagtccgaagtgagttgttggtaagttgctgggggcccagtgaggccagaaccacccagctattccccttcccacaggccctcagcagaaggagcggggcagaacatctgccgtggccccagggggagcttcggaaaagctgagttggagaacaaggccagctaagcatggctccccgcccgccgcacccaccccaggcagggaggaggcagagggaatgggaggcaggccctgcacaggcatgctggttcagggagcaggagcaggagcaggagctggtggggcccccatatgtgtgtgtgtggctggcctgcaccccagctgattgccccctgcttttcctgcaaggtagaagtggggcagagggaggtctggtaaggacagtgagcagatgcaaccgaagtgtccccacctcacagagaccacccacctggccgcagcccttcactcattttggtggtaggatcctctgcatttagcccagtaagtgaaattgccttttatgtattaaagatagttgtgctgactgaggggcagagctggggctctgctcagcctcccctggttcccgaggagcacaggctggaaccgacctagatcaggattcggtgtggggatgttgggggaacgtggaagacgggctcctcccgggctgctgtcagaatccctgaatgtgggtctgtatgtttccctgtcctgtgcatcactgttctctcacgctgtgattttacatctggaaagcaatcatcttctctcccaccctttcccgcaaggaccctgagtggtcatgcccagcttccatttccaggttaggcaccgtcttgcccagttgggacaggaggaccactgcgtggctccttccatcctcctggctcctggttcctgcggccaccagtgacttagagtctgccccggccgcagccttccacggtgccaggacagctcacactccatcttcctcagcttcggctgctctaacagaaataccgcagactgggtggcttacacaacagagccttgttcttcgcagtcctggaggctgggaagcccaaggtcagggtgccagcaaggttggcttctgggaggaccctcttcctggcttgccatcttcctgtggtctcctcacatggcagggagagagggcatctctctcaggtctcttctcatgaggacatcagtcccactcatgagggccatcacctaacgcttcccgaaggcccccacactgggggttagggcttcaccatatgaatttgaggggacacacgcactcaggccacagcactgccttacctgggcccctcctcgcctgcaaccccacctgcgccactggctgaggggaacgccagccagcatttctctgggttgttcccctcccctccatgctcgagtgaggggagctttgggggcaagagatgaggtaatggtgccaggaaagagatggctaggaccccccaggggccgggagccaggcctgcctggccccagccagttcctgttggcccagcctgatgggaggagcccttgaccacctgcccacagtacccccctccgtctgggagggagaatccagagtggcggcctctgcagtccccacgtggctcagactgccacaaaggcaggtctgggagggttttagcaaggcatgagaatgaggggcctttgctaggaaggaaggggagatgtgggcacaggtgggcgctaggtggggcttgcccgagcgaggaggaccaggaaggaagcacgggaggggagcagctcaggcatggacacaggaggacggctccccagcaatgacctcagacacagagacctggtggcaggaattccagggcgcactttcagggccagcaccgtggggagagtgaggcactgcacagggatgcgacctcagcagagggctcggccagcgccacgtgcagctctggagcctttcagagttggcccaattgaagcaacgtttgaaccgcaaccctgaccagtcactggctatggctgtctgcaggaaaggggactgttcctgggggctgttcctggagaagaactcagctgtgagccatgagcagcccacatgctccacagcttgaggaataaacgacttggtcctgaagagggatctgggtggcacagcacagggtctgctgtgccaggcgtgtgttgaggagatggaggcgtgcacaggggcagggagggaagggagtgcggtctgttcagagccgccagcgctgcagtgctgctgtgctgggggaaggtgaccctgaggcgtaagtagaggccagtcgtaccgagtctttgatgccagccacagggcttgtcctgctgcgagtggggagccatggaggggctttgggagggaagcagaagtcgatttaccatgaagctcatgatgcttacgctttggggtcccttgctcacaggagccccttccgagaccctgggagaggccaagccatgtgtttacatggtcacatttttgtaaattttgcaaaaataagatattttaaccatacttgattaacagcacttctcttttcattcctgcttctcattgatacaattctcctcccgtgggtgccactgatacacttcccctcctgtgggtgccattagaatggccttgggcattttgctgctttggctacagagaaaatggattgagggcatttgttttggcttattgccatgattctgtctcttacaagtagagttaaatgattgtgtctgtccaggtgtaatagtagcttccagaaatactcgccacaccgctgtgccaactcatctagggtcattgcagaatacaggctgtgtgctggccatttccctcagatctttgcagaaaaaggtgcctcagcggtaccggaggttgtcactacttctatatgggcagtattttgtttgatttttaggtttgttttatagatggagtactttaaacacagatccaacatggatatttctttagaaaggccaagtgtaacaagatggtctgcttgttcaaaagctggcttaggccaggtgtgatggctcacacctgtaatcccgacactttgggaggccgaggtgggcggattacttgagatcaggagttcgagaccagcctggccaacatggtgaaaccccatctctactaaaaatacaaaaattagccaggcatggtggcgcatgcctatagtcctagctactggggaggctgaggcaggagaatcacttgaacccgggaggtggagcttgcagtgagtcaagatcatgccactgcactccagcctggacgacagagtgagactccatctcaaaacgataaataaataaaacataaataaataaaagttagcctagcctcacaacatatggatgacaataaatgaagggctctaaaaaatttcaaagacagaagagaaaccgcaatgaaagcgagatgcagaaatgttggttacgtctgaaggcactgttttcacttccgttttgaaagtggcttgggaatgtttccataaaataaggaagaaatgacagactgtgatttggatatatgtatcaaatataccttttatcattttctaatttatttattagaaaggaaagaaaattcagataaaaattaatgggatatgaaactaaagtagtagaaaatgagcaaggaaataaaaaaaataataactctgacttcaaaaagctcattgtcaccaaaaaagaaaggttttatatcaaaccaaaagcagttgctcattaggaggaagagacacatatcaaagaagttaacaggccttggagcgtttgacagtctcattaacgaagaggagtgaatctgatgaacacataggaaaatggttcagacatctttctgatttgccatgaaatgttgacaacatcaaagacgccagggagctgcgaacgctgccactgcagtcagggcgtccacggcaactgctactgagcgttgctcatccaaagagtgtcttaaagtcaagctcccacagagaaaacttgaaatgccctgaaaaccacatcaaggacggaaaccagagagcacctcctccaaatgtcatcatcctaaatgttcagatggcgtcacccataacttctttaaagtactgatcattttttaaaaagaaagaatttccctcaatatgccagggccaagtgctggccaactccatctgctgcctgtttggttggtattggtttttttccctaacagctttaataaggtgagatctatatttaaattcactttttaaagtgtacaggccgggtgcagtggctcatgcctgtaatcccagcagtttgggaggctgaggcaggaggatcacctgaggtcaggagtttgagaccagcctggccaacatggtgaaaccctgtctctgctaaaaatacaaaaaaattagctgggccttgtggtgggcacctataatcccaactactcaggaggctgaagcaggagaatcacttgaacccgggaagcagaggttgcggtgagccgagatctcgccacttcgctccagccgggacaacaagagcgaaacttcgtctcaaaaataaataaataagtaaaagagagtgtacaattcagtgattttcagtgtattcatagagttttacagccatcacaacaaacaagcgctggaacatttttgtcactctgaaaagttccaaaccctttagtagtcacctcaatccatcctactctcgcccaactccagatagccactcgtagccactcatcctcttgctgtctttatcgattttccaattctggacatttcatatcaatggaatcatacaacatgggacattttgcgcctggcgtctttcacttggcataatgttcacagggctcatccctgttgtagtgtgcagcagccctgcattccttcctgttgctgaatactaatccactgtgtgggtattcatcatttattagttgatggacatttgggttgtttccacctttcggtaatgatgggaaataccgcacaaacattcgtgtacaaagtattgcgtgcatgggtcgtttttcttggatgtacacctagaaatggaatcattggattttatggtaactccatgtttgacattttgaggaactgccagtttcccaaagcagcctgttttacattccaactggcaatgatgcttcagatttctccatatcctccccaaaacttgttattttatttgttataccaatcctagtgcatgtgaagtgatatatctcattggggttttgatttgtatttccctagtgacctatgatgaccgtcttttcatgtgcttaatggcaatttgtatatattttttgtataaatgtctatttagatcctttgcttattttttcatggagttatttatatttttattattgaatcctaagagttttttatttattctggatacaagtctgttatcacactcaccagtgtaagtggtctgcaaatatttcctcccattctgtgggttgtcttttcactttcgtgatggcatcattgaggtgcaaaagtgtttaattttgatgaagtctaatttatctatttttacttttatcacctgtgcttttggtgttgtatttgagaaaccattacttaggtcaagaagatttactcctatgttttattctcagagtttcagctcttacattgacatctgtgatccatttttgagttaatttttgtgtaagtgtgaggaagatgtccaacgtcattcttttgcatgtgaatatccagttgtctcagaaccattcgttgaagagactattccttttccattgaattgtcaaagtttaacttatcaaatgtaaaggtttagttctaggcttttgttctattccgtcggtatatttgtctgtccttatgccagggatacactgtcttgattactgtagtttaatagtaagcttcgaaatggtgaagtgtcttcccactttgctcttttttcaatattattttggctattctacatcctgtgactttccatatgaattttaggagcagcttctcaactttgcaaaattctagtctgcattttgataggaattatgttgaacctgtagatcagtgtgaaagtatttccattttaacactgatcaatgaacattgagatgtctttccatttacttagaacttgaacttctttcaatgatgtattgtaatttttagtggacacgttttgcattccttttgttcaatttattactaaggttctttttttctttttggtgctattgtaaatggagttattttcttaatttcatttttaaatcatttattactagtttatagaaatgcagttgatttttttgtatattggtcttgtttcctgaaacctcagttaatttgtttgttagctttaagttttgtaggggattctttgggattttctatacagaagatcattttgtctgaaaataaagataatatactgttttaactgccattttgaaagtggttccagaatgttttgataaaataagggagaaatgacagactctgattggaatatatgtgtaaaaagtaccttcttttattattttcaaatatatttgttaaaggaaagaaaattcagataaaaattaatggaatatggaactaaagtaataaaaaatgggcgatgaaatcaagaaaaatgactgacttcaaaaagctccttgtcacacacacacacaaatctattccgttgcttttcgtgtgcttaatggctatttgtcctcacgtcagcagggacgaaagggcaaaaagggacctcgctagctccctctggcgcttttataaggcccccaatcccatccaggatgacctcatggcctaaggatctccttaaggccccacctcttaaaactgtctatgttcaagttcactgattgcatctgctgccagctcaaatctaccactgagccagctaattagtttatcttttaagtttttgtaccattcaactccagaatttctatttagttcttcttttttttttttttttttcgagacagagtctctgttacccagcctggagcgcagtggcgcgatctcagctcactgcaacctccacctcccgggttcaagagattctcctgtctcagcctccgagtagctgggaatcacaggttgtaccaccatgcctggctaatttttgtatttttaatagagacagggtttcaccatgttggccaggctggtccagaactcctgacctcaggtgatctgcccccctcggcctcccaaagtgctgggactacaggtgtgagccattgcactcagcctctattcagttctttttataatttctatctctttactgagattctccatttggtgacacgtcattcctgtactctcctttagttctttagacatgatttccttttgttctttaaacacattacttatagctgctttgaaatctttgtctgctgagtcagacatctgggcctcctcagtggtagtttctgtcacctgcttcatttcctgcgtatgggtcacactttcctgtttcttttcatggctcagaaagtttccttgaaaactggaaactttagataatacattgaagaaactggataatgatcccctgggccttgctgctactgtttgcttgttgattttagtgccctggtcctgctgtttcaatgaagcttatgtcccctgcagtgtgcagccactgatattgctccccagaggtcacagccttggtcatatgcagtcaccctgactgcacccctgcccctaatgccctggggtagtggcattagccaggctctttgactatctctttcccagatctttccattaagcttctggtcattctgcctgtattgctatcacacccaactgttagccttcactaactgctagctgctactaacagctagtgcgattgattgctgtattgtttttgacagtgtcctggggtatatagcttgctctacaatatgacctaattaaattctagacctttcacaggggcagggtgttgccagtatctgaggtgtattgagaccttcaggagggctcttagctgtctttgtccctggttctgtctgtttaacttctacaggttgagcatccttaatctgaaaatctgaaatccgaaacacttctggttccaaacgcttctggttccgagcatttcagataagggacactcaacctgtagctggtttaacattttgtttgttgctattaggaccattggcctcctcttaattgctcactgctaagacccttgttgtttttgacagtgcccttagacatgaacatcctccacgctctgtttcagatcaaagtcagtccccttagggagagctgtgaagccttctgttctgactctccctctgggcaggcccctgcaccactgagccagagctaaaggagcagggtcagtggcctgcttctcccagagtgacattcctggcctacagactgctcactagatgggaatggtagccactagtcttctgggcttgcccctttcaacatggaacctctaccctataagcaatctggggaggggctatcaggtccaccattcttggcctggtgtacctggagcagagcttgtgccctatgagtggggcctgggtgggggaagggggccccaggcctcttggccatcccaccagagagagactctgcaacagagttgagagggatgacaccagtggcctgggtttctcagtatgaaactgtagcctcagaccgggagcttggagtagaggcagccccgtcttcttggcagtaaagcttctgtcacactgagctagggcaggaatgggggagggctgtggctccaatgccatagacttttgcttttcttaccaagatttaatagattttcttgagaaaaaaaaaaagcttcttcatttgttgtttagaccttaggacaatttccagagactttaaatggctgctttttaaaaactaattttcgtcagttactggggagagggttcaccaacctccttacacttccattcaaagtttctgtttgctgcctgtttttgtaaataaagtttacaaaataaagttccaataaggaacacagccatgtccattcatttataggttgtctatagctgctttcaagctctgatggcagaattgattaattgcaacagagattatatagcctgcaaagtctacaatagttactctctggcccttttacagaaagaatttgctgaggaatggtttgctgagaagagtttgccaaggaatggctgcgttctctttctgttctctttgtggaaacagtgctacaaaattaggtcatacaaagaagggttaaagagtatgcagtcggccgggcgcggtggctcacgcctgtaatcctagcactttggaaggctgaggcaggtggatcacctgaggtcaggagttcgagaccagcctggccaacatggcaaaaccctgtgtctactaaaaataaaaaaaaaaaaaatgcaaaaattagctgggggtggtggtggacacctgtaatcccagctactcgggaggctgaggcaagagaatcgcttgaacccaggaggcggaggttgcagtgagccaagatcgtcactgcactccaacctggggggacagagtgagactctgtctcaaaaaaaaaaaaaaaaaaagagcatgcagtcggaactgaaggaaaagttctgtcagtcaatgtattagaagtccttgttctctgttttttggttgtttggtcattgtcagttttaaaacgtttttgtgtgatgtattttctcatttcaagtcaataacccattttgcacctaatttaattctttaattttgcaatcttcttcttaaagtgggtcccctaaactgtagacgcttcctccccctagaggaatgagagcactgtgatcagattaagatgtggaatcatttttcctacatgccagcattggactttattcctggtttttaccatgtcagcatattacttgtcccttttttccatagtatttcctctaaattgccttttttgcttaaataaaccttgtatgtcttgcagtcactggcctgataggccagtggtatctttataaatgggctgtgtgtgggcacccaggaggcatctatcctggcggcgtcatgtggtgcagcttccagctgaggggacacagagctgctagaaggcaggagggtgggtcagcaagcgggaggcagggcaggccagcccctcactgtgcctcttattgcctctggccaatgaggcctgtcttctgggggctctgagcatctaggggcgaggagggtgagctccccctgtgccccagagtggggccaggacgtgtcccagacactgcaggctgcagagcgcaggactgtccccacggcccggtgtgagggtgagtggagggactggcttcctgtctttcagcattgttttaaaggacactgcatctggctgacacctgacatcctcaaacgggacggcagctggggcgcttggagtccgtttggctcctgctcacgtacctgtggcacgggcgtgaagttcaggacccgccagtgtgacaacccacagtgagttggccccatgtccccctggccttgctgagtggcagctgagggtccaggagaccctctccagccagccctgtcctggagggccctgtggctgcacaccagttctggagaggtgcagggcaggctgccccgcctgcctcaccctacctgggagggggtgacggctcaggggacgcttagctctgcctcttaccccttcccctggccggggcccacagcccacctgcctgcagcccactctagacagatttactctgtctctcctggccacgggcatggaggagaggagggaggaccgagctggggaaatgggggtaagcgggggtggtctctcagcccccccgatgctagcacctgggcagctgtttgcagccaggtgagggcagggtcgggatttgtcatcagtgtctggctgcccaggggagggacaacctgtagagccggcccatgccagctgcatccccatgctcagctatacctcagccccacccgccacgcaggccccatgccctgtgctgtcctcctgccccttctcattcctcccacctcacccccacacaccccgtaaatatctcccgggcccgtgctccctcctcagcccgcagccactttctcatccacaccctcctctccctcctccactgcctgtctcctcctgcctgaacgctcaccctggcctcacccagggagtgtcccgggggggctggcatggagggagaaccctccacaaacatcagcgttacccccgtctcccacctgcgcagcgggctcttacgccgcaggccctgcagctgcttagacacacagagcttcggtctttcctttttggcctgtctggtattttaaagattttgatttgcctgaaaatattgacaatctgtaatttcacattagaaaaacaaacaaaacagatttccagcctccaaattgggcatcacagatgcacagccgggcccagttaccagctggcgggcagggctccgggtgcgtcccggctgctgcgctccggcctctgcggccgctcctgggtcctgttcactcgggctgctctccttgctctggccaggcccgagctggaccctgcggagccagagaggacccgcagtcacggctccgcggagggatcccgcagtgggacagcctccctcagcagcacgtgtgaacacgctcgtgcatggatccctctcctacccctgctgtcctcctgccccaggctccaggctgccctcccggccagaagcagacagggagccccgtggcccctcctcaagcacccctggggcttttacgccagactcggaaagagattgctgggcatttagaacctcaagaggcagtgtgtgggttggtgctgttcccagtgaagcgaagacgttgcagaaacgcagcccgccttctccacagggagaaaacccagcggccgtgatgcgtctgctttgtgccaagacacttgctgagaactgcagcaccgggactctggggcctcagcatgcctctttctgtgctaggctcggtgcccagggccagctgcagaggagactcactcagctcctgccgtgctggggttttcgccctgtggggaacacagaacctaaacacccaatcacagcttcctgttcatctccaagcccaggcatcagtgctggggaggaggtggcaccagggctgtgagcagatgctgcctccccacaggaaccccaggagggaggatgtggccatcctgtcctgtcctttcaagagcttcactctgaggcctgacaggctggacaactgcccaggtcttacagctaggacatggcagggcaaggtccctttgctcagcagagctgccccccggacacctgagacttagggatcccccctaaaaagatctcacaagggcacccgggtgctgcctctttccaatggcacggagcggcaaggcctttgctttctcctccagcccggccaacgggggccgcacctgctcgggccttgcctacgacttccagctctgcagccgccaggactgccccgactccctggctgacttccgcgaggagcagtgccgccagtgggacctgtacttcgagcacggcgacgcccagcaccactggctgccccacgagcaccgggatggtgagcccttctgggaggcatcagtgggggctcagcaggcaggccctagggtgggcagggtgggggcttgtgcctctgatcctgcatggggcaaggctgccgcgaccctgggctggcaggagagcccaccctggctggtgtggctgccctggcccactcctgggtggggcattaaagttcctagcagggctgcaatcccagagcaccagaacaccccagagtagctgaggacatggaagaggtggccgggctgcgggctcggcaggggccgggctcctgcagttcaccgtgggtggacgaggcttgagctgtgtggtcagctcagggctgaggccagggctgaccctgccaaggaatctggtgacctctgaccttctctattagtcgggactctcagttgcgagtgtcagaaagttgactccaaccggtttcagcactagaaggcatttattggctcagggacctgaggagtctggtggccttgggcatggcagtgcttgtgtggcagctggggaccctcctgggacggactgtaaacacagtccttgtttctcctccatggctgttgccctagcccagcagctgctgcctcatgtgggccagtgcagggttggaggtgacacagcagatggggtccccctctggcggaggccacagtctgggggcccagcgttttagttgcctcagataaaggctgagaagggaaggttccagggacctgagtctgaatcgaggcaggctggcctcattctggatttcagagattgactgaaaaggattatttactttttttttttttgagacggagtctcactctgttgcccaggctggagtgcagtggcgtgatctctgctcactgcaacctctgcctcccaggttcaagctattctcctgcctcagcctcctgagtagctgggacttcaggcgcacgccaccacacccggctaaatttttgcattttttgtagagacagggtttcaccatgttagccaggatggtctccatctcctgacgtcatgatccgcctgcctcggcctcccaaagtgctgggattacaggcatgagccactgctcctggcctttttttttttttttttgagatggagtcttgctccgtcacccaggctggagtgcagtgtgcagtggcgcagtcttggctcactgcaagctcggcctcctgggttcaagcgattctcctgcctcagcctcccaagtatctgggattacaggcgctcaccaccacacccagctaatttttgtatttttagtagagacgggtttcaccatgttggccaggctggtctggaactcctgacctcaagtgatccacctgcctctgcctcccaaagcgctgggattacaggtgtgagccatcttgcctggcctgaaaagggttctttagatagcaacccagcaaacagacatttgcagcctcggaggtctccaagcggggcctcggggatgtgagagccgggctgcaccaacagcctggctggcttggttgggaaaagctcttccaaagtccacaaccaccagggtcaaaggcttaggagacacagagacaggaagggggctgctgtcacccacccctttccctctctgtctgccctggagggtgggccacgtggggacccttgtggaaatttctcctgcttggtgcctcctttgcacacacatggggaagccatcagggctccttgcagacccccagctgcttcccttccagccaaggagagatgccacctgtactgcgagtccagggagaccggggaggtggtgtccatgaagcgcatggtgcatgacgggacgcgctgctcctacaaggacgccttcagcctctgtgtgcgcggggactgcagggtgagtacacagaggccggcacggggggctaccgtgtcaagtctcagcttcctgggtactgacctcccccttttcggggtattggcaagatgcatgaggtgaagcatacgaagtgtcagaaacaatgcccggaccagggcaggctcttggcaaatgtctgtttacccctcccctgtgctgggagcctgagacttgagtatgcctaggactcacctggagagtttggactccacctcagacgtcctgattccacaggtcacggtggtggcggcctgggagcatgaatttttaggagcatcccaggtgatttccaatgcacgtgacctacaggggacccttgtgaagcaggccccatccttgcaccctgcagggcactgggcagcttcttgctggatctgggtggccactgtgagggtcactggtttggtgctttgtagaaatgccctcctctgttttcttttattatgatgcctttggcttcaatctttggctgtcaggaaaaacaatctcgtgtcacctcgccatgtgacggtgacatgaacatagacttgtccctgccaggctcccccgaaaacaaccggaagtctctgcttagggcttgtgtagacaggactgatggcaggagtcgtggaggctgactctggcttgaccttcctgagaaacagccgcatcggcaggaaggcacctctaggggagtgggcgcagggacagcggctgggggctggagccgggagctggagctggagtcgggagctgggggctggagccgggagctgggagctggagccgggagctgggggctggagccgggagctgggggctggagccgggagctggacccgggagctgggagctggagccgggagctgggggctggagctggagccgggagctggggactggagccgggagctgggggctagaggcccggagctgggggctggagccgggagctggagctggagtcgggagctgggggctggagccgggagctgggggctggagccgggagctggggtctggagccgggagctggacccgggagctgggagctggagccgggagctgggggctggagccgggagctgggggctggagccgggagctgggggctggagccgggagctgggggatggagccgggagctggagctggagccgggagctggagctggagctggagccgggagggtgctcgagggctgctctgcatttgctcctgtgacttcggcagggccgggaggctgggctatacagctggctcagagatggcgacaccaaatacgccaaaacaagaacaggtggtgtctgctctgtacccttgggattttaatttatggaggtgacccagtgaggacgtggggaggccaatgtcactgagagggctcctgaggaaggcagggcagtggaagggggacagctcaggaatggccagtttgaatcattccagtgggctctggagtttagggtggtccccagtagcctggtacccaaccctgggatgagttagggtgcaagaatcttggtttggtatgtgagtcctggataaaggaggtgcttggggtatagactgaagactggctggcttgcatgtgaaaggtgtgtccccaacccagtgctttgctgtcccttagaactggatacccctgggaggtgtagtctctccccagacaggaagatttttaagatgtcaaaatatcaagacataggacgttttgaaaaacaaaaacataattaatacaggcagcaagcatgggaaacagttgtagtacaagtagcttcagatggcagctgtgatcatggttgtaaacctaacggggagggaagatcactaatgcactgtctccgtgggtgtggctatcacgtcactcctgacatgggtattaaagaaggataggggctgggcgtggtggctcacgcctgtaatcccagcactttgggaggccgaggcgggcagattatttgaggtctggggttcaagactagcctgaccaacatggtgaaaccccgtctctactaaaaatacaaaaaaaaaaaaaattagctgggactacaggcagcgactcgggaggctgaggcaggagactcacttgaacctgggaggcggaggctgcagtgagccaagatcgcgccactgactccagcttaggcgacagagcgagactgtctcaaaaaaaaaaaaagaataggttaaatattttattaatgttgattttgacaggtaatagcaggttgctcaattttgcataattagaaaacataaatattcatgcagaacctaatactgggtcaaaaaataatatccaactggattctgtctgttaaagaatatcaaaacttggccgggcgcggtggctcaggactgtaatcccagcactttgggaggccaaggcaggtggatcacctgaggtcaggagttcaagaccagtctggccaacatggtgaaaccccgttgtactaaaaatacaaaaaaaattagccaggcatggtggtgggcacctgtaatcccagctactcgggaggctgaggcagaagaattgcttgaacccaggaggcagaggttgcagtgagctgagattgcaccattgtactccagcctgggcgacagagcaagattccgtctcaaaaaaaaatgtaaaaataaacagcatctcctgcttgccaaacataaatgttcatcaagccagggacggtgcctgcctgggcctcgatgagtcccctgcccaagaccagccgcgtgcacaggggcccagacggaaactgccaggtcgagacactgctgtaggtggcaggcaaggtccgtttaactgatgactagacgcactctgattttggagataataaaagatgaggccaggcaaggtggttcacgcctgtaatcccaatgctttgggaggccaaggcaggaggatcgcttgaggccaggtgttcgagactgggggcaacatagtatgaccctgactctactagcaggacgtctcaagtgctcactgcctcctcccccaacagaaggtgggctgtgacggtgtgatcggctccagcaagcaggaagacaagtgtggcgtgtgcggaggggacaacagccactgcaaagtggtcaagggcacgttcacacggtcacccaagaagcatggtgagtgggtccctgctctccaccctggagcctggatgcctgcagcaggctcatgcccggacagctgagggcctgactcatcctggggctgtccgggcttatgactgttctggggagggggagaggtctgtgacactgagggggagggagaatcctaagtcggggacagccccagctgggtgccagggtgggtggggaagaggagagtgggggccggggtcacaggggttagagtggagaatgccagtatatgaggatgcccgggttgggccttaaagactagcctggaggcagcagctttcctggtggcccctctcaggtgggtcctcaaagccagagaaataccagggtcctgggagagcctccggaggagctgccttcaagagcgaggcccctccttgcatggtgcgaatttgagcggcgccttcccttctcagttttctgtgtctttccacatcaaaaaaaggttacatcaagatgtttgagatccctgcaggagccagacacctgctcattcaggaggtagacgccaccagccaccatctgggtgagtctcagagccggacaacttgacgtcctcaggacctggctcctctgggatcaatgggcagagtgccaggggtcaggggtcaggggcccgggttgtgcagccatgacctgagccagggcagcccctccccaacctgtccctctgctcagcccacctgggccctttcccagggtcctccccttgtggagaggccagggtttgggatcagagggctccgcttggcagcagctatgaaaggacatatatgcaaaacatgtgtccctcagtctacaggatgactccctgtcccctgttctcacagtcggggcgggaaggccccctgccctcgggaaggcaggcagggtctgcaggcagcagggtcctgggcagccctcccatcccctcagcaaggccagctgtcaggtgggtgcacacagtgcacttacattttcaattcgtttaattttaaattcaagagattccagctaaaatagggatcctggtatctcctgaaaatatggatgttctcacacctctcggtgcccctttccacgaagcagcgctgcctgggagaccacgccctcccaggccacgcgggaggctctcaggacctgtccaccctccctctgaaggtgcctgggccctaccttctgggaattcatgggccaaggtcagaagtgataccagggactgctggggcccctggataagtcccttccccaatctgagccccacattcatccccatccccaggaggctggacaggattggggctcccacgctgccgtggaccagcacccacgctgcctgacaaacataccatgcccttttattttatctcccttttgttttattttattttgtttttatttagagacaggatctcactctcttgatactcatttttctttcttactttttttttttttttttttttttttgagtctcgctctgtcgcccaggctggagtgcagtggcctgatcttggctcactgcaacctccgccttctgggttcaagtgattctcctgcctcagcctcccaagtagctgggattacaggcgtgtgccaccatgcccagctaattttttgtattttttactagagacggggtttcaccgtgttagccaggatggtctccatttcctgacctcgtgatccgcctgcctcggcctcccaaaatgctgggattacagctgtgagccactgcacctcgcctcttaagaggaaactttcgactgctaccctaaatataaaaacctgtaccacttgcctgaagcaggtgaacagaaaagtcagtttctgaacaaaaagacatttctgtcccaacgctgcttcctgccaccgcctctggggctgaggtcgctctctgtggaaagggagcaagggccagagagaaggcagggacgtgtggcaccaagcagaggctttgtttgtgagtggacagaattacaggggacgtgacagggaatgattttctcactagtgccctgtctgcggccccactcacatcacccagctgccccgcagcagccaccccccacactgcagagagcatggggcttcctggctagccaggtcctctgctcctagatgacctgagtgtcacccaatcaggccaggcctcttctggggctgtggggagctgctggggcctcggctgggccatggtccctgatggggtgggggttctgctgtttcagccagacatatactcaccccatggcaggaagccctactccagcagggtcatgtgctcgcctgtccagcagatgccctgcaccgcgtacagacccctcccagccatcctgccccgggtggcctctaagcgcccactgagtgctcccaatagggtatgggtaggtggccttgacggctactgagtggcttccaaggggagccggcacctccagggctggtgggggcagaggatgcgagtggagggtaatctggtcccgagggagcagtgatgggcaagcagggctcccagagccatctgggctgtcgtggcacagaggaaactggccgggggcagccagagagacaaggggtccagctagctgcccccactccccgaccagcccaaaccagtgggcctgggtcctgctcttgggtgaccacaacgggggacttggtcttgccattctcagccgtcaagaacctggagacaggcaagttcatcttaaatgaagagaatgacgtggatgccagttccaaaaccttcattgccatgggcgtggagtgggagtacagagacgaggacggccgggagacgctgcagaccatgggccccctccacggcaccatcaccgttctggtgagtccaagcagggctgggcccagggaagggtgcgggtggccactgggggagggatgggggtgcctgggacgctgagcctcctgacccttcaggtgacactctgcgtggcccctttggcctgcctttggcaccaaggggctccgacttggtcagagccaggaagggacatgcatccacgagccggggctctggaccccacatgacccctaggtgaccttgggcacactctccctttgagggtttcggtttcaccatctgaatgacattcacagctgccatcagcatgctcgttcgagtgtgctgttacattggaatcggtgacactctgggaggtgacgctcagggtctgggaagctagatgcccagacccaggttgagctggactgtgtctctaagcaggatgggaccccagatctcctggttgtaggaaagtaccacgggggctggattttcaaatcactttctttttacctggttttgaggaggtcagatcactttttaaaatgtaatttaactgcatagggatatattttatttgtcaaaaaaggtacatatcacaaataaggctcccatgctctggagcccctccctaaggtgggcatgctggcattgggattaatccaccagcccccagcgctccacacgtgggtgcacctgtaagcaggtgcagcagtgagccaggtatgccccgtgtaccccctggcaccctgcctgcctcgcctgcagtgacttctggccccctggacgtgcctttggtgacctgcctgcatcagtgtgtgagcagctggtcctcggcactcacggtttctgtatttgcaaattcacctgctcactaaaattgattcgtgagccccaaacggacacgcacagagtggtgaagtgtgagtcgcctgccacacgtgttcccagcggaggtgggagcaactcagcacgctgtctgcttgtttctgctctcatcccacaaacaggggttctttctgcagtctgttgagtgtcacatacatcacattttgtgctattttgggggcgatttcgctgttgaaaatcaccctgagcctgttgctgaagtgctgtccagtgttcctaagcccaggaagcagtggtgtcttaagaagaaaatacatgtgttgaataagcttcgttcaggcatgggctgcagtgcgattgactgtgagttcagtgttaatgaatcacagtaaaaattaaataaagtgtctttaaacagactcacacataggccaggcgcagtggctcatgcctgtaatcccagtactttgggaggccgaggcgggtggatcacttgaggtcaggagttcaagaccagcctggccaacatggggaagccctgtctctactaaaaatacaaaaattagccaggcgtggtggcgggcgcctgtaatcccagctactcaggaggctgaggcaggagaatcgcttgaacctgggaggcggaggttgcagtgagccgagatcgtgccactacactccagcctgggctacaagagcgaaactccatctcaaaaacaaacaaaaacaaacaaaaaaataaacagactcacacataaaacaaggttatatattgatcgggtaacaaaaatgttgagacagaggctcacaggaacctcaccctgtgccccctggggtaatggctccctattcaagaatttggtgctcggggcgacttcatggaatgtaactgccatgaatgatgagactcctctggagtcggcctcagctgccgttcctaagctggctggggaggaagcatggagggcaggtcaggcacatcaaggctcttgggctggcacaggtcatcccggtgggagacacccgggtctcactgacgtacaaatacatgatccatgaggactcactgaatgtcgacgacaacaacgtcctggaagaggactctgtggtctacgagtgggccctgaagaagtggtctccgtgctccaagccctgtggcggaggtgagggggtctcgaagctggggacctgggtgacatgagggtgaccacgagaaggtagggagcatccctggggtggggccagcgtgagcaggggccgaggagccacagcagggacctttgcctgggtgggcaagggcttagcggcaatggaggggccggtgggtgggcaggaaggggggtgctggggcattgggtcaaatgtggccaaagggtgtgtggggcatggaccctgtatttgtgggcctgcttcagtgtgggggtgacaggctggcctagcaagaggttgatgtgtggacacctcagaaggatcatgccgtggcattggcaggatcgcataggcaagactctggcagtgcagatgacacctccagaggcttctctctccgttcactgggaaaagcctcccagatgtttctgggacagggctgagcacagaggggtcctacccactctggaccccagagagtctgcagttgatgggacataggacccagaggcagacaggaagcgctgatctgttctgcgtgctcctgggggctgggcgataccaggcaagtgaccaggacagtcctccctcgatgccatgctgggcccacacctggaggacaaggagctcaccaagaggtggggtcactccctggcccaggcagatggaagggtcctcttccagggcccctgggcacccccggccccacaccgggcctggatttcatcagcgcatccacccctggtgattcctgaaatctcctgggcctgtgtgctcttcccatcttcctggccattccccggtcctggcacccaccttcctctggactggcccttgtgtgtccactctcaccccaaagtaaccgtttgagggaacacatcagacaatgtctctctcttcctggtgtcatagtcttcaacagcttcctctgctcttaggataaaaaacaaaattctcctcatggcctccagggttggggcaacttgttggcctctcccagtatatctccaccctgtgcctcgcccccaggtcctggccacgccggccttaagggcttttcctggatacacaccatgtcccaccttggggcctctgcgcaggcttctcctcgcctgagcccctccaccgccctgccaccacgtcagcctccccagcctctgcttcctgggatgcctccaggcacccagaggaggtcaggctttatctccatgctttctttggtcttacccagcaggccagggtttcgaagcctgggcatcactgacattttgggctctgtcactcgccgccatgggggctgtcctgtgcacggtggggtgtcaagcagcatccttggcctttgctcaccagatgccagtagcaccccttcccccagttgtgacaaccaaacatgtcccagacgtggccaaatgtcccctgctggagaaaatcacccgggttgagcacggctgctctgggcctgtgggaggaagcatgcgggctgcgggcccagtgcttgcccggctcctggcttgcaccaggcctgctgggcatgtgaggtcaaggtagaagcggtgcctagcagtagcaaggaaatagggcctccactctgacccaggagcccagtgagggagaggcagcctaggggagaaaatggcctctcctgccctctcgcccctccacccgggacacaccaaggcctccccccagccagccgcaggctcggtgccctgcccacccttattgtcatcacaagggtgagcaggaaaacgaggccagcactgctggtgcagcccacccctccttgcaccctcgggcagggcatgctgccccaccgacccccgtcgagctctctgccttcagggtcccagttcaccaagtatggctgccgccggaggctggaccacaagatggtacaccgtggcttctgtgccgccctctcgaagcccaaagccatccgcagagcgtgcaacccacaggaatgctcccagccagtgtgagtgcccccagctcgggctcccactagaggagacaggccaggggccaccaggggctcccgtgcttggaggtgtggggcctgggcctggcatcatccgaggcatttgaccaagtctctctcaccacatttcatggaatctaagatgctgcagggcagaaggcgcaccccagcttcaaacccgccaaactgaacagcatcttagagatgacaagaaacagggatgcccagatggggaaatgggggttcagaggcgcagggctcgcctcctggccctgtaccacggggtagatgtttcttaagcagtggctttgacgttcaggccctggggctgggcccagctgcgtttctgggtccagggacctcagtggggaagacagttgggaaatgggcaggtgggggccacataggacagcgtgctgagggaatccacactgctcttgagctctgccgagaaggatttgtgacgtcagcagaaggtgaggccaggtagcagggcccagaccctaaggaggctgggaaacctcttcaggctagggacctccagagccaccagctccaccagggcctcccagtggtgacatgcatgggactcatggtcagtaggacctggggcagctgagcctcagtttcccctctgtgcaagcctggacagccagcatcttagtgagaataagagaaggtgcaccggggaggggtgcaggctgccctctgtgctcgctgtctacctgggctgcagggagcggcgctggagctcagccaggcaggttctccaggtgctgcggaagcctgactgtgccccgctctgccctggcaggtgggtcacaggcgaatgggagccatgtagccagacctgtgggcggacaggcatgcaggtgcgctccgtgcgctgcattcagccgctacacgacaacaccacccgctccgtgcacgccaagcactgcaatgacgcccggcccgagagccgccgggcctgcagccgcgagctctgccctggtcgttggcgagccgggccctggtcccaggtacgcaatcccccgatcccgtgtcctcagctccaaaactgagggtggacaggcatgcaggtgcgctccgtgcgctgcattcagccgctacacaacaccaccacccgctccgtgcatgccaagcactgcaatgacgcccggcctgagagccgccgggcctgcagcagcgagctctgccctgatcattggcgagccgggccctggtcccaggtaagcaatcccctgatcccgtgtcctcagctcccaaactgagcttgggtgggactgaggtgaccagagcattcccctttcggcccgtgggcctggatgtagctcctgtcctgagccacatcctgtgggtttcacggcgccagtggctgccacgtggtcagtgctgtactaagaaaccagtggaatgtgtgtcttcactgcacaggcagaggcttctgcatgatacggggtctggaatcccaggaaactgagggtagcccgggctccgaggcccagtaggatgttcggggctccaggatcctaggggacgcctgggtctcatgcagaggtgggaggggacaaactcgcaggaggggagaagagcagggcgtgcttaggcttgtgctgggaggaagaatgaggatggactgaagggcttcaggggtggtcctaggggcagggcctgagagccagctgaggccaggacagagctgacgtgagctctgacagcccggtcacatgcagggcccacgctggcagagctggaggagcgtgtgtcaggggctccccaagaccaccctcaggctcagtaatccactagaaggactcacagactcagaagcgggacttgcagttgcaggggcttacggtgaaaggatacagagtagaatcgggaaaaagaaaagtcacaggcaaggaggttgggaggaatccaggcgcaggctcccggtgtcccctcccagtggggtcacggaaatgccctgaattctccctgcacccatgtgtggcaatgcatgtgaaatgctgccaagcaggggagcccaccagagcctgggcgtccagggttttcaatggggtcagctacataggtgtgacctcagactgtagaggaaaagcaggtgttccccatccatcactgttggtatgaactacccagaccaactggtactggtgactcaaggcctcaggcaggcaaaaacactcttaataggtggagccttccatgagcttggttcccaggagctgcacaagggccagtcttgaaaacaggcgttggccgggcacagtggcttacgccagtgatcccagcactttgggaggcccaggcgggtggatcgcctgaactcaggtgttagagaccagcctgggcggcatggcaaaacaccgtctttacaaaaaaattaaaaaaaattagccagatgtggtggcgtgtgcctgtactccctgctcctcgggaggctaaggtgggaggattgcttgagcctgggaggtggaggttgcagtgtgctgatatcgtgccactgtactccagcctgggccacacagcgagatcctgtctcgaaaccaacaacaaaagaaacaaaacaaaacaaaacaaaaacacagacctttgttgggaatgtgcaggctttgagcaatccaggtctgctgagtcagccttttcctgtgcacctggtgaggcctggagaattttccttgggcaaggctgggcgtgactgctccttctggcacctccctggtcagtgtggtggagcagtggtggtgctgggggctggaggagccagtgagggcactagtggtggaccctcatgcccaggattgtggggagcctactggcgcctcctaggctgggtcagagctttcccagtgccccacctcaacccctgcccagggcacagcaggttctcctgggccttggacctcctccagccagagaagtgaggctgtcactgagagtccagcagcgccaggcctatgccagtctgtatatgggcactgtctcacagcagctcagagagacaggcatgtgggtcccttctttagagccccaggagattggggctgcccccgagggtggggcaaggcaacctgaaaccccactctccccactgtcccacacctcctcctgagcgcatgggtcatgtgcctggggactgtgggctcctccagctctgccagtgcgggccctgtgtgggaggtgaaccctgcctggcgactctccccctgcagtgctcagtaacctgtggcaacggcacccaggagcggccagtgctctgccgcaccgcggacgacagcttcggcatctgccaggaggagcgtcctgagacagcgaggacctgcaggcttggcccctgtccccgtaagccacctgcagcccctgcccctgctcccagcatgcagcagcccagggcgggggtgtcagaggcttggttcaggcaaatctggctcttcccggagagtagctggactcaacatctgtgagcatggagaagcggggcactgcaggccaggtctgggacctttgcctggcaggaaatggagggagctgtgtggagctgactcgcccctccctgctttcagggcactgcagactcacggtgacagcaggactcggccagctagggaatgctggtggctatggtgtagggggtgcctgtgtgaatagggggacgcctgtgcgagtagagagtgtgctctgtgacctttgaggagaaccagaatacctaccacgcacagatgcctgtccaaacgctatacatgtgtcacctctaaggtctccacacagttcaagactggaccgtgcctgccacagttcccttctatagaggagggagctctggggggtctaggcacctgcccccagctggggagggtgtatccaggatctctcattcccctggcactctctgtccaagctttctgggagctcagagctcgagtcagcaggtggaacccggggcgcgggcagggtgcaggggcagaggagccggcccagaaaaggaggcggcagggcctgcatgccagggcagcgagagggacgggatagctgagacccagctgagaccccggctgctgtcaggaggggcaggaggtgggcgtggacttggcagcggaggaccctttgtccgcccggggaggcgagggccttgaatgacgcttccccaggaccccgggagacccggagcctctctgcctggggtgggggccccagcctggtgccctgcggccgcagcccctctctcctccctctaggaaacatctcagatccctccaagaagagctacgtagttcagtggctgtcccgcccggaccccgactcgcccatccggaagatctcgtcaagtaaccgacccgtttataactctgcctctgccctccagtgcatgccctgcgccctgtggagcttgccttgggcccccctcctctctgtctatggaaagctcccctgactctgcgggcgcgctctggggtgaccgttttctcccgggcctctgagctcggcgtccgctccgggccgcgctgcctgctggcgggggctcgggcctctgctggggccgaacctggttggtgatggcttgtaaaggggcaaagatctgtcgtggttgcaggaggggccggtggccaaagggcgaccctccgggccgagcccgtcccggcccgggggggttcgcggtctcgcggcgtcgtgcggggaccccaccccgagtttccggcactgccaggtgcttcccggctgccaccgccgtcgctgctgccgccgaccctttgctgagcgtgtccttctgactcgtggaactatggcccgcttccgcccggccttcgcgcagctcacagccccgcgcggccctgtcctgcgggggtccggtcgcggaggcggcggaggggcgcggggacactccccacctccactgtccgcccgtcggccccggtggccttttctcgcctcgcgcacagctcccccgccgcagggctgagagagagagtggccgtctggtgcgcgcgtgcctcgcccacgcgtgtgaaccactacagaattacctcaatttttattgcttttttgcttagaaaaactatgtagaagatgccttaaagttgaaaggtaacgggattggctgccaactccagcttcagagggggaacgtgggccagtagaaggcagggaaggtgtaggggagccggtgcgttcatccaccttttgccaaggttgaggtttccaagtgcagacggcttctctccttgggctgagcggtgcgcaccgtccgtctccgcggactggagtctgccctgatgccccactggccagtcggcgctgactgttgcatggagcccccgagggtgctccacagcgcggccttacacccagggggcgaccccctgggccctgagccgcgatccatgtagcactcctccccgcccctccaccccagccaccgcctctgttcacaccgcacccctgccgggcggccggcccctactcccgcggctctgaccgccgttctgtaaataactggtgtgcacctgcgtactaatctcacgactgttaacttccaactttgacgaggccatgcgagcgacacgcgcgactggggaaggtgcaatactgtcctgggcatatgcactttggtttatcagggatattttattagtgttttgtatgtatttaatgacgtattctataggttccattgtcgttgcttttctggttttttttatgagacgttagcgtgtgccaaagtgactgtgaaaatgacctttcattcttactaatgatggaaagacctcctgtcatgcatcccacaaataaactcaataaaagttccatgaaactgggtgcgtgggtttggcaagctgatggctccttctctttttgggggcccagacactgaggagttgcggggcctcactcagtagcattaactaccccggtttctaatttgaatgactttactgccccactccccactgcccaacatagatatttagggcccctccccctgaaaggtgtatctcccctccccaggtattttccaaaatctgatagcaaaccgtgcagacaccccaccgtgactccgggttttgaatcatgtcatatgagcacctcgcaagaatatctaggttctatatggaggtctcctcgtcaggaaaagggcccgagatgggtttctcctcatctttggagcagagcctgtggagtgggaatgtggggtcagtagcccagacattgctagtccaggtcacctgccgtgagccaccagcaggtcactaccctggctccaggcacagttctcggccttgggctactcgtccaggaagggagaggtgcccatccggctcaggtggggggctgggccagccccgggaaagcctgggtcgggagaggggcagggcagtggtggctctctgggcaactggcctgcccatgtcttccaaggtcttcccaggcagccacagggcctgtgttctctcacattgctgaaaatggccagaaagagggtctgggttcaagagggacctcctgacctggggcctgggctgtgtcctgcccatggaagtctcactcctcccttttctgtaccactgaggagtcccaccagggagagggaagaaagcgtggaaggccatgagaaagaacagtggggagcagcccagtgtcatggggacaggccttgggcatagggccgggcccgggggctagcctggggagggagcaaccatggtagcgatggctgagttcagcctgcccagagctcagatcattgatcatcaaaagcaatcgcagcttaaaggagacaagaagcatcagggaaaattgggtcagacagtgcttccctccactcagtctctcttcccagagatgggtcaggagcaattcccgctaagaggctcctaggccagagctagagacgccgcctacagcccaggtgccaaggagggcacatctggaggggggtgcctcttgcttttttaaccagctgcatgaccttttgaatgttggcatgggtgtctgagcctaccactcctttactgagaaatgagaatgaggtattctccatccagcattttccaaagcatgggaaatggaaggtgattcggtggtgcataaacatagctggggctgcactgcactgagcggtcccttcctagttccctttatgctttatggtgacctcaggaagaaagcctcacttgctaccagctttagcctgtctcacatttgctcatttcccttcagctcagagcttggcaggcaggagtctctctctagaatttgatgagttaaagtgtgactttgaaattgactttaaaaggactttaaactttttttttgtattcctattttagggttacctttgttcactgcagtagctttccatgagtggtaatagtataaggtcttctaaaacaaattttaagtgtaaaaaggagttaatttaaaggatatgactaagcaaataataatgcaggtgctgttcaggtgtagccaagatcgtgggagtagcctacagtgacttaagtttatgaaaactgtgtttactctcaatggttgattgtcattcactggaagacaataggtctcactacttgattgctactggaaatggccgaagaccaaatattgtaaaaccacagtgttcatcttggcggagaggcatcgccagtcattacctcaggtgcatcactcttctctgtggtccgtgatgatacttaaaaatgtacaaacctggggcatctttaagatcagttggtcatgatgactttgaaatttttctaggctattttgaaattttcctaggctatttgcatagtcaatctcttggccaggattttatttcaattttgtatttactcattgacgtatttttatttttttaaactaagagcaatgccgcccactgtggggagaaaatcagacatagaagtccagtatgtagaccaggtggaagggggaccccacctggggctgccacccctcactcaatgggcatttatggagcactttctcgtgcatggctctgacctaggcgtgcacttgacccacgatcagtcaaccttttctgtaaagggccaggtagtcaatattttgggcattggagcccacatggtctctgtcacaggactcagctctgcctttatagtgggaaagcagccacagataagaaatgcatgggccgggcacagtggcttacacctgtaatcccagcactttgggaggctgaggtggatggatcacaaggtcaggagttcaagaccagcctgaccaacatagcgaaaccccgtctctactaaaaatacaaaaattagccgggcatggtggcacgcacctgtagtcccagctactcgggaggctcttgaacccaggaggcggaggttgcagtgagccaagatcacgccactgcactccagcctgggcgacagagcaagacttcatctcaaaaaaaaaaaaaaaaatgcatgggcatgggcctgatccaataaaactttatttacaaaaccaggtggagggagggacttggcacactagccgtagatggcccaccactgtaccaggctgatgtgattcctgcttttcagggatcccagcctggtgggggagacagtgagggagtggagatgtggataaatgtgtaacaccagccttatctgtgtgaaggaaaaactatgggcaacaggagagggggcagtgtgcagccagggtgtccctcccagcaccatcaggcccaggctccctcctttgtcaaagcctatggggtagggagaagggaggccaccatcagctcttatccagaaccccctgtgtttccctgagggtagggctcagtggtttcacaaaccaggctgctggagaggatggggtggggcagggatgggagctctgtgtctcctccacccaccttcaaacagtactatcatcagcagtctgagtctatctgtttcatatattgggcacctgtgtaagatttttatctgagaaaagccttctgccagtttcaaaatcctgacagccacatctcaggatcttccgatttgatttctggcatctcccctgggtaccaggccctcccccttcctccttggcactgtgagcatggttcttgggctcagtgtcagggagatccccacttctcctgatggccgatgggttttaactcccttttcatggtggaccctgcagccagtcatgtgttctccttattttggccacgtagaagctcagggccgaagtcgggcaccctctgatgcatgggcctccctgcattcttcttgcctggaaattgccattttcagattcaaaatttccctgttttgaacttcctcagttattcacattgatctttttcataccttatcttttttatgcctttatgcattatttggttcactgttctaggctctggggctctgccctgtggagctttcaggataatgaaaaagtctggcactagtcattcatctgacaattagatgcgagcttggctgggaaggcacagctgctgagaccgtgtgctgcagagaccttacctgctcaaggaggtcaggcgatgcctgcctgaggaagatgtgctccaactgcccctgaaggaggaagggtggtagctggaggcaggagagaggcattgcatgtgcaaaggccctgtggccaaaaggagttccatgcagagcaaggagtctaaggccagagggaggttggaaaggggaaagggacaggtcagggacttcaagtggcggggggtggggggggggtgccgtggtcacatcttcagtgagaaaacagcattctgactgaagcaggatagctggatgacatgggtgaagaatggacacagacccctcccatagtgcagccaagaggcagctcagccagggtggaggtgggagacggggaggaacaagggcatatctgagagtgtctaggacggggcacccaggtgtttggcttgtgtgcctgaaacaccatgcaccgagacagggtgggcagcagaggccctaagctcacgctgcaggggttgggtctcgggcttttgggacccacaggcccttggtggatttggcttgtagcaagtctgaagcttcaggggtttggagctggtggtctgtcaccagcttctaagggaaaattacaggctggagcagtggccattaagaagcaggacatcagaaccactggccctcgatggaaggaagggggtcttgtctgttttggacagcttcaggtgtagattgtgtcatatgttggtgtatgggataactgtcagatgtggctcccatccaatgcctgagcctttctccctccctttctccctccctttcctcctccctttcttccttttgtccctccctccctttccttttttcctttctttccttccttcagttcctccttcctttcaccctctccctccttccttcctttcaatagtagatgagttcaactaaggagagtgagggaaaaggagggcacgtcgggggtttgtgtgggaaaggtctgaagtcatcactgtggagagtagagagcagctgagcagagaccacaacaggcggtgttgggctcacggaggtcagtgattcggaatttatactggatcaagtatctcctgtaacatgacttattctttcttcttgagtgaattttttaaaatcatcttaatttttgtgttgtggaatgaggggatggggagagggaaggggtgaaaacttgggaaggagacagagagtaaagagagtgtgagcgcaagaagagttgatgggttgaatgaacatagccgcagacagaggtcgagatgggccagggagaagatggctgggtggaaagtgagagataatggtggcttctgtggagagtcggggctctccatgtaagctggaccacagatgaccagtttcttgggtggaaaggaaagagaaagatgtgcagggtggaacgattaatctatgtgagggcagcacgtttctttgggaaatggctggatgcgcaaggtggcggtgctatagggggatggagcagaggctggaaatgaggttgttgggtaagttgaggcaagtataagaaagcccatgcaggtttgggtgatgtttaactttcctttaggtgctgttcagttaaaagatcgtccggggcatctgggtcagaatgggagcaacatcagggagttgtggagcatggtggggccacagcggccctgggatttgctatattgggtcttaggaattggctcttttaggtttaattttgttatagttactacttagagattattgtagagtcaagccttgccacagaatttcactggggttaccactgggatgtcaaatgtgaagatgtgataaagtcctattctttaagatgagtttggaatcactctgtaagaacaaacgggcctcatttctttctcaaactttaagagatactgaaacatccaggttcaactggggcctgcttggaagagggaagccttgctcacagcttgtgtgtcagcacttccaggcaggggtccctggacactgcctgcactggggatgctttgacactgaacccacacagactttctgcctgggctcacttgcctctgtgctgtctctgggctcttccatatgcctcctccagcaagctgcaccctgtgggggaacaaagtcccccttatcttgtcctttggttatttgtcccacttttctttttcagagggccactgccaaggcgacaagtcaatattctgtaggatggaagtcttgtcccgctattgctccatcccaggctacaacaagctgtgctgcaagtcctgtaacctgtacaacaacctcaccaacgtggagggcaggatagagccaccgcctgggaagcacaacgacattgacgtgttcatgcctaccctcccagtgcccactgtagccatggaggtgcggccatcaccaagcacccccctggaggtccctctcaatgcctccagcaccaatgccacagaggatcacccagaaaccaatgccgtagatgaaccctacaaaatccatggcctggaagatgaagtccagccacccaacctaatccctcgacgaccgagcccctatgaaaagaccagaaaccaaagaatccaagagctcattgatgagatgcggaagaaagagatgctcggaaagttctaataaaatggaaagatagcatccctagcatttttttcttgcttatagagatattccatgggatagcaaatcctgtgtcatggagatgaagtcaaaattcctgattccaaaaggttttgagaaaacaaagagggggaatgacgtaagaaagataggcatgagcatgtggtaactaggttagcacgtgtgcttcccagcccaggagcgaccaaatactgtggtggcgtcaggtgtgcagtggagaggaatatagaggctgtatggcctccctcagtgagggcagggcaagagggatcactctgagagaacaaaaataggccccaagttgctaagcagtgattgggaaccttcctttccttggcggagatgcatgacattccctaccgatccccagacacagcctgtgggactcttaggagaaatggtgatttactgaataactgacccgttgccgagatgagtacaatgaagtggaggtgatgaactcaaatcgtcttccagggccaggcggctgaccggggtgagcgtagtggcccgctggggaccatggccgccctgacagccacacccacctggagctgacttggttctggctgttgctgccactgtgaaatctgtatctctctccatctctgctctactatccccggccttgccagacagtgttctttttcggaagaagtctagatttttgcatgaaaaaaactcaatctttaaaggtcgactcagaacattttaaggaggcctccacttggtctgatgcagtcttgctaattaagaactaaaggccttctgaccttcttggtgctcatgctgtacggcatctgaatgtctcgaccgagtctgagccgtgcagctgtcctccacctgcgaaagtaatgagaatcctatcacgggacataaggataggtctaaacagggtccatgccaagaaaacagtggggtgctctcccaggcctctcccctgtccactaaccctggccttgccggctgccttccaggctctgggggaagagctcctgcattcttccctggccaccttggctccagggctccccagagagcctcttccctccccaagtacctgagaaagatgagagaggcacgtgctctgctgggaaggtccagtgagcggttcaagggcctggaatctccctacggccaagtctaagggttctgggattctgggctttgtgggctttgcttgcttgctgggaatgggctttccctgtcccgccctgccccacctcgcctctgtctctcagaagctccagaacccagcagtgacctgcaaaatgtggcctctgatgggggcttagggtgggagatggggagagcctacattgtcttttgctccttgaaaactttaatagctcctattttccagagaatggtgctttgtgagcaacatgcgagtaagagagaaataggaggaagggggagtaggggcggatgggagaagagtggctcatttttacctctcactgccttgacattttgtgaacgtgaagcttaaactttctgggcttacaagacccaggggcacgtcagctccttagatgggctcagcctgacacataattcttaaacctttcctgtttaagaaacttctagaggctgtgtactctcaccaatcctcttcgagaatttgttcatgtgtatttccccattatatggatgaggctcaggataacagcatagtggctaccttctactgagttttgaggtgctaataagtatgtttgtctgaggctgcacatgtgggtggctctgtgtgtatgatccaagggacaaaatgacgatgtaggaaccagcaagaacggaatctgggctgatgcttcagtctccacctgggtgatggctagcctcccgccctccaccaccgcatcccacacgtgctgcgcactgtccccgtgtctcctggagaaccaaactggagaaaacctttctgagtatctctcatagtaccccttccttaagaagatgtggtttagagcatgtgtgcaatcctgcctctgtaattaggaaacggagcccgaggctttccattgttggttgaacccaggacagctggtgctattcacaggctgaagaactgggcagttcttacttgggtctgtcctaggatgtggaggaagttcaggactaacgctaggcagagagtatgactcggtttacccagcctaggggcctctggatgggaacactccattccaagatctcagcagagcagggcttcctggcttgaggctggaagcctttgggaagaggcccagctgggacattccctgggcacctgtcttccgctgaagggagcaaggtgccctctgggactgacagccatgaccctctgtgccatcctcaatccttgagccatatatcaagagtcctctagagccggatggtcctcaaaagtctgtccaaggaatgccaacgttcaccgggctctgagaaacgacgcaaatctctgagctggggaccacttggagaaccggcttagtaacagtcctgatcttcgcaagccagcttcttctgcatctgaggggctcctggcgcccagaggaggcagacagatgtcttctagctgagtttctaaccgcatgatgagactcagaccttccgctgcactagaaaatctgcaacagtgtccctgagtcacttctccttagtgggcagactcgtgttagatttgtggaacccagctctctgatttactccttttggaaaacccatggaatttcatgtataaggctttcatttgtattttaaggtttttctgtttgttttgagtatatacatggtgctcaatagcaacatcttagcagatgaagcagtttatgattccactccctcctgtatgacaggtagccactatactgaatcaaggtgctgaactcaaatcacaaaattctggcttaccgatacaacaaccaatacatctttgttctgtaatgtaaaatttgactccttacttttataacttattaaagttaaaatgtctgtgtttttgcaaatcatg

SEQ ID NO: 97 - DNA, 3003 bp, Homo sapiens
aggatatctttagccaaaggaaaagctccgcattcccacccagtccagaaattgaaatactatcagggggcaagagcctttctctccagctacacactccatctcccgggagcaaggggaaactccgagaggagggcaacagagccagcatcttgccagggccccggaggaggggttccccgctacgcctgtgccggaggagttccagtcaccgagcgaggggcgcaagggtgggtgcatcctgcgctgcggcgggcgcgctacccagacgctggtgtgcagagccacatgaagcctgctggggactgggggccagggagcagcaagccagctgggactgaggcggacgctgtctcagggagacgctgactcgcaaagacactcccttccttgtgcctgggtaaaaagtctcctcctggggtccctggccatcctgaatatccagaatggtgtttctgaagttcttctgcatgagtttcttctgccacctgtgtcaaggctacttcgatggccccctctacccagagatgtccaatgggactctgcaccactacttcgtgcccgatggggactatgaggagaacgatgaccccgagaagtgccagctgctcttcagggtgagtgaccacaggcgctgctcccagggggaggggagccaggttggcagcctgctgagcctcaccctgcgggaggagttcaccgtgctgggccgccaggtggaggatgctgggcgcgtgctggagggcatcagcaaaagcatctcctacgacctagacggggaagagagctatggcaagtacctgcggcgggagtcccaccagatcggggatgcctactccaactcggacaaatccctcactgagctggagagcaagttcaagcagggccaggaacaggacagccggcaggagagcaggctcaacgaggactttctgggaatgctggtccacaccaggtccctgctgaaggagacactggacatctctgtggggctcagggacaaatacgagctgctggccctcaccattaggagccatgggacccgactaggtcggctgaaaaatgattatcttaaagtataggtggaaggatacaaatgctagaaagagggaatcaaatcagccccgttttggagggtgggggacagaagatggggctacatttcccccatacctactatttttttatatcccgatttgcactttgagaatacatctaaggtcatctttcaaaagagaaaaattggacacttgagtgactttgtttttagttttgtttttgtacattatttatgtgattgttatggaattgtcacctggaaagaacaattttaagcaatgtcatttctagatgggtttctaattctgcagagacacccgtttcagccacatctaaaagagcacagtttatgtggtgcggaattaaacttccccatcctgcagattatgtggaaatacccaaagataatagtgcatagctcctttcagcctctagccttcactcctgggctccaaaagctatcccagttgcctgtttttcaaatgaggttcaaggtgctgctttgcatgcctgccaacccatggaagttgtttcttacttcttttctctcttatttattaaccatggtctgagagttgtttttgttctatgtaacagtattgccacaaaactataggcaaatcgtgtttgcagggagatttctgatgcctctgtgggtgtgtgtaagttaaagtggccacatttaagaaggccaagctttgtagtggttgcacagtcacactgatatgctgatttgctctttctcattgtatgtctatgctttgtcatcagtgctatagtaaattacaaagaaataggtagattgtatgaacatacccacaaatgcctatgatttaggttaccaatgtattctttctcatttggggttttgcttctgtctgtctgtttattggaaacttgtacttcaagtagggggaatcctaattctaataactccttagctaagttttattattcaggcaataaacatgttttcatgtaatactggcttactttgtaatttacatctgtaactttcatatttctaaaaggggccaatgcaaaaggagagagaaggactggatttaagccagtttacttagagtatatgataaagaaggcagaggaatagctacatatttggcaattctcctctctgtagtcaccctgacatcctcacaagaaaacaaatctagccattgcccaaactttaaatttgatctctataggtctgcttaaagactcaaattttctccagtttctctcataaattcaattgcaaaagtttctgacaaggctcataccctgtacccttatgcagagcaagcattccatcctaagttataaactacagtgatgtttaattttgaagccaggtctacattatttaattaatggcttcaaaaggtggagatgcactttatttaatgtctttccctagctaattcttactctcaccttaaatatgctttcttgttgcatatatgcacagatacacacacacacacacacgaaaataaataaatgttcatattcttctgttcaacagacatttattttctcctctcccttgaataagaaaataagttttccattcctatgaactgtctaatatctttctattacagaaggggaaactgaggctgggaaaggctaaatgacttatcctccatcagttataacagcccctggtcttcttaaatttaaacacgggacttcccgaactaatttttttaaggatactgaaaaatgagagagagtggtcgaatgcctgaaattttgcttaacttactgtacttaaaatcaattataacttctttttgttactcagggccccactttttgttgctttctagacttgtgtgtagaaagaagattaatgatcacttaaagtagtttccttctttattctgaaaaaatgaggaaaaaataacaacagtggcaaataaaatcatatttggtact
